United States Patent Application Publication US 2025/0122569 A1 - sequence listing, part 4

SEQ ID NO: 474 - DNA, 17866 bp, unidentified
  source 1..17866: mol_type = unassigned DNA
  misc_difference 6943: note = a, c, g, or t
  misc_difference 6944: note = a, c, g, or t
  misc_difference 6945: note = a, c, g, or t
  misc_difference 6946: note = a, c, g, or t
  misc_difference 6947: note = a, c, g, or t
  misc_difference 6948: note = a, c, g, or t
  misc_difference 6949: note = a, c, g, or t
  misc_difference 6950: note = a, c, g, or t
  misc_difference 6951: note = a, c, g, or t
  misc_difference 6952: note = a, c, g, or t
  misc_difference 6953: note = a, c, g, or t
  misc_difference 6954: note = a, c, g, or t
  misc_difference 6955: note = a, c, g, or t
  misc_difference 6956: note = a, c, g, or t
  misc_difference 6957: note = a, c, g, or t
  misc_difference 6958: note = a, c, g, or t
  misc_difference 6959: note = a, c, g, or t
  misc_difference 6960: note = a, c, g, or t
  misc_difference 6961: note = a, c, g, or t
  misc_difference 6962: note = a, c, g, or t
  misc_difference 6963: note = a, c, g, or t
  misc_difference 6964: note = a, c, g, or t
  misc_difference 6965: note = a, c, g, or t
  misc_difference 6966: note = a, c, g, or t
  misc_difference 6967: note = a, c, g, or t
  misc_difference 6968: note = a, c, g, or t
  misc_difference 6969: note = a, c, g, or t
  misc_difference 6970: note = a, c, g, or t
  misc_difference 6971: note = a, c, g, or t
  misc_difference 6972: note = a, c, g, or t
  misc_difference 6973: note = a, c, g, or t
  misc_difference 6974: note = a, c, g, or t
  misc_difference 6975: note = a, c, g, or t
  misc_difference 6976: note = a, c, g, or t
  misc_difference 6977: note = a, c, g, or t
  misc_difference 6978: note = a, c, g, or t
  misc_difference 6979: note = a, c, g, or t
  misc_difference 6980: note = a, c, g, or t
  misc_difference 6981: note = a, c, g, or t
  misc_difference 6982: note = a, c, g, or t
  misc_difference 6983: note = a, c, g, or t
  misc_difference 6984: note = a, c, g, or t
  misc_difference 6985: note = a, c, g, or t
  misc_difference 6986: note = a, c, g, or t
  misc_difference 6987: note = a, c, g, or t
  misc_difference 6988: note = a, c, g, or t
  misc_difference 6989: note = a, c, g, or t
  misc_difference 6990: note = a, c, g, or t
  misc_difference 6991: note = a, c, g, or t
  misc_difference 6992: note = a, c, g, or t
  misc_difference 6993: note = a, c, g, or t
  misc_difference 6994: note = a, c, g, or t
  misc_difference 6995: note = a, c, g, or t
  misc_difference 6996: note = a, c, g, or t
  misc_difference 6997: note = a, c, g, or t
  misc_difference 6998: note = a, c, g, or t
  misc_difference 6999: note = a, c, g, or t
  misc_difference 7000: note = a, c, g, or t
  misc_difference 7001: note = a, c, g, or t
  misc_difference 7002: note = a, c, g, or t
  misc_difference 7003: note = a, c, g, or t
  misc_difference 7004: note = a, c, g, or t
  misc_difference 7005: note = a, c, g, or t
  misc_difference 7006: note = a, c, g, or t
  misc_difference 7007: note = a, c, g, or t
  misc_difference 7008: note = a, c, g, or t
  misc_difference 7009: note = a, c, g, or t
  misc_difference 7010: note = a, c, g, or t
  misc_difference 7011: note = a, c, g, or t
  misc_difference 7012: note = a, c, g, or t
  misc_difference 7013: note = a, c, g, or t
  misc_difference 7014: note = a, c, g, or t
  misc_difference 7015: note = a, c, g, or t
  misc_difference 7016: note = a, c, g, or t
  misc_difference 7017: note = a, c, g, or t
  misc_difference 7018: note = a, c, g, or t
  misc_difference 7019: note = a, c, g, or t
  misc_difference 7020: note = a, c, g, or t
  misc_difference 7021: note = a, c, g, or t
  misc_difference 7022: note = a, c, g, or t
  misc_difference 7023: note = a, c, g, or t
  misc_difference 7024: note = a, c, g, or t
  misc_difference 7025: note = a, c, g, or t
  misc_difference 7026: note = a, c, g, or t
  misc_difference 7027: note = a, c, g, or t
  misc_difference 7028: note = a, c, g, or t
  misc_difference 7029: note = a, c, g, or t
  misc_difference 7030: note = a, c, g, or t
  misc_difference 7031: note = a, c, g, or t
  misc_difference 7032: note = a, c, g, or t
  misc_difference 7033: note = a, c, g, or t
  misc_difference 7034: note = a, c, g, or t
  misc_difference 7035: note = a, c, g, or t
  misc_difference 7036: note = a, c, g, or t
  misc_difference 7037: note = a, c, g, or t
  misc_difference 7038: note = a, c, g, or t
  misc_difference 7039: note = a, c, g, or t
  misc_difference 7040: note = a, c, g, or t
  misc_difference 7041: note = a, c, g, or t
  misc_difference 7042: note = a, c, g, or t
atgttcaacaaacaccctaaaggtctgattgccgcatcctttgctaatttgggcgagcgtttcggcttttataccatgatggccattcttgtactttttctgcaagccaagttcggactggatggaaaagaggcaggtttgatctactcaacattttatttttctatttacattcttgcattgataggtggtattattgccgacagaacccgtaattacaaaggtaccatctttgccggtattgttttgatggcggtaggctacttgatgcttgccatcccgtctcctacaccggttgccaataaaaccttgtttttggtgattacttgtgcggccttgtttgtcattgctttcggaaatggtcttttcaagggaaatcttcaagcgctggtagggcagatgtacgacaatccccaatattccagcatgcgtgattctggtttctccttattctatatgttcatcaatgtaggtgccatctttgctccgtttgccgcagtaggcgtacgtaactggtggctgtccacattcggctacaattatgatgccgacctgcctgccctttgccacggacatctggcaggaacgctgactcccgaagctgtggacacttatagtgcactggcaacgaaagccactatttccggaacacccgtaacggatatgacggtatttgccaatgaatatctgaacgtgtttaccaccggtttccattatgcattcggtgtagctatcttggctatggttctttctttggtaattttcgtcattaacagaaagaaattccccgatcccagcaagaaggtggctgcaaaagcgggcgatgccactgcagtggagatgagcgcacaagaggtaagacagcgcatgtatgcattgtttgccgtattcggtgtggtaattttcttctggttctcgttccatcagaatgggttgacactgacgtattttgccaaggaatatacagatttgaatttgttcggcatggctatttccgctgagctgttccagtctttgaacccgattttcgttgtatctctgacaccggtcatcatggctgtctttgcagcacagcgtgccaagggtaaagagccttccactccgcggaagattgccatcggtatgggtattgctgccaccggcttccttataatggctatcggttcttatgtaagcaacttgccgatgcacaaggatattatcgctttgggtacctctccggtgaaggtgactccgctgttgctgatggttacctatctgatattgactgttgccgagttgtacatttctccgttgggcatttcattcgtatccaaggtggctcctcccaaatatcagggtatcatgcagggcggttggctcggtgctactgccattggtaatcagttgctcgttatcggtgctatcctctacgaaagtattcctatctggatgacgtggacggtatttgtagtagcgtgctgcatttccatgttcaccatgctgttcatgctgaaatggcttgaaaaggtggcgaagtaatcggaaacgaaagataaaactaaaggctgcgcaatgttcgtaatgaactgcgcagcctttagtttttggagggcttttaatgccgggactcagatttccagtcccatgatgtagtcattcatgtaatatccgtttcctatcgggaaatccccttcacggagttttcgcattcccatatgttcgtaaaactgcagtgccttgttggtgcggtttacattcaattccatcagacaagggccgggatgtacttccttgatgtacttgatggcttctcgaaagaggaaactgccgcaatgtgcaccctggtaataggggagcacataaatcttttgcaggtggaataaatcttctccttgctgctgtacggacacatagcccgccgcttcacattcttcgtaggccaggaagtagacgtggccttcctcttccatttgcttgcggatattgtccaatgaatacatccattccatcatgtagtcggtctgttcgggagtaaggatatccttatacgtgacggggaatatttgctgcgcaagtttctgaatcagtgcgcagtctgctgtcgttgcttttcttatggtaaacatatcggttgtatttatactgtttggggtgtaaagttaagccttttttgtgaaacaatcgttatctttgcagaccgttaccgaactaactaattctgattttaaaaattatggcatttacgagcaacattatgattgtccgccacagattgctgaaggaactggtaaagctgtggaataacaacgaacttgtggataaaatagaccggctgcctatcgagctgagtccgaagaggtccaagcacgcgggacgctgctgtgtgcacaaagagcgcgcggtgtggaagtacaagtcattgccgcttctgggactcgatatggaggacgagacggatgagctgacccccttgtcggagtacgctgcccgtgcactggacagagcggaaaatggcaggccgaaagacaacatcatgtgtgtgattgacgaagcttgttcggcatgtgtgcagattaactacgagattacgaacctctgccgcggatgtacggcacgcagttgccaggtgaattgtcccaagaaggcagtgcacgtcaaggagagcgggcaggcatggattgaccatgatgcgtgtatcagttgcggcatctgccataagagttgtccctaccatgccattgtttatattcccgtaccttgtgaggaggcttgtcccgtgaaagccatcagtaaggatgagaaggggatagagcatattgacgaaagcaaatgtatctattgcggaaagtgtctcaatgcatgtccattcggagcaattttcgaaatatcgcaggtgttcgacgtgttgcacagaatccgcaagggtgagcaggtggtggctatcgtggctccgtccatcctggggcagttcaagacgactattgaacaagtatatggcgcattgaaacaagtcggttttacggatatcatcgaggtggctcagggagcgatggataccgtcagcaacgaggcgcacgaactgattgagaagctggaggagggtcagaagtttatgacgacttcctgctgtccgtcttatatagagctggtgaacaagcatattcctgccatgaagccttacgtgtctggcaccggttcgccgatgtactatgccgcacgcattgccaaggagaagtatccggatgcaaaggtggtctttatcggtccttgcgttgccaagcgcaaagaggcgcagcgcgacgaggcggtggactttatcatgactttcgaggaggtggcttccgtgcttgccgggctggatattcagatggagcaggcaaagccctattccatgagtttcacttccgtgcgcgaggcgcatggttttgcgcaggcaggaggcgtgatgggtgccgtgaaagcctatctgaaggaagaggcagataaaatcaatgccgtacaagtggctaatctggataagaaggctatcggtgcgttgcgtgcttacgccaagtcgggcaaggctccggggcaatttattgaagtgatggcttgcgagggcggttgtattaccgggccatgttcgcataatgaaataactgccggaaagcgccagctgacgcaggagttggcaaagagaaaagagacgtattagccctttgtccgtttatatgaagcatttgattgacaaactgcggagcaatcgcaggctggatgccgaagagtataaagccttgcttctttgccgggacacaaaacttgcagcctacctgcaggatcttgcccgggaagaagcgcttgcccgctttggcaataaaatcttcattcgtggactgattgagataaccaaccgttgccgcaataactgctactattgcggcatacggaaggagaaccggaacataacccgttatgagctggcgcaggaggagattctttcgtgttgccatgaaggctatcggttgggcttccgtacctttgtgctgcaagggggcgaagcgccggcggtgaaggatgaggggatggtggagacagttgccgccatccggcaatccttcccggattgtgccattaccttatctttgggcgaaaaatcgcgggaagcctacgaacgtttcttcctggcaggtgccaaccgctatctgttgcggcacgaaacctgcaacgaagggtattatcaccggcttcatcctgctgagatgtccctttcccatcggttgcaatgcttggactggctgaaagagataggctatcaagtgggaaccggaatcatggtaggcagtccttaccagacggtggaccatctggtagaagatattctcttcatcgaacggtttcagccggagatgataggcatgggaccttttcttccgcatcacgatactccgtttgcctcttttccgccgggagatatggagttgacgctgaagttgctttctatcttccggctgatgcatcccgcggcactgatacctgctaccactgccctggccacacttgctccggacggacgggaacggggaatattggctggcgccaatgtcgtgatgcctaatctttcgccttctcatcagcggacgaagtactccctttatgataacaaagcttctgcgggtgccgaagcggcagaaggtttgcaaaaattggaggaacaactgaaagggataggctacgaggtatcaaaagagagaggagattatgagaatggagaattgaccgttgataattgataattttcaaatcttcattctttattttaattaccaattgtcaatttacgaagtgtataacataaagtcaagacaagcagaagaattcatcaatcaccaggagatattggatacattggagtatgcgcaggtaaaccgcaacaaccgtccgctcatcgaaagtttgattgacaaggctgctttgtgccagggactttcccatcgggaggcggccctgctgctggaatgtgacgagctggaactggtgcagcgcatctatcatctggcacgtgaaatcaaacggaaattctatggcaaccgcattgtgatgtttgccccgctttacctttccaactattgcgtgaacggttgcgtctattgcccgtatcatgccaagaaccgtaccatcccccgcaagaaactctcgcaagaggagatacgccgcgaggttatcgccttgcaggacatgggacataaacgcctggcgctggaagccggagaagaccctcgaaacaaccctatcgactatatcttagagtccattcgcaccatctacagcatccaccacaagaacggggccatccgccgggtgaatgtcaacatagccgccactacagtggaaaactatcggttgctgaaagaggcaggcatcggcacttatatcctttttcaggagacttacagcaaagagcattacgaagccttgcatcccacgggaccaaaaagtaattatgcctaccacaccgaagcgatggaccgcgctatggagggtggcatcgacgatgtaggtatcggtgtattgtttggtctgaatacctatcgctacgacttcgtaggattgctgatgcatgccgaacatctggaagctacctttggcgtgggtccgcataccatcagcgtgccgcgcatctgtccggcagatgatatttcgaccgaggattttcccgatgccatctcggatgagatgttctgccgtattgtggcggttacccgcattgcggtgccttatacgggaatgattatttccacccgtgagtcggaagccgtacgccgtcgggtgctcgaactgggcgtttcgcagataagcggcggttcgcgcaccagcgtgggaggctatgccgtgccggaagccaaagaggaagattcctcccaattcgatgtgagcgaccggcgcacgctggatgaagtggtgagttggctgctcgacctggggcatatccccagcttctgcaccgcctgctatcgcgagggacgtaccggagaccgcttcatgtcgctcgtcaagcgcggacagatagcaaactgctgccagcccaatgcactgatgacattaaaagaatatctggaggactatgcctcctccgaaaccaaggagaagggcatacagctgattcgtgaggagatggagcatatcccgaaccccaagatacgggcgatagccgaacgtaatcttcaggagataggggaggggaaaagagactttagattttagatttcggatttatgaataatacacctcgttccaaccgcctgcacattgccgtctttggacgacggaacagcggaaagtccagccttgtcaatgccttgaccgggcaagacacggcattggtatccgcaacgcccggcactactaccgaccccgtgaccaaagccatggaagtatatcctttgggcccgtgcctctttatcgatacccccggttttgatgacgacgaaggcgaactgggcggtatgcgcgtggagcgtaccttaaagacggtggagaaagcagacatcgccctcttgctttatgaagctgacggaacgctggaacagcaatggctaaagctgctggcagcgcgcgaaatccccgtgatactgatactgaataaagccgattcccgtcaagacaccgcttccgtggttcttcggattgaaaaggagtgcgggcaggctcccgttgtggtcagtgccaaagagggtaccggcattcaaggtatcttcgatgctatcctcgaaaagcttcccgagaattttggtgagcagactatcacgggcgatttggtgcgtgaaggagatgtcgtcctgctggtgatgccccaggatatacaagcccccaaaggtcgtctcattcttccgcaagtgcagaccatccgcgaactgttggataaaaagtgcttagtgatgagctgcaccaccgacaagctgcaagcctccctgcaagcccttgnnnnnnnnnnnnnnnnnnnnnnnnnnnnnnnnnnnnnnnnnnnnnnnnnnnnnnnnnnnnnnnnnnnnnnnnnnnnnnnnnnnnnnnnnnnnnnnnnnnntgcttagtgatgagctgcaccaccgacaagctgcaagcctccctgcaagcccttgcccgtccgcctaagctgataatcaccgattcacaagtattccccatcgtctatcaacaaaagcctgccgaaagtagtcttacttccttctcggttctttttgccggctacaaaggagatatcaatgccttcgtggagggagctgccgctatccatagcctgacactccaatcgcgtgtactgatagccgaagcttgcacccatgctccgctgaccgaggacatcggcaccatcaaaattccccgcctgctacgaaagcgcatcggcgaggaattgcagatagactttgtatctggaaatgactttcccaaagacttgtcccgatatgatttaattatccattgcggcgcttgcatgttcaaccggaagtacgttctcaatcgtatagcccatgcccgcgcacagcacatccccataaccaactacggagtagcaattgcgagtctgaccggtatattggataaaattgttatctatcggtaaatatccctctccctctctgttcacgttactgatgttatagagtagtgtgaactacttttcttgttaacgatgcttaatataaggtactttgtaatacaaggtactgatataatacatatatttgtgtcatacaaggaacaacaatagaatgaatgagaacactcattactctattgcgcagcaaaatagtaaatcgtaaattgtcaaatagtaaataccattatggatgtaaacaatgtaaagtcgcaaatgcgcaagggcatgcttgaatattgcatcatgttgctgcttcacaaggagccggcttacgcttcggatatcattcagaagttgaaagaagccagactgattgtagtggaaggtacactttatccgttgctcacccgtctgaagaacgacgacttgctgggttatgaatggattgagtctacgcaaggtcctccccgtaagtattaccggttgacggaaaaaggagaagtctttctcggtgaactggaaatgtcctggaaagagttgaacgagacggtgaatcacatcagcaattcttgaaatgaccacagagaatatgctgcattcgccgaatggtaaatagtaaatcgtaaatagtcaaattgtaaataaatagtgtgttatgaaaaagacattaactgtaaatttaggtggaaccgtttttaatattgatgatgacgcataccgccttttggataattatctgagtaatctcaagatacacttccgtaaggaagccggtgccgacgagattgtagatgatatagaacgccgcatttccgaactctttgccgagaaattgtcggccggttcacaagtaatcacgattgccgatgtggaagaggtgattgcccgcatgggaaagccggaggacatggagacggaaggagagagcagcagtgccgatgccggtagtacaaatgccggaggtggttatggtgccggtgcatggagcagcaataccgcttatagcactacacgccgccgtctctaccgcaatcctgatgacaagatgctgggtggtgtcatcagtggaatggctgcctacctgggatgggatgtaactttacttcgactgttactgcttgtcatcttgatttgtggggtagggacattgataccggtctatattgtgtgttggctggttataccggaagcccgcacagcagccgagaagttgagtatgcgtggcgaggccgttacggtggagaatatcggaaagacggtgacggacggttttgagaaggttgccaatggggtgaatgattatatgaggtcggacaaaccccgtactttcttgcagaagttgggagatgcattggtgatgattgtcggctggttcttgaaaatctgtctggtgatatttgccattatctgcagtccggtattgtttgtatttggagtggtatttgtggcgttgttgtttgctgcgatagcggtggctgttggtggcggtgcggctctcatttcctttttcccgatggctgatgtggtactgcctacttctccgttgtctgctattgtgatgtacattgcaggaatcttgctggtaggaattcctttggtcagtcttgtatgggccatcttcagtcagatattcaaatggcagccgatgaattccggtttgaagtggacgctggttatcctttggattgtaagtgcggcttgcttcggaatctgttttgcagtgcaaggggctactttcccggaattgggtatatttaacttctgagaatagtaatttcttttttaattgatatcgtgtttgtaggaatctgatttctataaacacgatattttttatttcaatgtaattatttgttatacagtggaatatttcgtttggaaaaggtgttttttaaacgttcgtttaatgaacgcaaagataacgtgtatttttgaatctcgcaaaatgtttaataaaaatattctataaatttctttttagtgagtataatactttgtcagtaagcctattgcattgtatttctctaacttcttccttttactaatttttaagtaatcttccctctttaattttcttaaatattgacgttcaaaaaacgaacgtctattgaacgctttttgcttgcaatagattcgtttacagcattttacctgttaggtaatgaatgactgcaaaaaatctgttgacaagaagggcgtaaagcttgtcgtattctacataaagtgcccgcaagtaattgaatttcaggtgtatgtaagagattcaaagccccaggagaacacccttgtctgaacaaaagcataaaaatgggaatagagaaagaggtcgaaatctggtatgctatgcgtgccacctaccgcagagaaccggatgccatgcatctgctcaagaaagagaatttgggctgtttcattcctatgcaatacaagatatgtataaaaaaagggaaaaaagtccgtgctctggttccggtcgttcataatctgctttttgtccatgcccgtccttccgatgtgcagcgtgtaaaatctcaagtcacttatctgcaatatatcaccgatacccgcagtgggcagaagattattgtccccgacagtcagatgcagcgtttcattgccgtatccggcacttacgatgaccatcttctttattttcaaccggatgaattgaacttgtccaaaggtaccaaagtccggattaccggcggtgaatttgaggggcaagagggtgtgtttctgaaggtgaaaggcgcacgtgaccgtcgcgtggttatcgaaatacaaggtgtcatagctgttgccatggccactatccatcccgatcttatagaagtaatcggctgaactttaatttttaattcttaattctataattgcttatgtctctttccgaagaagcaatcactcttcagcgtgctgcgcacgaactgatgtatttgggtatggacggcagtcccgtctatagcgatgacttgtcacggcggaacggtgaggtctaccgtcttaccatggctttgtaccggtcgggtgtaaaaggcactaccatcgaagagcaggcaaatgtctgtcttgcccttcttatgggttacagcgcctcttttgtggaccatggcgaaaagcagcagcatgtccaggaagtgctggactgttgttgggatgtgctcgacgcccttcccgcttccttactgaagctccgtctgcttactgcctgctacggtgaagtgttcgacgagtctttggccgacgaaggccgttccatcatcgcctcctgggattccttatcacttactcccgaacagcaggaagcggttgatgaatttcagaatgtgacagacaatccctatccatgggaatatatcgatgaataaaacttttcattataatgcttaacaataaatccgtattgattaccggaggaacgggttccttcggaaagaagtttgtggaaaccattctccgtgattatccgcaagtaaagaaaattattatttactcccgcgatgagctgaagcaatttgagctgaaacagaaatatcccggtcataagtatccgcaactgcgtttctttatcggtgatgtccgtgacctcgaacgcctgacgcgggcttgcgaaggagtggacgtgattatccatgcagccgccatcaagcaggtggataccgctgaatacaatcccgaagagtgcatcaaaaccaatgtacacggtgcgcagaatgtgataaaggctgctcttgccaccggtgtacagcatgtggtggccctttctaccgacaaggcttgtgcccccatcaatctttatggcgccaccaagctcacttccgacaagttgtttactgccgccaacaatatcagcggttccaaggacatcaggttctccgtagtccgttatggcaatgtgatgggttcccgcggttccgtaatccctttctttatcaacaagcgtgacaacggggcgaaggaacttcccataaccgatatgcgcatgacccgtttcaacatttcactggaagccggtgtcgctttggtcatgtatgccatcggacatcacctgggtggtgaaatctttattcctaagattccttcctatcatatccaggacgtggctaccgccattgcacccaatctgccgcaggtggaagtgggcatccgtccgggagagaaactgcacgaggagatgattactgtaaccgatgctcttgatacaatcgatttgggcagatattatgtcattcttccttccgtatctttcaagcacagtcgcgaagagttcatcagacatcacaatgcagtatccgttcccgacggtttccactacagcagtgacaacaatacggagtgggagacagtagagactatgcgcgagaatataaagaaatacgttgaccctaatttcgaggtgaaatgataagcaagcctattccatacggtcgtcagcatatcacagatgaggatatccgggcagtcatcgataccctgaaaagcgattacttgacacaaggtcccaaaatcagggaatttgaaacgaaatttgccgaatatgtaggtgcacaatatgccgtagcggtgaacaatgccacttcggggcttcatcttgcagctaccgcactgaatgtaaagccgggcgacaaggtgattgtcactcccatgacctttgctgccagtgccaactgcatccgctattgtggcggcgaggtggtattctgtgatattgacaaggatacttacctcatggatatccgtaaactcgaagccatgcttaaagcttctccccgcggtacttacaaaggtattgttccggttgattttgcaggctatcctttggatctggaagagttcagaaagcttgccgacgagtacggcttgtggattatcgaggatgcctgccatgctcccggcggctatttcatggacagtaaaggcaagaaacaacattgtggcaacggttgttttgccgactgtgccgtattctctttccatcccgtgaaacatatcgctacgggtgagggaggcatggtgaccaccaacagcaaggagctctatgacaggctttgtctttaccgtacgcatggcattacgaaagaccctgctttattacacgagcatcatggtggctggtattatgagatgcaggagttagggtataattaccgtctgactgattttcaggctgccttgggtatttctcagctggagcgtgcgaaagcaggtcttgaacgccgccatgaaatcgtgagacgctataatgaagcgttttccggaatagatggcatcaagactccgttcaatgctgccgatgtctatcatgcttatcacctttatatcattcaagtagctgaccgcttgggcctttataattatctgcacgagaacaatgtctatgcgcaggttcattatgctccgcttcatctgatgccttactatcagcagtggggcaataggaaaggcgatttacctatagtagaagagtattacgaacattgtctgagtcttccgatgtatcccacgctgacggacgaggaacaggagtatgtgattgaaaaggttatagaatttgtagcgaaatgaaaaatatagcaatcattcctgcacgtggcggcagtaaacgtattccgcgtaagaatatcaagccctttatgggtaaacctatcattacatattccatagaggcagctttacaaagcggtctttttgaggaggtgatggtttctaccgatgatgaggagattgccggaatagcttgtaagtatggtgccaaagttccttttatgcggagtgccgagatgtcaaatgactatgccggtactgatgatgtaattcttgaagtactgaggaagtataaagagcaaggcagggagtttgaaacggtttgttgcatttactcaacggctccttttgtcactcccgaaagactccgggaagcatacggaaaaatgaattcggagatagattccgttttcacttgtgtggcttattcctatcctatacagcgcagccttcacatcgtggatggaaaaattagtatggtttatcccgaatacaaaaatgcacgttcccaagatttagaaccgatttatcacgatgccggtcagttctatttctctcgcactgctccctttgtggagagccggactttttggggtgagaatacagccgggttggtactttccgaacttgaagtgcaggaccttgatacacagactgactgggcattggcagagatgaagtatgagttgcttcataaatgatgtaatgcagaaaatctatctccgtgccgatgcaagtgctgccatcggctacggtcactttattcgtactctggctttggccgatatgctgaaggacgattttgattgtaccttctttacttgccatcctaccccttatcaggtgagtgagatggagaaggtatgtcctttcatccccttacaggaagaatcgcattatgatgagttcctttcccttttacaaggtgacgaaattgtggtacttgacaactatttctttactactgattaccagcgtgccatcaagcaaaaaggttgctgtctggtgtgtgtggatgatatgcacgacaagcactatgtggctgatcttatagtcaatcagggattgggttacacgcgtgatgactattcgtgtgaaccatatactcaatttgcctttgggcttcaattttcattgttgaggaggcctttcttcaatgttgcgctgcagaataaacggaacaattattcaggaggtttatatgtattggtggcttttggtggttctgatttcttgaatttgacgtatcagaccattcatgcaattaaagccaaagacaatgtgaagaagataacggcaattgtcggtgattcgtatgcagccgagaatatggttgatgaccccaaagtaacctatcagaagaatttgtctgccggttccattgcagacttgtttagtactgtagatgtcgccatattgcctgcctctacgatgatgaatgaggcattggcctgtggaactcctgttataggagggtattatgttgataatcaggagtacgactattatatgtttttgcgtgaagggctgattcagggggtgggtgattataccgatgccgctgcctttactcttgttgctgagaatttggataagatggccattcgtaaaagacatgccatcactccggatattcccaaacggtttgtcaatttgtttaaaagtctgttgatatgcaagtaacttcacaaagagcttcggccatattgtataattatctgtctggcaaccattttgataaaccgttcttattgccggcaaatgtgtgtcctgtagtgcccctgtcgtttatgaaagcaggtgtcggttttgaatttatagacatagatgaaagccatgccatgtcaaccgagaaatgtttgacagctatagaggcgggaaaatattccggtcttgtatttgtgcatgcctacgggaaaaagtatgacaacaaagaattttaccgagcagtgaaaagtctcgatcaaaatctttgtatcattgatgattgttgtttgtgcattcccgaattggtagattccttgcctgaaaatgtggatctctgcctttacagtaccggatatgctaaattcatagaactttcctatggtggctatgcaagttttaggggggtacgaagttgttgattattagtatgatagcattagtgaacaaaagcattcggtatatataaggaaatgtctcctggagaatgtcagatatatgcttccggctgactatccttggctggacgcctcaaatttgcaaatgaccgatgaggaatattttgacatcattgaaagaaagctcccaaaagtgattgcggaaaaagagaaaataaacaagatatacaggaatctgcttcctgaatcgattcagatgggagatgatttccagaactggaggttcatgattgtcatcgagaaccggcagaaggttcttgacgcaatattcaaggccggtctgtttgccgggactaatttcccttcggtttcatacatgttcaaaggtgtttcttctcctgttgcggaagtggaggtgaagcatatcgtcaatttgtttaatgatttctggttcagtgaagcacaggcaagaaagatctgtgatgtgataaattcggttatatgaataaaagattattgatactgggcgcaggtgaaatgcaggttcctgtcatccgaaaggcgaacgatatgggattgcataccatagtcgcagatatggatgcgaatactccgggaatggggtacgcctcggaaccggttcttgtcagcacgatggataaggaaggtgttttggaatgtgccaaacgtcactctgttgacggcatacttactacaagtgacgcgcctgtaaatgtggtttcctatgtcggggaacagctggggcttccgtccatgtccactgaggtcgcaaaaatctgtacaaacaaatacttgcagagggaaatgtttgcggccaacgggattgatgtaccatttttcatgctttgtgataaagatacggacttgggcacattgcaagattatccatatattgtcaaaccggtagattcctctgcaagccgcggagtaaaaaaggttacaaatcataaagaacttgtacttgctttttccgaagctctcggttattcccgtaccggaaaggccattgtcgagggctttataacaggccgtgaattcagtgttgaaacatatacgcaaaacaataaaactaccgttgtcactattacggagaaactttgtatcggtgaggcagaaggcttctttgttgaagatacgcacattgaaccggcgcgtataacgaaacaggagtgggagctggtttcggagaccgtatcaaaagcactttgcctgattggacttaataattgtccctcgcatacagaaataaagctgaatgaatcgggcgcttatatcatagaaattgcttgccggcttggaggagattatataacctctgatttggttccattgtcaaccgggatagatatgctgagaaatctggtgaactgttctcttggtttgcccgttgatgtccttcgcaaacatgaaaaatgctcagcggtacagttccttaatccgctcaactatcagcgttgtgtggattttctaagctcttcccggtcatcggctgtttttcggtctgaaataagaccttattctgaaaaaaaaataaaaaactctttagaccgtttagggtatatcatacttcagactgatagtatggaagagcttgaaagtattctaaggacgattaaatagtaaagacatgagagataagtgtatgattgtggctgagatgtctgccaaccataacggtaagaaagaaacagccattgaaaccgtcagggctgcaaaacgtgccggagccgatgccgtcaagttgcagacctatcgggctgataccattacgcttcgctgtgacaagcctgattttataattaatgaaggctctatatgggacgggcaatatttttatgatttgtatgaacaggcttatactccttgggagtggcatgaagagttgttccatgtggccaaggaagaaggactgatctgtttttcttctccttttgataagacagccgtcgatatgcttgaggctttggactgtcccgtttataagatagcttctttcgaaattacggatattccattgatagaatacgcggcttcgaagcataagccgatggtacttgctacaggcatagccaccgaagaagatattcaattggctgttgaagcttgccgcagaatgggaaataatgatattacggttcttaagtgtacctcttcttatccggctccagttgaggaagccaatctttgtatgattcgtgatttggcagaacgtttccaggtaaaaagtggactttccgaccataccctggggagtgtctctcccattgtggcggttactcaaggtgcgagtatgatagaaaagcactttattttgaatcgttccatcggtggtccggattgttctttttctatggaagagaaagattttgcccaaatggtaaaagatgtgcgcatggctgagttatctttggggaaaacgacttacgaattgacggagaaaatgagaggtagccgttccgcatcacgttctctctatgtggccgaggatatgaaggccggagaagtgattacggagcggaacgttcgctccgtccgtccgggcttcggcctgcaccccaaatatctgaaagatatattgggaaagaacgtgaaccgggatttggagaaagggacgaggtttgcattggagtacgtgaatggttag

SEQ ID NO: 475 - DNA, 14196 bp, unidentified
  source 1..14196: mol_type = unassigned DNA
  misc_difference 7351: note = a, c, g, or t
  misc_difference 7352: note = a, c, g, or t
  misc_difference 7353: note = a, c, g, or t
  misc_difference 7354: note = a, c, g, or t
  misc_difference 7355: note = a, c, g, or t
  misc_difference 7356: note = a, c, g, or t
  misc_difference 7357: note = a, c, g, or t
  misc_difference 7358: note = a, c, g, or t
  misc_difference 7359: note = a, c, g, or t
  misc_difference 7360: note = a, c, g, or t
  misc_difference 7361: note = a, c, g, or t
  misc_difference 7362: note = a, c, g, or t
  misc_difference 7363: note = a, c, g, or t
  misc_difference 7364: note = a, c, g, or t
  misc_difference 7365: note = a, c, g, or t
  misc_difference 7366: note = a, c, g, or t
  misc_difference 7367: note = a, c, g, or t
  misc_difference 7368: note = a, c, g, or t
  misc_difference 7369: note = a, c, g, or t
  misc_difference 7370: note = a, c, g, or t
  misc_difference 7371: note = a, c, g, or t
  misc_difference 7372: note = a, c, g, or t
  misc_difference 7373: note = a, c, g, or t
  misc_difference 7374: note = a, c, g, or t
  misc_difference 7375: note = a, c, g, or t
  misc_difference 7376: note = a, c, g, or t
  misc_difference 7377: note = a, c, g, or t
  misc_difference 7378: note = a, c, g, or t
  misc_difference 7379: note = a, c, g, or t
  misc_difference 7380: note = a, c, g, or t
  misc_difference 7381: note = a, c, g, or t
  misc_difference 7382: note = a, c, g, or t
  misc_difference 7383: note = a, c, g, or t
  misc_difference 7384: note = a, c, g, or t
  misc_difference 7385: note = a, c, g, or t
  misc_difference 7386: note = a, c, g, or t
  misc_difference 7387: note = a, c, g, or t
  misc_difference 7388: note = a, c, g, or t
  misc_difference 7389: note = a, c, g, or t
  misc_difference 7390: note = a, c, g, or t
  misc_difference 7391: note = a, c, g, or t
  misc_difference 7392: note = a, c, g, or t
  misc_difference 7393: note = a, c, g, or t
  misc_difference 7394: note = a, c, g, or t
  misc_difference 7395: note = a, c, g, or t
  misc_difference 7396: note = a, c, g, or t
  misc_difference 7397: note = a, c, g, or t
  misc_difference 7398: note = a, c, g, or t
  misc_difference 7399: note = a, c, g, or t
  misc_difference 7400: note = a, c, g, or t
  misc_difference 7401: note = a, c, g, or t
  misc_difference 7402: note = a, c, g, or t
  misc_difference 7403: note = a, c, g, or t
  misc_difference 7404: note = a, c, g, or t
  misc_difference 7405: note = a, c, g, or t
  misc_difference 7406: note = a, c, g, or t
  misc_difference 7407: note = a, c, g, or t
  misc_difference 7408: note = a, c, g, or t
  misc_difference 7409: note = a, c, g, or t
  misc_difference 7410: note = a, c, g, or t
  misc_difference 7411: note = a, c, g, or t
  misc_difference 7412: note = a, c, g, or t
  misc_difference 7413: note = a, c, g, or t
  misc_difference 7414: note = a, c, g, or t
  misc_difference 7415: note = a, c, g, or t
  misc_difference 7416: note = a, c, g, or t
  misc_difference 7417: note = a, c, g, or t
  misc_difference 7418: note = a, c, g, or t
  misc_difference 7419: note = a, c, g, or t
  misc_difference 7420: note = a, c, g, or t
  misc_difference 7421: note = a, c, g, or t
  misc_difference 7422: note = a, c, g, or t
  misc_difference 7423: note = a, c, g, or t
  misc_difference 7424: note = a, c, g, or t
  misc_difference 7425: note = a, c, g, or t
  misc_difference 7426: note = a, c, g, or t
  misc_difference 7427: note = a, c, g, or t
  misc_difference 7428: note = a, c, g, or t
  misc_difference 7429: note = a, c, g, or t
  misc_difference 7430: note = a, c, g, or t
  misc_difference 7431: note = a, c, g, or t
  misc_difference 7432: note = a, c, g, or t
  misc_difference 7433: note = a, c, g, or t
  misc_difference 7434: note = a, c, g, or t
  misc_difference 7435: note = a, c, g, or t
  misc_difference 7436: note = a, c, g, or t
  misc_difference 7437: note = a, c, g, or t
  misc_difference 7438: note = a, c, g, or t
  misc_difference 7439: note = a, c, g, or t
  misc_difference 7440: note = a, c, g, or t
  misc_difference 7441: note = a, c, g, or t
  misc_difference 7442: note = a, c, g, or t
  misc_difference 7443: note = a, c, g, or t
  misc_difference 7444: note = a, c, g, or t
  misc_difference 7445: note = a, c, g, or t
  misc_difference 7446: note = a, c, g, or t
  misc_difference 7447: note = a, c, g, or t
  misc_difference 7448: note = a, c, g, or t
  misc_difference 7449: note = a, c, g, or t
  misc_difference 7450: note = a, c, g, or t
atgatttatccgctgcctgccgtattggtgagctgcggaagcactccggaggaatataacattctgactatcgcatggacggggacgatttgtacgaacccgcccatgtgctacatctccgtacgccccgaacgccactcctacgacatcatcaagcggaatatggaattcgtcatcaacctcaccacgaaagacatggcacgggccacggactggtgtggcgtacgctccggaaaggactacaacaaattcgaggaaatgcatctgacaccggggaaaagcaccgtagtcagcgcgcctctcatcgaggaatcaccgctttgcatagaatgccgggtaaaggagattatggctctcggttcgcacgacatgtttatagcggatgtggtaaatgtacgtgccgatacccgtaatctgaaccctgaaaccggcaaactggaactggcggaaacgaatccgctggtctatgtgcacggtggatattatgagctgggagaaaagataggcaaattcggatggtcagtagagaaaaagaagtaataatgcgataaaggttttaagagatggagttgcgacgaatcttgatgggcttatatctgttggccttccccgccatgatgtggggacagactccggttgtgcccggtactgccgacgaagagcattccggacaccgcaaggaaactccggtcaatttcggtttcaaaggcggtttcacctcttccttgttccttgtatcccagttcagcgtcaacggagtgcccatcgacgaagtgcagaacaattacaagataggatatttcggctcccttttcatgcggataaacttcgatcgccacttcctgcaaccggaaatatcctacaacatcaaccggtgcaacatcaccttcgagaaacctctgcccgaagacgccgcatcaggagcccggctggaggaagcctccattacatcgtccatccacagtatagacatccccgtcatctacggatacaacttcatcaaggaggggccgtacagccttgccgtctttggaggacccaaagtgcgctatatatgggacaggaaaagtgacatcgacttcgagaatttcgaccaggtgaatatccgtgaaaggctgcgtccgctcaatctcagtttcaccgtcggcgtatccgtcaccatctcacgcgtctttttcgacttccgttacgacatggggctgcataacatctccaaaagcgtgacatacgatattccggccgacaacaacgctgctgacgaaaacacgaaaaacgaaatccgttttcaccgcagggacaatgtgctgagtttttctttcggagtgttcttttgacagtaaatttcttccttttctttcaatttattcatttatttcccgtaaatttgtgcgcttaataagagaacacagatttatcaaacttatctaataagcagaatgaaaagagatgatttaattttcgaacttatcgaaaaagaacaccaacgtcagctcaaaggcattgaactgattgcatcagagaactttgtaagtgaccaggttatgcaggcaatgggctcctgcctcaccaacaagtatgctgaaggataccccggcaagcgttactatggtggttgtgaggtagtggaccagagtgagcagattgccatcgaccgcttgaaacagatcttcggcgcagaatgggccaacgtacagccgcactccggtgcacaagccaatgcagccgtattcctcgccgtgctcaatccgggcgacaaattcatgggactgaaccttgcacacggcggtcacctctcccatggttcactggtcaacacttccggtattatctatactccctgcgaatacaatctgaaccaggaaaccggacgtgtggactatgaccagatggaagaagttgccctgcgcgagaaacccaaaatgattatcggcggcggttctgcttattcccgcgaatgggactacaagcgcatgcgcgaaatcgcggacaagataggtgccatcctaatgattgacatggctcatcctgccggactgattgcagccggtgaactggataaccccgtgaaatatgcccacatcgtgacctccactacccacaagactctgcgtggtcctcgcggtggcgttatcatgatgggtaaggacttccccaacccctggggcaagaaaactccgaagggagaaatcaagatgatgtcccagttgctggattcagccgtattccccggtatccaaggtggtccgctagaacatgtcatcgcagccaaagccgttgccttcggcgaaatcctgcaaccggaatggaaagaatatgccaagcaggtgaagaaaaacgccgctgtcctggcacaagccttgatagaccgtggcttcaccatcgtttccggcggtacggacaaccactccatgctggtagacctgcgcagcaaatatcccgatttgaccggtaaggttgccgagaaggcgttggtatctgccgacatcaccgtaaacaagaacatggttccgtttgacagccgctcggctttccagacttccggtatccgtctgggtactcctgccatcacaacccgtggtgccaaggaagacctgatgctcgaaattgccgagatgattgaaaccgttctgtccaacgtagacaacgaacaagtcatcgcagaggtacgtgcacgcgtcaatgcgaagatgaaagaatacccgctgtttgcttattaataagcaaacagaattaaaaattaagaattaaaaattaaaggctgcgcaatgttcgctttgaactgcgcagcctttaatttttaattctaaacgcgctccgcgcgtttagctcagcccttctatatttccgtccacaatatcaatgtgttcggcttgtggtttcttgggtaatcccggcatacggagaatttcaccggcgatggctacaatcatttccgcaccgttattgaccacaatatccttgatgtggaactcaaagttgttgactgcaccgtatatcttcgggtcggcagagaaggagtactgcgtcttggcgatacagacggggtaatggctgatacccatctgctctatcagtttgataaccttgcgggagtggagactgtaagtcactacgcttgccccgtagaggttgcaggctaccttttctattttacgttccacgcaatcgctctcttcgtaggtgaaggtcagcggttcggatggtttgttctcgatagtatctactaccagattggcaaggtcaacggctccctctcctcctttggcaaaggcgttgttcacggcaaaacctacctcaagcttttcttcgcaatggcggcggatagcttccacctcctcgtccgtatcactggcaaaacggttgaatgccacgatgacctgctggccgaatgaacgcaaattgcgtacatgtttgtccagattgccgaagccctctttcagtccttccatattgggttccttgatgcggtccagactgacaccgccatgcatcttcagtccttgtgcggtagcaacgattatcgtcagcttgggctgtaggccgctcttgcggcacttgatgttgtagaacttctccgcacccaggtcagctccgaaaccggcttccgtcactacataatcgccgaatgtcatggccatttttgtggcaagaatggagttgcaaccatgggcaatatttgcgaacggtcctccatgaacaaaagcagcagagccttcggtagtctgtaccaagttggggttgatagcatctttcaacagtacggtaatggcaccggctactcctaactccttcactgtgaaaggagtaccatcgaaacggaatcccagaataatattttcaatacggcgacggaggtcgtcgaggtctgttgccagacagagaatagccataatttcggaagccggggtaatatcgaagcccgactcctcagtaatgccgttggtgctcggtcccaatccggtgacaatgctccgcaaggaacggtcattcacatcaagtacgcgccgccagatgatttctttcagtccgaagccgtctgcctgatgctggtacaagtaattgtcgagcaaagcggaaatcatgttgtgtgcggaggtaatggcgtgaaagtcgcccgtaaagtgcaggtttatcttctccatgggaagcacctgggcatatcctccaccggcagcaccgcctttcatgccgaagcaaggacccagcgagggttcgcgtaaagccacaatcgctttcttgccaatcttgttcagccccaatgccagcccgatggacacggttgttttaccgatacccgctttcgtagccgtgatagccgtcaccagtatcagattgctcttcttcactttctcttcatcaatcagatgcgtaggaatcttggctatgtaacggccatagttctctacttcgtcacgcgggatatccacactttcagccacctgctttatcttcttcagctctatgctgcgggctatttcaatgtccgatttcaatcttcgtcttttctttaaataacaactttaatgttttgaaagttgcaaaagtacgaaagatgtggcaaagtacaaaagaataccgtattttcacctgaccacctgcatcttctatctatttgaaccgcgacgtatccactgcctcccgttgcttctccttatatccaccgaatttataggtgaacgatacgccgaattcgcggaagcatgagtaatgattcgtcacattctgcgtcttgaaacggatgcggggagaaatctgtcccgtctcaaaaatatcgttgcaatagaggttgagaatggctttgttcttggcgaagccgtagcgcagggcaatattcacattgcccgacgtaggcaggtcgtagatgccctgaatggctttactatgcacaaatccggtcaccgtcagcttcaagtcgggtttggtggagagagtaaaagtattgttcatctgggcaatgccatagcattgctttctatcgaaaggaatatcccagaaatcaccatccttttcgcgatgccacaagccgatgagggtaagacgagaattcaaccaattcttcaccttaaacggtatagaggcttgtatacctgcttgttgctgataatcaaaattgagtgtcttgtagatttcaaccagacgttcggaagattggtagagcgtctgtacggagtagtccttggtatggttgaaccaagcgctgaagatgtatttgctcttcaaaatataggtcattttaagctcatactcttgcgccggtttcagcaacggattaccatgcagctcagagtatccgccaccgatgtaagagacggcatcctgcaccgcccagtagtcgggatagtccttgtcgctgctcagagagagctgaaggatatgtcccggtgacggcatatagttcaagttgacgatgggataccagtcccactggttccagacgggagtcttgtaatgctccacagccagggaagcgtccaaagcgagtttgtcgccgaaactcttgctgaaacctgcatagatattccaggtctgttcgcggcggcgggacttcatattgcttaaggcatctgaggaggtcagttgttcgccggtttcggggtcgtaataatattggtagctgttgtcgatgctggtagtatagatggctccgtaattcaaatcccaaccttttcccagactgtgctcctgggccagaaagaatttccatcggttgatgcgttggcaatcttcggtgtagaagtcaagttcctcatcctgcatgcggctatgcagcaactggtcggacggggaacggtagtaggtcagttcggcaccggctttgaggccgaaaggggtacgatagtccagacggccgttgtgcagccagtcggtgctattgccatgagttgtggacacctgcgtgcccgtcacgcccgtccagttgtgggaggtggaatagccaccgttatagacgaaactcagctgatggtccttggcgatgttatagtccgcccctaccctgaaattatgggtatggctgcggccacggcccacctcatatgttgtcatggggtgaaccgagccgtctgccagggtgtgcacagcctctttgtcggtagtagagtagccccggccatggctgtgcgagtaaagaaaatctgctgagaatttatttttgctgaagagcaggctggcgcgttcctcaaagccttcgttatgcttctggcgatacttggcatagagttcgccttgccaggagtctgggccgcctgccgattgtttcaaggtgatattgatcagtgcgccacgcacctggtagcgtgcaggggcgttgtacatcacttccgccttctctatgtggctggcagggatgctgcgcagcaaggaatagagctgctcggtgctgagggtggttactttgccgtccaggataacggtgactccctggcctgccaactgcagcccgccattcatctcgatgacgccgggaagctctttcacggcatcgtaggcattgtctacggggaggttccggataaggcggggcaggtcgtacaccagcttgccttgcgctgcctttacgatggggcgttcgccggtaatcatcacttccggcaaggtctgataaagactgtccagacgggcatcggtcgtgataaggctgtcggcgctgaggatgcggttgtcgtctgcaccggaggtggttgcagtgccgttgttctcttgtgccgaaagactgatgctcaaagcacagcatacaatagggagtaaatagaatcgtttcatgttcttctttttatttatgtttatattcttcttctgcaaatcttcgtctgcaaagtacggcagaatcagcagaaacttgtgttatcagcggcttaccaagtgttatccagtgttatcgggagtgttatttagtcttatcggatgatagggttcacaatattaatcttacctttgtatgtataaaagtaaccggaaacaaacatgaaactgccattcaaatatattgccatacttgtcatcgtctccctggccggcatcttcgcctaccaagcctactggctgacggggctctaccataccatgcacagtgaaatggaaagggacatcaccgaagccatgcgcatgagcgactataacgaaatgatgatacgcgtggataaaatgaagcaggacgacataaaccacggtgaagtcagcgtatcagccggatacagcgatgacggaaaatcatttgtccgtagcagtaccaccatctcccgtgaagattctttggacaacaccaccctgcacgaaaccttcatgcccaaaggagacagtgtttacgtgacccacccgaacgattcaacccgcgtggaagtcagtgtcaggnnnnnnnnnnnnnnnnnnnnnnnnnnnnnnnnnnnnnnnnnnnnnnnnnnnnnnnnnnnnnnnnnnnnnnnnnnnnnnnnnnnnnnnnnnnnnnnnnnnncagtgtttacgtgacccacccgaacgattcaacccgcgtggaagtcagtgtcaggaagaacgttcctttgctcaccaaagaggacagtgtgcttttcatcgaccagcatagagaaacggataaagtccgttggatgtctgccgattctgcccgagagcgtctggaagaagcagtcaaggactcagacagctctccccaatccgcattgagtgccaaagggggactggatgtgattttgcgcgaccaaaacagtatgctggaactcgccacctacctccagcgcggactgcattcgggactggacatcatttccgaccccgacgtagtgctttatgacagcctgctgacttcattcctgcatgaccgtaacatcaatcttccccataggctgctacatcttcacaaaggcagcaaatgggactctaccattctctatatagatacattggtaaacatcggtacccccggctatgtgcctacctcaaaagccgtggaatataattattctttcgacatcaatacaaatcaaagctaccgtctcatcatggaaccggccggcatgttggtcttgcgacagatgtcgggcattctcaccacatcattcgttattctgatcgtactcgctttctccttctggttcctgatacgcaccatcctgaaacagaagacactggaagagatgaagagcgatttcaccaacaacatcacccacgaactgaaaacccccatcgccgtagcatatgccgccaacgacgctctgctcaacttcaaccaagcggaggaaaaggccaaacgcgacaaatacctgcgtatctgccaggaacagcttcagcgcctcagtggactggttgaacagatactttccatgagtatggaacgccgcaggactttccgcctgcacccggaggagtttgcaatacgtgatattctggaaacgctcatcgaacaacacaagctgaaagcggaaagctccgtccacatatcggtggacatcgaaccggaagatttgagcgtacttgccgaccgtacgcatttcagcaacatcatcagcaacctgatagacaacgccatcaaatattcgcacggagaagccgaagtggccatccattgccgcaaggtaaccgtcgaagggcagaatgaacagaccgaaatctccgtcagcgaccacggtatcggtattgctcccgagaagcagaagcacatcttcgacaaattctaccgcgtacccacgggtaatctgcacgatgtgaaaggctatgggctgggattgttctatgtgaagaccatgatagagaagcatggtggcagcgtatcggtaaagagtgagttgggaaaaggaagtacctttacgataaggatatgataacattatttgttagggtactttacattacttgttaaggagctttacattacttgtaacaaaagcgacaattatggaaaagataactgtacttctggttgaggacgaacagaccctcgccatgattatcaaggacacattggaaggacagaacttcatcatccacaccgcagcagacggtgaagagggattgcgcaagttcttcgacctccgtcccgacgtgctggtggcagacgtgatgatgccccgcatggacggctttgaaatggtgcgccgcatccggcagaccgacaaacagaccccggtactgttccttaccgcccgctccaccatcaacgatgtggtggaagggtttgagctgggtgccaacgactacctgaaaaagcctttcggaatgcaggaactcattatccgcataaaggccctggtaggcaaagctttctcctttacagaggaaaagcccaaagaaactaccgtttttgaaatcggtgactaccgtttcaattccgtcactcaacgacttgcttttgcaggcagcaccccgacttcacctaacgcggatacggaagtggaactctcccaccgcgagtccgagatactgaaacgtctttgcgagaaccgtaaccaggtggtcaacacccagaatgtattgctcgacctctggggagacgacagcttcttcaactcccgcagcctgcatgtgttcatcaccaaactgcggcataaactggccggagacgagcgcatccgtatcgtcaatgtgcggggaataggatataaactaatagtgaactaaactaaaactaaactactatttatgagaaagttattattcattacttttatctgttcctcactctgcgcctatgcacagagcgagattccggaagacacaataaagaaccggcctcccgtaaagaaagagcagattcccttttctccaaaagagaacaagcgtacgggccttgatgaaagccagccccaacaaagtctgcagggcgaacagcaggaagagataaatctccatctccctccctccgacaatatggagcccctgccctggacggacatgaagaagatacactttcagaaaaacatctttgaatgggacttccagcgtttcgccgatttcctgctctcgccggaagtcgtactgacgatgtacggcagccataacacctatcctgcaatgggctccatcatgcaggctggcgcaggagttacttattacagtcccgacggacattgggaattgagcggaggggtatatgccgcccattattccatctcccaaccttcatccattaccggtgcccagtatgccaaaagggatgccccccgaggtactcaatgggacataggctacaatgcctccgtatcctaccgcatcaatccctacatgcgtctacatgccttcggccagtattcgggctacgggagaagtaactcctttcatggatatatgaacccgatgtatccgcaaagcggttatggcatggtactggaactgaaagtgacggactggctcgacctcaacggaggcctggaacggagctacgaccccaccaaaatgaaatgggtgacttcgcccgtcttcgcccctaccattcgtataaagaaatagaaataatacaaagatatttccggaaatagagggaaacgagtatctttgttcagtctgcccctatgcggcagacagcaactgaaattgtgaacaaagaactatgaaacgaatcttcttctgcatcatcattttacttgcaggcatatcgtccgtcagcgcacagagtgggatgcctgccgatacggtacgtaccgctgtacgtggcgaagcgtctcccgaaggcatgtctccgtctgaaaaggagcttctgccggacgtgaagaattacgacggcttcctgctggatatggggctgatgaatctgtccacccccactcttcccaaattcactttggagataccggatgccagcaaagactatagccgcatcttccagttgaacccgaacgtgacttattcacaaggtctttcgaacatattctcactcagcaactcccggtatttcagttcgaatcccttcggactgacgggcttctggggctctactgacaacctgcaaatgggaagtttcactttgaagaacggcatgcgcatccatacgtacggcgaatatgacaaggacggctggaaagtgcccaacccttccgcactgccttgggaaaagaacaatttcaaaggggcgttcgagctgaaatcagccaacggatcctttggcatacgcatcgaggtacagcagggcagacacgtgccctattgatgcccatcacttaacaacagaatcaatgacaagaaagaaaatactggtgataggcgccaacggttttaccggcagacgtatcctggatgatttgtcccacaacgtgttttatcagacaacgggctgttccctgcacgacgacatctgtccccattcgggcaactatcgctttatccgcacggatatatgcaaccgccaggcggtggaaaaacttttccaggaagtacagccggatgttgtaatcaatacctccgccctctccgtccccgattattgcgaaacgcaccatgcagaagcggatgccgtcaacattactgccgtggagcatctggcagaatgctgtgaggcgggaggcagccgttttatccatctttccaccgacttcgttttcggtggtgatacggaccgaccctatacggaggaggatattcccgctcccgttaattattacggctacaccaaactggaaggtgagaaacgtatcgctgccgtttgcagggattatgccatcgtgcgcgtagtggtggtgtacggtgccgccctgcccggacagcatggaaatgtgctccaactggtggcaaacagattaaggaacaatgaggaagtgttcgtcgtatccgaccaatggcgtacgcccaccttcgtgggagacgtgtcgcaaggagtggagaagctgataaatcacccacaaaacggcatctaccacctctgtggcagcgagtgcctgaccattgcagacatcgcttatcgggtagcggacgtattggggctgaatcgctcgctcatccgtcccgtcaccacgaaggagatgaacgaaaagacaccacgtccccgtttcagcgggctgagtatagaaaaggcacaccgggaactggggtatcagccgcgcacgctggaggaaggaataaagcagatgttcggatggtaaatgatgcagtcggatggtaaatgatgcaggttgaggatggcagcagattcgactacagcaactccggctctgccagtcctttctctttgcgatacacacgtaccatctccagaatcacatctccatatttctccgcccctttctttccgaaatacggaatgcgtacaagcatagccttatccgaagggagcagattgctgatacccagaattgccttctgctgaatgacggtgtatacgggcaaccccaacgcggaagcttctgcattgcgccatgccaccaagcggttgtaaagttccggatgcaacacatccgtgggtacttcaacagccgcagcatcgcgtttccgctcacgcggacgtttctctttatcagcctgcttactgcttccctgcccttctttggcagcggcacttctccctttgcctttacccttctgcaaagccgaatcatcaatggaaagcagtgctttctgcttcaagtattctgccacatggaaaccattctccagcacataatccagcaaatcagtcttcaagtcaaacatttcctccagctcctccatggcatcccggagcttcttcttcaactctttattatcagaagttaccgcactcgccatcaccgcatccagcggttgcaactgctcttgaaaataagtggcggcagcgtgtatgcgcccctgcaaagtcgggtcggctgcatagtcctgcgcagtatcaatcaggcgggtatactggataccgaacttctgggccactttcgtcactttgtcgtgaaaacgttccacttcctccttgcaggctgcgagttgcttgggaaagagcttgtacaagtgttcgtctatcagccgcacataccgccgcaaagcctgctccatgggctggaaatcgaacaggcccgacagcagttccaggaaataggtctgctgcaaggaacggaagcgtttctcgtccggctcgtttctccgtgcctccatcgtgaaggtttccaccgcattgtcattgattatggctcttgcagaaagcggagcactgagcaccactccctccagcgtcttgcagcggctcagggccacatacgtctgcccatgcgcaaaggaggcgctggcatcaatcacggcacgttcaaacgtcagtccctggcttttgtggatggtaatcgcccaagccagtttcaacggatactgccggaatgttccttcaatatcttctgtaatctccttggtttcctcatcaagcacatacttggcattcgtccactcttcctcctgaagtaagaaggtagcgtcacttcccttactgcgcacttcaattccatctgccgacacggctgtcacctctccaatcatgccattgtagtaacggtgttcgccggaggtgtcgttcttcacgaacattacctgggcaccgcgttccagttccagcacctcatccgtgggataggaatattcgggaaactttccgtcaatcttggcacgaaaggcatacgagcgtcccggaagttgttccagctcatggtcattaatccgttgggcctgatagttgtgggtcaccaggcggatgtatccttcttctttatctggtacgaaattgggaatataccggcggttcaaggcttccagcacttgcccgtcacaacggttttcgcgaatgcggttcagtaattcaagaaaagtcccatcgttctgccgatagactttctttagttctatggtgcaatattccgtctgcttcaaggcctggctggagaagaaataaggcgtgtcatagtatttgcacagcatctgccactcatcgtctttcactacgggagacagctgctgtaagtcgccaatcatcagcagttgcacgccgccaaagggtttgttccggtcgcggaaccgcctcaagacggcatccaccgaatcgagcaagtcagcacggaccatactgatttcatcgatgaccaataaatctatgctgcgtataatgttgattttctctttcccgtaacgaaaacggtaggttgccttgccatctgcgctgaatgagctttcgggcacataaggagcgaaaggtacttggaaaaaggagtggatggtgacaccgcctgcattgatagcggcaattcccgtcggtgcaagtacaatcat

SEQ ID NO: 476 - DNA, 22915 bp, unidentified
  source 1..22915: mol_type = unassigned DNA
ccatggtgcggtagccgttttcgtgcacgatatgctccatggcgcagcgctggggctttacgcggtccttctgctgctgggtgggccagccgaacaccagcattgctgctgggaacacatagtccggcagatgcagcagactgcgctgggtgtcgcagttttccatgatgtccccgatgtagcacgagccgatgccaaagctttcggcggcgactacggcgttctgggcagcaatggcagcatcggtgactgccagcatcaaatcgcccacgcccggggtgcggggtgtgcagcccgcttccaagtaggcgtcgtaccactttttgcagtcggcgcagaacaccagcaccagcggtgctttggcaataaagggctggtggtcacagctttcggccagcgcttctttcagtgccgggtcggtgatatctaaaatagtatacagctgctgacagcccgcagagggcgcctgtgcggcagcttccaaaatggcctgcttcatctcggcagggatgggcttttcttcatacacccgcaccgacttgcggtcgaacaggctttgcaggatagggttgcgctcagtcatgggaacacctccggtgttgtgtttattcatagtcgatgggcagggtgggcaggccgttcagttccagcccggcggtatgcccggcaatgtactggtagtagccctgtgccgcaatcatcgcgccgttgtcgccgcagaacttcagttccggcaggtagaccttggcgcctagtttctgggcaccgtcattcaccagctggcgcaaacgaccgttggcggctacgccgccggcaaggcacacttgctttgccccggtatcggcagcagccagcagcagcttttcggccagaatgcccgcaatgcgctcctgaaagctggcagcaaggtcgggtacgttcacttcctcgcccttcatctgcgccttgttcacctcgttgagcacggcggtctttaagccggaaaagctcacgttgtacttgccctccacatggggcaccggcaggcggtaggccttggggtcgccggtctttgcggcagcggctacgctggggccgccggggtaaggcagacccagtgtgcgggccaccttgtcaaaggcttcgcccgcagcatcgtctacggtatgacccagaatgtggtagtgggtatagtcctgcacctccacgatgtggctgtgcccgccggaggccaccagacacaaaaagggcggcttgagctccgggtgggtcaggtagagcgcggcgatgtgtccccgcagatggtgcaccggcaccagcggcttgcccgctgagtaggccagacccttggcaaagttcacgcctaccagcaccgcaccgatgagccccggcgcaaaggtgacagccacggcgtcaacatcctccatggtcttgccggcgtccagcagagcctttttgaccgtagcactgataaactcgcagtggcggcggctggcgatctccggcacaacgccgccgtacagcgcctgctccttgacgctggtggagatgacgttgctcagcaggtgccgtccgtcctccaccagtgcagcggcggtctcatcacaggtagactcgattccgagaatgatcattttagtgtgcctccagccagtttttgcctgcgtgcacatcggtgctcagaggcaccgcgtactgcacgcagccttccatttcctcccgcaggatgcgggcagcctgctcggcctccgcctccggggcctctacgatcagttcgtcgtggacggtcaggatcaggcggctggccattttttcgtcccgcaggcgcttccacacccgcaccatggccagcttgatcacgtccgcagcggtgccctgaatgggggtgttgcgggccatgcgctcgccgctggcgcgcacgttgaagttggtgctggccagctccggcagggtgcggcggcggccgaacagggtggatacatagccgtttgccttggcgtccgcgatggtcttgtccatatagccgctcacgctggggaaggccgccagatagtttttaaggaaggcgtcggcctccttcacggtcacgccgatatccttggaaaggctgtacgcgcccttgccgtacatgatgccgaagttgatggccttggcagaggagcgcagccggggtgtcacctcgctctgcgggatgccgtagatcttggcggcggtgctgcggtggatatcctcgccgttcaaaaaggcctgctgcatgtgcgcgtccccggtgatgtgcgccagaatgcgcagctcgatctggctgtaatccgcgtccaccagcacacagcccggctttgcaacaaagtaggcgcgcagctgactgcccagctcggtgcggatggggatattctgcaggttgggattatcggaggagagccgtccggtgcgggcttcggtctggttgaaggtggagtggatgcgcccgtcctcgccaatgaccttgagcagaccctccacataggtggagttcagcttctggtaggcgcggtactgcaaaacgtcctccaccagcgggtactcgcgcagactttccagcgtttcggcatcggtggaccagccgcgctgggtctttttgccgtggggcagacccatggtgtcgaacagcatctcgcccagctgcttggggctgttggggttgaaggtagcgctgccggtatccatgtggatgcgggtcagcacctgttccagttcctcccgcagctttacgccgaactgctcgatgccgtccttatccaccagtacgccggtgcgggtcatatcagccagcacctgcgccagcgggaactcgatctcgttatacagcgcatcttctccgcaggcggtgatctcggccttcatccgggcaaacaggtcagccagccgctcggcgtccgggtaatcggtgcaggtaaaggcggcagcagccttgtaggcggggatcagctcgctgatctggtacttggaggcagaggcgtccagcagataggcagccagcttgccgtcccagacgatgctgctgccccagccgccggcggccatggccttggcgtacaggggcgcggagttgaacacatccagcgttacatcggcgttgtccagcagccgcactaggtcggcatcttccagcggatagacggtggcgtcctgcacggcgtaccaactttccggctgcaataccacgttgcgggtgccctgcttgccggtaacggcggggcgggcagccacaagataatgcccggcgggggtcaggggcagggaagcgaggtcggcttccggcagctccacagcctgttcttcggcggcggcttccggcgctacgccgtccagcccgaaccgcgggatcagggaatgaatctccaactcctgcaaaagccgcacggcggcgggtttattgccctcgcccacggtgtaggaaccctcggcggtgtcgatgggggcatcggtgcggatggtgcccagcgtgtggctcagctcggccatgggcttgtcttccaacaagtgctcccgctgcttgggtttgatgcgcttgtcgtcaatgttctggtacacgccctccagcgagccgaaggcctgcaccagcgaaagcgcggtcttttcgccgatgcccttcacgccggggatgttatctgaggtgtcgcccatcaggctcttcacctcaatgagctgcttgggcgcaaggccgtatttttcctgaatggcgtcctcgtccatcaccacggtcttgctgcgccccattacggtggcagcaagcagcacggtggtgctctcgcttaccagctgcaggctgtcccggtctccggtggcaaggaaacagtcgtccttccgggcggcgcaggcagcagccagtgtacccagaatatcgtccgcctcccagccttcggcggtaacggtgcggtagccaaggtctgccagcagctgcttgagcaccggcatctgctgcgccagctcctcaggcatggcgtggcgggtggctttgtagccatcgtacattttatgccggaaggtgggggctttcaggtcaaaagccacggccacctcgtccggctggcactccttgagcagggagagcagaatgtttaaaaaaccatagatggcgttggtataacgtccgtccttggtggtcagcagcttgatgccataaaaagcgcggttggcaatgctgttgccgtcaatgaccagtaaacgcataatgcagttcctccgttgcgtaatctcacatcttatagtatagcacaaaactgtaccgcgcgggaactttttgcgcaaaaaagagaagtggctgcttttcgtgatgccatctctcgtaaaaatgcgattgtcgcggcttgtaagccgcgacaatcgcataatttataatattcttccgctgcttatgcccggagcagcgcggagggcatttcaaatcgtcctgcggcaaaaaaagctgccgcacaagctgtgcagcagccttagcgatgccgggcttattcctcgatgcggatggcgcttaccgggcagctctgagctgcggtgacggcctgcggcacctcctccggcgggatggggccgggctctgccacagccagaacgccctccatgcggaacacggcggggcacagcccggcgcactgggtacagccgatgcacagttcagggtctacgaatgcgttcatgcaaacacctccttgcggaaagcattgcccgttttgccgcaaattatgcctatgcaagcggtttacggtgtggtacaataagaccgccgggaaccggcaggaggagataagatgaatatccagatctttggcacgagcaagtgctttgataccaaaaaggcgcagcgctatttcaaggagcgcggcattaaattccagatgatcgacctgaaggaaaagggcatgagccggggcgagtttgataacgtggcgcgcgccttgggcggctgggaagcgctggtaaatccggcagcaaaggacaagcagacccttgcgctgctggatgcactggtggactggcagaaagaagataagctgtttgaaaatcagcagctgttcaagacccccatcgtgcgcaacggacgcaaggccactgtgggctatcagcccgaaatatggaaggactgggaataaaaaacctgctttcacaaaaaaaccaccggtacaggttttgcactctgcggccggatgtggtatactgttgggtagacaaaaaactttgggagactcagaccaatgaaaaatacgattaccccagaagaacacgcccggatcaagcgccgccgctggcggcagaccttgggtctgctgatcacggtgctggtgctcatcgggtttatcacggtgctgcgggccggtgtgggccttgtggcaaacctgtttgacgataccgcacaaaagcaggaatacgaggacaagctggaaggcctggtactgttcgaccccatgccctttgacggcattgagaacatcgacgacctgaccctgcgggaagcagccgtgtggggctgtgtgtacagtattcaggagacgcagggcggctttgaaaactacaatactgaccccgagaccgagcagctgctgctgccctcggtggaggtggacgcctatctggcaaagctgctgggccccggcttcaagctgacccaccgcagctttgacatggaggatatgaccgtcgagtttgacgagaccacccagtgctacaaaatccccatcaccggtacggtgggctactaccgcgccaccgtggtcaagctgttcaagcgcagcggcaagctgcacgtcaccgtgggctacatccccaccgccagcgcagatgacagcatcatcaacccctcctcggacacccccaccaagtatatggattacctgttcgagcgccagagcggcagctggtatctgaccggcctgaccgagagtgagacgaaacccgaaagcgcagcaagctccgctgccgcgcagccggagcctatggcagaaagcgatgtgcaggacgccattctggcaactgccggagactctgctgcggcagattcggctgctgcctcggctgtccagccggaagcgcaggcagaaacgggcgctgacagcgccgtggcagaagcccccgccgctgaggatgccgccagtaccgcagcgtaaaatgtaaatgaaaacacccgactgtgcgtttgttttcacagtcgggtgttttttgtacgttttatttcaaatcaaaccgtaccaccaccagccgataccacaggtagggcaccatgttccagatcatccacagttccatcaggatgtagttgggcagatcgcgccagcggaagggacgcttgtccagtttgcccgctttgagcagggcaaaggcctcgtgcatgcccttatcccaagcctcgccaaagccctgcttgtggaacttgtagcacttgagcagatagcccagcgccagcgggataaagttgagtaccagcatcagcagcggctcgtttttgagtggcagcagaatgctgttgcggccgctctgctggcttttaaaggcgttgtagcgcacagcaccggtgctggcaccgcagatgtggtagcacttggcggcggggcagagcacatttttgtagccggcattgttggcgcgccagctcaggtctacgtcctcaaagtaggcaaaaaagtgctcgtcaaaaccgccgatctcgtccagaatgcttttgcggtacagcgctgcgccgccgcaggccgaaaagatacgcttttgcttggtgtagcggctgacgcggcggccatcgccggtcttgcaggcaaagcccatccatgttacatagtccccggcatcatcggccagttcccgctcaaagtgccggatcatcaaactctgcaccgcaaagatcttggggtccgcatcggcggtgcgcaaaagctcggccagccactgcggctcggcaaaggcatcgttgttgaacagcaccacatacttgctctgcgcccgggcaatgccctgattcactgcgtaggaaaagccggtgttgcgcccgttttcgatcagggtaaaattggggcgggtgcagtagctgcgggcttgttccagactttcatcggtggaaccgttgtccaccacgatcaggtcaaaatcctgttcggtctgggcgtagatggactcgatggagtccttcagccagcccttgccgttgatattggggatgacgatggttgctttgctcatagtttttctcctgcggatgtatggatccaaggggtattatagcataacccgccgcaaaaagaaaccgcaccctatacagagtgcggtttcaaaaaactttttacgcggccaaagccttttcgatgttggccagaatagtgtcgtgatcctcggcgcaaaccagaaccacctcgccggtgggggctacggtgacggtagcggccttagccacgaggtactgatcctccagataatgctccatggactgctgttcgctggcaacataggcctccagtgcggccttcacctcattggtcttgccctcggcgggcttcacgatggcaacggcgtagctgcgcaccatcatgctggaaatgctggcggcaaaggcggtatactggtcatcctccaggttcagcgggggcatcaggatgtcccggatctcttcgttcagctggtcggccttgtactcggcgctgtaaccgtcaatggcggtaaacttgccgtcctcgcccttggtaaagatcatatcgtactcgttgtcctcgtcgctgcgggcgtcgtggatgatctgggagtagtccttgggggtggagctgtcggccttgcttccgccggagcagcccaccaaagtaaacagagtcagccctgccagcagggcggcgatgaattttttcatagtattgcatttcctttcatagtgctgtgtgtggaaggtgcagccgggcgcacacgttacaggtagtgtgtgccggttttgggctgctattctggatacgaaccaccgcaccgcaaaattgcagggaaaaagtaacagttttatgaacaacactcgcttacagcatcaaagcgtccagatcgccgtggttcaccggggtggacaggatgatctgggtgctggtggtgcccagcttctggaactgcaaaatcaggtgctccagctgtgccatgctgccgcagctgaccttgaccagaaaggtgtacgcaccggtaacgtggtagcattgcagcacctcgcggctgttttgcagcagctccagaaaggcatcctgcttggagggggcaaccgaaaggctgatgagcgcatccacatacatccggtctgccggacggttcagtgtgacggtatagccgctgatgatgccgtccgtttccagcttatggatacggctggagactgccgggctggtaagcgacacctgctccgcaatttctttgacgggcatccgtgcgttttttgccagaagggtgaggattttgcggtcaagatcgtccatgagaagagcctccttcaaaatatgttggattgtataaaattttctgaaagtaaagtttttatgttgtgcaaacccacggaaatggaataaaatttcgtttctgaaattctatgttaattatataaagtttttgcaaaaaagtaaagtattattttaaagcaaaatccgaaaatcctgtttgacaagaaaagaaaaacgggtataatacatcatgcaaggcagcgcaatgaataaaagtctgccaatgatattgagattcaccactttatatactttcccacccctctatacacaaaaacccgctgccaggcgggtttttgtgtttgttggggctttttatttatgaaaaaagcagtggtagacaacgtacttggctcatagagcagctgtttccggtcacgaccccacccgtgaaaatgcaaacccggaaagtccgcagactttccgggtttgctctagatcaaaatattattccgcttagaccagatagccctcaaagcagtgcaggtcctcggttttgacgatgccttccagatacagcccgtcctcccggtattcctccacctgtacgctgccgcgctcccgcatgggggcggcaagcccaagcttgtcgtagggcagcagcacccggatggtgtgcacccggtcgctgagcacctcgtccagcttttgcagcagcttgtccagcccgtagccggttttggcgctggtcagcagaatgtcggggtcaaagctcagggtgttgggtttgtcgcacttgttgtacacggtcaggcggggaatgtcggtacagtccagcccatccagaacctcgtcggtgacggcaagctgctcctcgcgctgttcatccccggcgtctgcaacccggacgatcacatcagaccatgcggcttcttccaacgtagacttgaacgcctccaccagattgtggggcaggcgggacacaaagcctaccgtgtccaccagcagcaccgccatgccgctgggcagcaccagcttacggctggtggggtccagtgtggcaaacagcatatcggcctcggccacgctggggccgcacagggcgttcatcaggctggatttgcccacgttggtgtagcccacaaggcttaccaccggcattccggtcttagcgcgggccttgcggctctcgccccggcgcttttccatctcggccagcttctcggccagcgcatcaatgcgggcgtgcacatggcggcggtccaactccagcttggtctcaccggcaccgcggcgggcaccgccgccaccgccaccgccgccgccctgacggctcaacgcctcgcccatgccctgcaggcggggcagacggtagcgcagcagcgccagttcggtctgcaatttgccctcgttggtcacggcgcggctgcggaaaatctccaagatcagcatggtgcggtcgatgacttccagcccgcccagcgcgttggagatgttgcggatctggctgccggtcaactcgccgtcaaatacggcgcattccgcgcccagcgtctgggcggcaagggaagcttcttccagcttgccgctgcccagcacgatgccggtctccggggtctggcgcttctgggtgatctgcgccacggcctccatgtggttggcctcgcacagggcagaaagctctgccagactgcgctcacagtcccacagcccctgatccagtgccagcagcaccacctttgtgggaggggtctcggtcagaatatcataaagctcgctcaaagtaagtcctttctgttatcgtagcgttcttttgtcagcagatagcaccggcattccaccggtgtgccgtcaaatttgtggtaaacgtcgttgtgatggtacacaaagccggccttttccatcacccggccgctggcggggttgtgcaccgcgtggcagcaggtgagaaaggtgccgcccacctgtctgaaccagaaatccaccacagcttgcagcgcttcggtggtaaggcccttgccccaccacttctgcccgatgcagtagcccggctcccagatgccgccggagagttccagccccggccacttggccttttgctgcggctcacccagcagggcgttgtatacggagatggagccaaacacctgtccggtggccttttctaccatggcccactggtaataatccgggttcggatacaactctgcccacgccgaaagcagttcccgggtctcggcagggcttttgtgcggttcccagcgcaaaaaccgggtcacagccgggtcatttgcccagttttcgtacatctgcggggcgtcctgcggcagcagacggcgcagcagcagacggtcggtctccagttcaggtgtgccggtgtggcgcatgatccatcctctcccttttctcaaaagttatccctaagatagcacaaaaacggccacgctgcaagcgaaatcaagaaaaccgcttgaccggatgggtgaactacgataaactgaaagatgaagtctttttataggaaagggaaagtatcgatgttagatgtgcgcaaactgttagcccagcggccgctgctgttcgatggcggtatgggtacctattataaagcaaagccggggcaggagtgcgagcaggcaaacctgaccgaccccgagggcattctggcggtgcaccgggcgtatcttgctgccggagcggacgccatcaagaccaataccttcagcctgccgcgtctggcggcggcacagcagccgggctgggagcagctggcggatgcaggctggcagctggcagtaaaggccgccggggagaccggcgcggcagtgtttgccgaccttggccctgcgccggataccgaaaatctcccggcggagcaggtgtatcttgctgtggcaaagcgctttgcgctgctgggtgcacggaattttctgtttgagaccctgagcgccgaggacggtgtgctggaagcgattcgtgcgctgaagcagaccgtgccggaggcctttgtactggtatcctttgcggtgctgccggacggctacacccgcgagggccgctactgtgccgagcttgtgcgccgcgtggcgcagagcggcgtggtggatgccgtaggcctgaactgcgtatctgccccgggtgcgatgcgggcactggtgcagcagctgggggatgcgggactgcccctttcggtcatgcccaatgcaggctacccggtggtggcgcgggcacaggtgcgctatcagggcaagccggagtattttgcccgggagctgagccgccttgccagtgagggcgtgcgcattctgggcggctgctgcggtacaacgccgcagcacattgctgccctgcgcaccgcgctggatgctttgccggaagtgctgcccgccgccccggcggcaaagcccgccgtggccgcaaagcctgcagtggaaacggacgatgcctttttgcgcaagctgcgcgccggacagcgggtcattgcggtggaactggattcccccaaggacgccgacctgaccgcgtatctcgagggtgcccgccgtctgcaggccgccggtgcggacctgctgaccattgcagactgccccattgcccgggcacggatggattcttctctggtggcctgccgggtgcaccgggagctgggcatgaacgtactgccccacatgacctgccgggaccgcaacctgaacgccaccaaggcgctgctgctgggactgtacgccgagggcgtgcgggaggtactggccattaccggcgaccccatccccaccgctgagcgggacgaggtgaaaaatgtgtaccagttcaactcccgcaagctggcgcagtatatcgtttcgctggccggagagggacgggagatgcccagccccatcacggtgttcggtgcgctgaacctgaacgcccgcaattttgaggtggagctgcgccgcgccgcagaaaagctggaaaacggcatgagcggcttccttacccagccggtgctgtcggcacaggcggtggaaaacctgaaaaaaacccgggagacgctgggcgagcgggcaaaaattctggccggcatcctgccggtggtcagccagcgcaacgccatctttatggaaaacgaggtcaacggcatccatgtggatgatgccatcatccaaaggtttgaggggctggaccgtgccgcaggcgaggagcttggactggaagtctcggtgcaggcagccaaagcggctgcgccctatgtagacggcttttacctgatgacccccttcaaccgggtggcgctgatggaacggctcattgcccgcctgcgcaccgaggtgacgggctgaaaagataaaacgggaggaacacgctgtgccctgcgaaaaaccattgctcagcatcattgtgccggtgtacaaggtggaaaactatctgcaaaaatgtatcgattccattctggcacagacctttacggactttgagctgatccttgtggaggacggttcgccggacggttgccctgcgctgtgtgatgccgctgccgcgaaagatgcccgcatccgggtgcttcaccagaaaaacggcgggctttctgctgcccgcaatgccgggctggatgtggcaaggggcgagtggatcggctttgtggattccgacgactatattgcaccggaaatgtacgaaacactgtacaaggccgtgcaaagcaccggggcagaccttgccctgtgcgattacgctgcggtggacgaggcaggcacaccctgcctgccgccgtacaccgggcttgcacagcggatctttaccgggcgggaactgctgaaaaaagccacgaatacgatggcgcagcctgcgtggaacaagctgtaccgccgcgttatctttgcgcagctgcgctacccggagggcaagctgaacgaggatatttttgtgctcccagaaatctgtctgaacaccaaaaaggccgtggtggtgccaaaggagctgtattattatgtgcagcgcggcagcagcattatgaacggaagtaaaacgctgcgccatttcgatgctgccgaggccgcacagcggtattggaactgcctcgtggaaaacgaggtatacgatgcgctggcaaatgcggcaaagtttacgatgggcagcgtgagccgggtgtaccggcagctgcccccggcgctgcgcaaggcaccccgcagccgggaaatgctgcggatgcagtttgatgtggtggaccggacgcggcagtattgtaccgttccggcgggactctggctgcaaagcctgctgttgcggctatttccgcgggaatatatgtggctgcggaacatcaaaggcaggggagaattaaaaatcgcatgagaacacgttattcgatcatcaatatgctgtttaacatcggcgggcagtttttgacgatgctgctgtccttcatcaaccggatggtgttcatccgctgcctttcagcggaatatctgggggtcaacggcctgtttaccgatgtgctcagcatccttaattttgcggagctgggcatcggtacggctatggtgttcagcatgtatgaaccggcagcccgggatgacgagcagaaactggcgcggctgatgaacctgtacaagtggatgtaccgggcggtggcagtctcggtgttgctgttcgggttggtgctgctgccgtttctgccctacctcatcaagggcggcgagggcattgaacatatcaccctgatctatatgatatatgtgctcggttcagcaagttcctatctgctgagttataaaaattccatctatcaggcctaccagaaaggctatatctgcgcaggatggagtatggcgtgcgagtgcatcaagactgtttcgcagatcacggtgctgctgttgacccggaacttcatcctgtatctggcggttcagcaggcgatacagtttttacccaacattatggtttcccgcatggtggacaaggagtttccatacctgaaggaatgccatgagctgccagaaagggaggaacggaacggcatcctgaaaaatatcggtgccatgagtatgcacaagctgtcaaccatcatcgtgcgcaatacggacagtctgctgatgtcctcctttattggccttgcgacggtgggcctttactccaattaccggttggtgatcaatgcactgaacaacctgatgggaaaatttgctgtggctttttccggcagtatcggcaattttgcagtaatggaaaattcggaccggctgtataaaatctataaggaaatggattttatgttctttgtcatgtccgcttacctgaccggtgggctgatgatgctgtttaacccctttatcacgctgttgtttggcggaagatactgttttccgatgaccacagtgatggtcattgtggcagagttttacattacacgaatgcggcagacgaatctgctgttccgggaggccatggggctgttctggaacgaccgctacaaagcggtggcggaatccatcatcaatctggtggcctcgcttgtactggtgcggcagtacggcgtgaccggcattatctggggcaccatcatcagcacgctgtgtacctgtgcctgggtagaaccctacatctttttgaagtatggcgttcaggatgcatggaagaagaaacttcgggattattttgcagagtatctgaagcgcacactccttacagcagcggtctctgcggcagcggtgctgtgggtgcagcggttcccggtgggcaatttcggtatttttattctggatgggctgctttacacagctgtgttcgcaggagtgatcgtactgttctaccgtggcagcgaagaatatgatacgctgaggcagcgcggactgaagatattgaaaaggagagcggaatgaacgcaaaggagcagcccttgatctcggtgatcgtgccagtttataaggtggaaaagtatctgcctgcatgtctggacagcttgttggcgcagacgtatcagaattttgaactgctccttgtggatgacggttcgccggataaatgctgggaaattttgcagcagtatgcggcacaggatgcccgggtgtgtattttccgcaaggaaaacggcggggtgtcctcggcacgcaattttgggctggagcaggcaaggggcgagtatatctgctttgtggattccgacgaccttgtgctgccgcagtatctggaatggctgtacgatgctttgtgcagctgcggtacccgcattgccatgtgccgctaccgcagcatacgggaaaacgagactctgtggacggtgacggagtgcccggcaccgcagaaaatcacgacggaaaactactcgtggatgcaggaatggagcggcgggcactgctggcggatgctgacccaccgggaggtgctgcaggatgttcgctttgacccggcgctgttctacggggaggatgccctgttctttgtaacggaattcctcaaggcaggcagtctggcatttttgaactgcccgctgtatgcttaccttgaacgtccaagctctgccgtgcggcaggagccgagcctgcgcttttacacggcggcactggcgtgggaacagatctggcagctggtaaaggggcagccggaccccttccgcagcactacggaacagcgctgcgtcatgtcctgcgccgaggtatatttccggctggtcaaccagccggagcgggattccgagaaggaaaaaatgctgctgaaaacagcaaagctgcaccgtcatgctgcgtgggagattccgccgggaaatcaaagccagaagctgcaggcgctgatggtaagctactgcccgcatctgggcgcaaaggcatggaagctggtgcggtgggtgaaaggtttgaaaaactgattgacaaatcccacaaaaaacgttatattctttttataaatgcgttgaaaaagagtgtgcatcgtctgggaccgcacagagagccgggggcagctgaaaacccggcgggataccggcggggcactgtcactttggagcaggagcggtgagccttgccggtaagccgctttcgggtctgccctacgttacaggggcatcaaggggcgcggaaccttccgcgcaatttgggtggtaccgcggtcatgtatttacagccgtcccatggaacgctccgtggggcggctttttgcgtcccacttcatcaaatttttgggaggacactatgaaagagcttgcaaagcagtacgatcccagtcaggtggaagatcgtatctaccagttctggctggacggcggctacttccacacgaaggccgatccggacaagaaaccttataccatcgtgatgccgccaccgaacgttaccggtcagctgcacatgggccatgcggtggataacaccatgcaggatatcctcatccgcaccaagcggatgcagggctatgccgccctgtgggtgcccggcaccgaccacgcctccattgctaccgaagccaaggtggtggaagctatgcgcgccgagggcctgaccaaggagatggtcggccgcgatggttttctggagcgcgcctgggcatggaagaccaagtacggcaaccgcatcgtcagccagctgaagaagctgggcagcagctgcgactgggagcgcgagcgctttaccatggacgaaggctgctctgaggctgtcaaggaagtgttcgtgcgcctgtacgacaaaggcctgatctaccgcggcaaccgcatggtcaactggtgcccccactgcaacacctccatctctgatgccgaggtggagtacgaggagaaggacggcagcttctggcatctgctgtacccggtcaaggagaccggcgagatgctggagctggccaccacccgccccgagaccatgctgggcgataccgccgtggccatcaacggcgaggatccccgctacgcccatctgcacggctgccatgtggtgctgcccctgctgaacaaggaaatccccatcgtctgcgatgagcacgccgatatgaccaagggcaccggtgtcgtgaagatcacccccgcccacgaccccaacgactttgaggtcggtctgcgccacgacctgcccatcgtgcgcgtgttcacttacgacggccacatgaccggcgctgccgacaaggctgccgccgatgctctgtttgccgccggtaagaacaccgtcaacgagccccatgtgctggactgcggcaagtacgccggcatgactacgctggaggcacgcaaggctattctggccgacctgaaagagggcggcttcctgaaggagatcgagcccctgaagcacgaggtgggcacctgctaccgctgccactccaccatcgagcccatgatctccaagcagtggttcgtcaagatggagccgctggcaaagcccgccattgagagcgtagagaagggcgagatcaagtttgtgcccgagcgctttaccaagaactatatgaactggatgaagaacacccgcgactggtgcatcagccgtcagctgtggtggggccaccagatcccggcttggtactgcgacgactgcggcgagaccgtggtggcaaagtccgctccctgcacctgccccaagtgcggcagcgcaaagctgacgcgggaccccgatacgctggatacctggttctcctctgcgctgtggcccttcagcacgctgggctggcccaacgaggacagcgccgacctcaagtatttctaccccaccaatacgctggtcaccggctacgacatcatcggcttctgggtcagccgcatgatcttctccggtctggcttacaccggcaaggctccgtttgataccgtctgcatccacggcatcgtccgcgacagtcagggccgcaagatgtccaagagccttggcaacggcatcgatccgctggaggtcattgcccagtacggcgcggatgccctgcgctttatgctggtggacggctccaccccgggcaacgatatgcgctatatcgaaaagaaggtggaggctgcccgcaactttgccaataagctgtggaacgccacccgctttgtgctgatgaatctgcccgaggacttccagcccggcctgcccagtgaggataagctggacatgagcgacaagtgggtgctgaccaagctgaaccaggtggccggtgccatgagcgacaacctcgaccactacgagatgggcctggcggctgccaagatcaacagctttatctgggatgtctactgcgactggttcatcgagatcgcaaagccccgcctgaactccggcgatgcacagcaggccgacaccgcccgccgtgtgctggtgtatgtgctggataaggcgctcaagctgctgcatcccttcatgcccttcatcaccgaggaactgtatcaggctctgcccggttctgccgagaccatcatgacgcaggcatggccaacctttgacgccgctcacaactgggccgctgaagaggaagcctttgaaaaggtgatggattatatcaaggctgtgcgtaccatgcgcaccgagatgaacgtgcaccccgcaaaaaagaccagcatgatcattgaaactgccgatgcagcccccttccagaacgcacaggtctatctggccaagtttgcctttgccaccgatgtgacctttaccgaaaagtacgagggcagcaccgatggcatggtgcaggtgtccacccacgccgcccgcggcttcatccccatgatggagctcatcgaccgagagaaagaattggctcgcctgaacaaggaaaaggccaaggctgaaaaggaaatggccatgttcggcaaccagctgaataaccccaagtttgtggagcgtgccccggcggctctggtggaggagatccgcacaaagttcgccaagagtcaggacaagctggccaacatcgagcagagcattaaggctctgggctgagactgtggaacgctataacgatacggaacgcacctcactgtgggtcattgcgggacgtgtggtctttaccgttgcactcatcgcctgcatctggttcatcttttccaactccatggcggtggcaacggtctccaccgactccagcggccgggtgctggcgtggatgcgcatcatcctgcgccgcttgggacagccggggctggcagagcatctgaccatgcatatcgtgcgcaagctggcacacttttgcgagtatacgctggagggctttctgctcatgctctgtatgcgggtgtacagccgtcacccgctgcggcatatcaccgtgcccatgctgggcggtgtgctgacggcgctgaccgatgagaccattcagctcttctcggagggacgcagcagtcaagtcaccgatgtgtggctggattctgccggtgttctggccggcatccttgttgccatcgtactgctgttggcctgcgagggactgtattatcacataaaaaggagacacgaatgaccatccaacaggcaaatcagtattttgcagctctgccggacggctttgccgacccggcgcagctgggcgcactgctgcccgcctcggtgcagcaggtgcagttcgtgggtgtggcaggcactgccggtaaaacggcggtggcgcgtctgctggcagccattctgcacgcgcaggggatccgtgccggtgtctaccatgccgggtgcgagccgcttgctgcccgcatccgtgtggatggcaagccggtggacgaagcactgctgtgccgcgccgccgatgcccttgctgcccatgaggagctgcctttgcaggcggcagagcttgttgccgctgcgtactgctttggcgaagccggctgcacgctggcggtagtagagctgccggatgcaggtctggctgcggtgctgccaaaaatgccggtgtgcgccgtcacagcggtgggaccggatggcgtgagccgctcggtggaacgtctggctgcattggcaggcggcgtgatgcgcaaggaaagcatctgcgtcaccgcgccggagcagcccaaggcggtgctcagtgagctggttgtggctgcgggcaagtgcgactgtgagctggtagtgcccgatccggaggatatcacctttctggaagcagaacagtttgccagccgggtggactacggcggctacacagtgccgctggcctttctgggacgtcacgccgcgggcaacgccgccatggcggtggagctggcgctggcgctctgccgcaaagaggtggacatctccgatgaagccattctggatggcattgctgccgtggacaaccgttgcagcattcgggtgctttcccagcgcccgctggtcattctggatgcctgccgcaccccgcagcaggctgccgcgctgctgcgcgtgttgaacatggccaaggtgcgccacatgagcgctatcatcggcctgaccgaggaggagggggcggaggccttcttctccgcgctggagaccggcctgagccctgaggaacagaaaaaggataaatccaccatgcccggcatgagcgagagcccctttgataaggtgtatctcgtcacgcccgccggtgtggaggagcagctgacccagcgtctgaccgagaaggcaaagtatcactttgacgcccagctctgcaccagtctggacgaggcggtgcagctggcgcacgccaacacccgccgtgggctgctggtctgcggcagcgaggcggcagcgctggaagctgccgagctgctggcaaaggcgtaagctgccgacagctttttctaaaaaataacccgaagatcccgtacactgaagttatgtgtacgggatcttttattttgtaaaaaaggagatggacaagcaatggcaacggtgaccttcagcgcggcaggggagaccctgtatgcctatctggcgggcgagatcgaccacgatgccgcccagagcctgcggatgcagctggacgatgcactggtcagccgcagtccccgcaccttaattatcgatcttggcggggtagggttcatggattcctccggcatcgggctcatccttgggcggcagcgctgcgcccgcgttctgggcacgagcctgcggttgcagcacgcccccgcgcagctgcaaaaagtcctgcggctggcgggcatcccctgtacggagaatatagaaaaggagaatgcgcaatgaaagcagagaacagcacccgcatccagttcgattccctcagcagcaacgaggcctacgcccgcggcgttacggcggcctttctggcgcggtatgatccaaccgtgccccaactggccgacctgaaaaccgcagtgtccgaggcggtgaccaactgcatcgtccacgcctacccggagcggatcgggccggtgtgcatgaccattgcggtctaccccgaccgggaggtgcacatcaccattacagataagggcattggcatccccaatgtggagcaggccatgcagccattgttcaccaccggcaacccggaagagcgctccggtctgggctttgcggtgatgcaaagctttatggacagggtaaaggtcacctcaaagcccggcaaaggaacaaaggtgctgctagtcaagcgtttgtcccggcgtgagcctacataaaaaggaaaggcggtccggtatatggtaacggataagacccggcgggaagcattcatcacgcagaatctggggctggtgcatgcctgtgcgggcagattccgtgggcgaggcatggagtatgacgacctgtacagcgcgggctgcgtggggctcatcaaagcctatgataattttgacgagagccggggcgtgtgtttttccacctatgccgtgccggtgatccttggtgaaatcaaaaagctgttccgggatgggggtacggtcaaggtgagccgctccctgaaggaactgggaatgcgggtgcaagctgcacgggagcatactatgaagctgtgcggcgcagagcctaccttgcagcagctggctgagcagctggacgagccgatagagaatgtagcccttgccatacaggccgcgcagcccgccatgagcctgaccccggagggcggcgaggatggagaccggcagctggatatcccggtggaatctccggaggaggaactggcagaccggatcagtctggcagaggtgatcgaagcgctgccagagcaggacaagcaactgattcgtctgcgcttttatggcaaccgcacccagagcgagactgcaaaagcactgcatactacacaggtacagatctccaggcgggaacgtaagatcctgatccggctgcgcgcccggcttttggaggaataagggaggaagtgtctataaaaaatgtaaaaaactgggcaaaaagtaaaaagaatgattttggcgtaaaatttgtaaaaaacgcttgctttttgaaggatgctgtgctaaaatacattactgtcaggcggacgtccgacagaatgaaatacttcaaaaacgacgtcaaacggagagattcgacagaatcaaaaatgaatctcaaaaatctttcaaaaaagtgcttgacaatttatcacgaaagtgataaaataactaagctgtcagccgcaaggctgcggcgcacaggaccttgaaaattgaacaatatcgaaag

SEQ ID NO: 477 - DNA, 31177 bp, unidentified
  source 1..31177: mol_type = unassigned DNA
tcagcggaacaatgcctccccgttcaccggttccccgttgtgggtcagagcaaagtatacgttgcttccttcggtgctgtagtatttcgtgggcgctgccacactgccgatggtgtcgccgggattcacataggaattctctttcactgtgatctccgtcagctgtccataagtggcctcatagccgtcacccagatccagggtcaccgccttgccgatctcctcattttcgaagattgaagtcacttttccctgtgcacaagcggtcactgccgtaccttcttccgcggaaaaaatggtggcgggattgtatttatactgatccagtgtagcaaaataagtgctcttgtccatagagtaatgcatcagaatatcactctgcaccggttgctgtaatccgtcactttctgcaaagtgcagtgtcttctcaacgaccacatccccgcctgctgtctgctttcccccggtctcttccttttgtcggtcggcatcggaattctgctgctctttctgtgcggcctccagcagggtctcctgatccgtcagccccggaatctctacgttgccggagcctacctcctggggcatatagtccagatcatcctcggtgacaggagttcccgcgatctcatttcccgctgtattatttgccgtcagtccggggatgttctcgtcctccttcagaagatgttcgtcgttattctccgtgatctcctgtaatttgtcatccgcattgttgggaagcgcagtgaagtccaaggtataaccatcatccctggactccacattctgccccttcatatagacccctgtcatggtcaatgctgccagtacaaaggctgaagaggctaacattataatacgttctttgttaataccgctctttttatttcttctcatatcctatccgcatccttcctgttccctgagtcaactgcctgctatacaatcgtttcaaccactttccctggtttatcctatagtcttgcccgattcatgggttttattcagaatgtcttcgatatgaaatttgcatttatttggaactattcagagccatgtaaatagcgtcgaatgtttgcattcgtaagaacatttgatgctatttatagggcgaagtaactgaatagttatatttattctatgcctgtgcggcataggcagccatatccacgtgctgtaccgtacccacatttccgttttcgtataagaaaataccggtcttgcggatcacagcattggtcgcattggcattggtagtgccgtcctgggccttacggtctccctgcagggtaaaatccgtagaagcgttttgcagacagatagcaccgacacccttgtcagaaagtttgtacagtacgtcgttgccgttttcatccttgcaccagatttttaattttgaccagatggaatcgttctcatcgatccagccattgccatcctcatcatactgcgccagatctgcaaagccatccccattccgggtgccgaatagctcactgccgtcgttgatagtgccgtcaccgttcttgtccagtgccagatagccgctgccattcagcacggagatctcttcttccttgccatcggcatccagatcaaaataaaaggtctgatccgacacttctgccacatcagtatccaggttgatcaccagcggatcatggagtgtgaattctgctacattgagttgctctttgtagtattcctcgcatctgcggctcatatttacatttacattaaaattgatctctctgccatccttggtccgtacacttcccacggtggaaaaactggtatcctcctgttctatgttccaggtctcgctcacatagttcaatattttcacacgggacgtgaccagattgaacacgtctgacgcaggtgttgcggttccctgtgtactgccggaattcgtctgggtattatttacgctattccctgtattccagctgtttccggtctgattaccgctgctccatccgttttcctgcatccagtcccgcaaagtgctgttcctggacgggaataataaatcaaaaatataacgcaccgtatattcccggatggtagacaatgtctgttcactggcactgcttcgcatatcccatctggcagaagataccagcaagcgactctgccagtctttggctgtcatcgtggtgttctctgcagtgttctcctgttcctccgtgttctgtgtggtatcctcaccattcggtgtcttctgtcccttagtggatacatctgtcagacctgcctgataatccgttatctcaaatcgtctgacgcttgtcttagaagcgtgatagcttctggcggaatccattcctatgcttgcggaatcaattctcaaatctgtaattttctcctttccccgacctcaccacgaaccaacagggcgcgcttcctgtaacgcttaacagttcaccgccgcatgtattcataaaagcgcctgctccgcagtcgacgccgctaagcggctcatcttttatttcatacatgcggcgctccgctcatgcaatatcatatgttctgctttgtgtgccagcacccacgcagaacatatgatattgcatggctgaactgttaaactaaaaaaagatggtaaagaaacagaatacatataatatgcctctgtctggttaccatccgtggtgtcattatcaaactgtaaaaaataagtagcaggaagtgactggccttgtcacctctctactacttatatcgtccgctatggacattttatttagtgttaatttactgctgttggggctgagtgggagcgccaggggttccgggtgcgggaggcaccggtctgccggctgctttcagctttgctgcgatcatgctggctaccatttctctggtcaccacgatgttgccaccgaagggattgatcacgaatcccagcgccgggctgatattgccctgtgcatctttgcgcagcagcattcccgcataatcgtcaaagttcatggcgaaagtctgctgattctcctcatctctccacctttttagctctgtccagtcagtgaacgccatgaagaacttccgaccgtcctcggtggacagcatcgggaactgtactttggcatctcttgcgatggtcacccggccgttttcatcgggcacaggcaccggatcgatcacgaccggagacaggaactttgctttctgcagttcatccaggaacatctgtctgtgttccggggtgtcctctgcttttaataattcaatggatcccaccatcatggggttggataccggtttgttaaattccatattttttctccttacttctcattgtaactattcagcctctcttcgcgaaacgcatctgcgatggttagtcacatgtctctgaatagttacactcggttatagttgatcaggcatcccttcaggatgatctgacgttcttcgtcggtcagctctcccagcttcagggtgaattccttcatgccttctccggttgttaccacatatgccttaatttcctcggccttgtcttccacggctttcttaatactaggaatgaacaggtaatccagattcttgaaaggcaggtctccgggctggatcaggaaaggaagcatgccccagttgatcaggttggaacgataacgcttggtggcatactcgttggcaatatttgcccagccgcctaataccttctggcaggaagcagcctgctcacgggcagaaccgtctccgggcttcactgcgaaaatagtggaaccgaatccggtgttctcacgacttgcatcgggatactgtttctttacttcacccataacatccttcagtaccggaactgcctgacagggatgtccgccgttcatacgctctttctctgccttctggatctccttggcacgtcctacatactgcggatccttacggcttaaagtgaactctgccagtcccagaggattggagcggtaggaagaggtctcaccggagggaatcagctcatcggtagtagttacgggatcgtggatctcggatactacctgcagtaccagattctcaggcagggcacccatagcgggccagtccttgatattggggccgaactggatctctacgctctcgtctgccacaccgtgggaatcgaagacacggttcttgtaaatattgctatcgaaatgatatttgtattttccgaaatctccatcgaagtctgttgcgggagtcagcacacccttgttggctgcagtggctgcgatggaacgggcatccatcagagctacggaagcgatctggccgttctgcaacttggagccttcacggttcgggaaatttctggtagagtgacggatactgaatgcgttattggcaggcgtatcaccggcaccgaagcagggaccacagaacgcagtcttcatgactgcaccggtctctaagatggtagccgcacagccgttgcggatcagctccatgtatacgggcatggatgcgggatatacgcttaaagtaaactcatccgcaccgatgtatctgcccttcaggatgtcggcagccgcacagatattctcgaatccgccgccggcacagcctgcgatgataccctgatctacaatgaacttgccgttctttactttattcttcaaagtaaagtctacagcaccgtccagacttactttcgcacgcttttccgtctcatccagaatatccatcaggttcgcattcagctcttcgatggtgtaagtattgctgggatggaacggcatggcgatcataggacggatcttgtccagatccacctcgatcaatccatcatagtatgccacctggccgggattcagttccttatagtcttcggtacgtccgtggatctcatagaactcacggatctggtcatcggtcttccagatggaggacagacaggtggtctctgtggtcattacgtcaatgccgatacggaaatcagcactcagggaagccacgccgggacctacgaattccattactttattttttacatagccattcttgaatactgcgccaatgatagccagtgccacgtcctgaggacctacacccttcacgggagcaccctttaagtatacggctaccacgccgggcatgttgatatcataggtctggttcaacagctgttttaccagttcgggaccaccctcgcccatagccatggtacccagtgcaccgtaacgggtatgggaatcggaacccaggatcatcttgccaccgccggctaacatctctctggcaaactgatggataactgcctgatgagggggtacatagactccgccgtattttttcgcacaggtcagaccaaacatgtggtcatcctcgttgatggtgccgcctacggcacacagggagttatgacagttggtcagtacatagggcatggggaacttctgcagtccggatgctctcgcggtctggataatacctacaaaggtaatatcatggctggtaagcttgtcgaaacggatcttcagcttgtccatattgccggaggtattatgctcctgcagaataccatatgccatggtgtttttcgctgcttcttctttggagatcgtaatgccggtcttcgcctgtatctgactggctgcttccggggtatccgctacgatgtccgtaccgtttaccaggtaagcgccgccctgtgttaactgaatcatgctcgtcctcctgttattccacttcttatgcgtaatgtgcatctaaatgtgcactcctttcattatactggattgttttctcagatgcaatgatcttataggatgtttttgccactgtaccacgctaaattttatttttctccgggaaccattcctcttttgttccggtgttgctataatatcctcagaaattatgccattttccgaaaatctatacgaaaacgacagttgtcggccgaattccggcggcagcggaaaggaaccttatgaatgtagtaatagctatcgattccttcaagggaagtatgacctccatgcaggcgggtttgagcgccgccacggggatcaaacgtgtttataaagatgcacatattaccgtccgtcctctggcggacggcggggagggcaccgtcgatgctctggtaaacggctgtgacggccgtatgacacaggtgcaggtcacaggcccttccggccaccccgttgtctgtccttacggcattgtcgacgagacccataccgcaatcattgaaatgtccggtgccgccgggattacccaggtcagcggagaggaaaagaatcctctgaacaccaccacttacggtgtaggcgaagtcatcaaagatgcaatccagaacggctgccggcattttattgtcggtatcggtggcagtgccaccaatgacggcggtgtcggaatgctgcaggcacttggctttggctttctggataaaaacggaaatcagatccgcttcggagccaaaggactggaggatctggaatccatcactacggatcatgtgcttcccgaactcaaggaatgtactttccgcatagcctgcgatgtctccaacccgctctgcggagagcagggatgttccgccatctacggaccgcaaaagggcgctacttccactatgatcctgcagatggacaaatggctggcttattatgccgctctggccagagaacagtttcctcatgccgatgccaaatatcccggtgccggtgctgccggcggtatgggatttgcttttcttaccttctgcaatgccacactggaatccggtattaagatcattctggaagaaacccatctggaaaaatatatccgggatgcagatgtcgtgatcaccggggaaggccgccttgacggtcagacggttatgggaaaagctcccatcggtgttgccaagattgccaaaaaatatgaaaaaccggtacttgctttttccggctgcgtgaccaaagaggccgttgcctgcaacgcagagggcattgatgcctttttcccgattctgcggaacgtggtatccctggatgaggctatgcataccgacaatgccatgaccaatatggcggataccgcagagcaggtattccggaccatacagacattttcctccgtctgcaaataatgcactttacagtttttctcttaatgataagcttatcaacgtaaaaagtttctaaatgtaaagcgaagatttttcacactcaaatttgctcctgcactgtatactcaagtatcccataccacagcttaaaatctccggatgacatcgtgtccgcattgcccctgccttctaacacttttcaagaaaatgtcaacaaccagctgtagtatgggctgccaccactccggaagttctgtttgtattgaaaatgccattttgggctaaaaaaatacaaaagcaggagattttggccttttataagagcttattttcgctaaaatgggaaaaataataaaatcagtacaaaaaatgtttgatttagaagtttttttgtactgattttgctattttgatgcgatttgcaccaaagcaatagaaatgcctatagtgtacagatattatgagaaagcacaaaacacccacgtcagatggaatgtccttccaagaatgattgtcggaaggtggtgattttttctcgaaaagcattgaaagacaggatggaatgaacaggatgtttgcggcaggccccttgcatgacagccctacgctacgaaccatgcaaaaaaagagcgaaacagcatcgcttgtgcgcaagctcccacgacgtgttccactctatttctgcatggctcgtagctatgctaactttccatttactaaactatagattattcttcgtatccgtttggattgttcttctgccatctccaggaatcttcgcacatctctttgatgccattctcagccttccagccaagttccttctctgccagagaagcatcggaatagcaggtggcgatatcgcctgcacggcggggtttgatcacgtaaggaatcttcacgccggtagctgcttcgaagttcttcacgatgtccagaacactgtagcccacaccagttcccagattgtagatcttcagtcctgcattctcctcaatcttcttcagagcctttacgtggccctttgccagatcaacgacatggatgtagtcacgtacaccggttccgtcgggggtatcgtaatcatcaccgaagacacccagctctttcagcttgccgactgctacctgtgtgatataaggcatcaggttgttggggataccgttgggattctcgccaatggtaccgctcttgtgagctccgatagggttgaagtaacgaagcaggatcacattccattcgggatctgccttctggatatccgtcaggatctgctccagcatagatttcgtccagccgtaagggttggtgcactgtcccttggggcattcctccgtaatgggaacaaatgcggggttgccgtatacggtagcgctggaagagaagataatgctcttcacaccatgttttctcatgacatctaccagggtcagggtaccggcaatattgttctcataatattcccagggcttctgtacggactcaccgactgccttcagtcctgcaaaatgaatgactgcgtcaatctgttccttgctgaagatctcttccagagcttcacggtccagaatgtctgccttatagaaaggaaccttcttgcctgtgatggcttctactctggggatcactttctcacttgcattgcagagattatccaatacgactacatcatagcctgcctgctgtaattccactacggtatgactgccgatgaatccggcaccacctgttaccaaaattctcatacactctctcctatccgccgtgcataggacaatactatttgttcactatggcggctgcacaatctcccatctgtcagagccggatgaaattttttcttcgtttcttacagtatcagattactgtaattctatcgattcctcaataaccttatgttgtgaaaatctgtcgaaatgtttacagcaccacaccattctcggtgagcagttctctggcactttccacagagtccacaccggtcttgttcttgatcggcgcaaattcttttcttctgactacctcgaagggcagacagctgtccatctggtggatcatatccagtaccagactctcgaatttgtagccgttgggagcctccggcttcaccggttctccgttctcatccagatacgggatcttcttctctacgatatgcaggggcatcttctctgccatgatcttttccagatcctgtaccttgaacagataattcaggatcacaccataattatacgcgggttctcccttctcatccttagcattcatcagttcatcggtcagttcataatattctacgatagaaggtctgccatcctctaagcacataacgcctaccttctcatccggtgcattcttgcggaccaccttggagcctaccacacaatttttctgaatagtagctccgatgaagcagggatctgcgattcgctgcaatacattatccacggcaaatacattgatccactcaatgccttctctgtgtacaatgtccagcatgccattgtttttcatggaaatgaaccagccgccgttaccattgggggaagtggacagcttgcccttttcctccagatagatcttaccttcataatcggtagccgcagccatctcctgtttaaagaaatgcacatattccgcattatatccgaagaaatcatgctcctttaaaaaggctatggtcgcatcgttgttcttatcactggtcattacgaacagatggatccagctgtctgcctgatgtacgacttccatcagattattgatcaggcattcaaaaatatacagttcatgagtcagtcccacattgtacattcccttgggattgtcagatcccagtctggtgcccataccaccggccagaaggaccgctgctaccttgccctgtcggatcgcttcgataccggttgcggtaaattcctccctgtttgcttcgatttcgtctaactgcatggcagccaacggtgtgatcactcctttttttgccagatcttctttatgcttgcaagcttccagaatgctcatatccgtagtttcgatctgatccagaatcccctgcttctcttcctcgttgagctccccgtaatacttcagaacatgttcctgaccatacttggcaagcttctccttagcctgttccagtgtcatactcatattcctacctccgttttattttctccgactattccaccccgggtaacagtcaattttctctattatacttgatatttcctgcgattgcaaaccttactcccgggatcgttcccgcccgtaagtcctgccgttaagattctgtaaacgtgttgcaaagattttgtaaatatcccgacaaaatggtgttaagggtcgctcaaaactattcacccgggggtatctgtttactataatacggtatgtgaagtttttaaggacttcatcgaatgttgtacagaatgacagaaagttgaggaattcattatgaatattggaattttaatcattgcaatcgtaggcggtgctaccggacttttatctacagcttatctggcagtcagtttccctgccgtgatcctgtggaaactctatcgcagggtggtacacagaattcctcttacacaataagcttacaacgaacactttccctctaaaagggcccggaagatttctcctccgggtcccttgtcgcattttcttattctatttttattcctgtaccggatcccagttctcatccaccagtgtcgcagttactgtaattccctccgatgcattttctgcgcggatcacaagatagaacattccttcttccgaatccgcggcatattctgacggattctccggcaaaaagacagaaaatccctccgggtactgctgcatctccagaaatcccttttccaacagtgcagttttgtaggcttcttttactgcatcccggtccccacaggagtacacctttattgaagcaaaagttccctcttcgctgtctgtctccgtacaatctgaaatcacagcatcgggatagataatatcctgctgcaccgctttcagatattccgttgacatccggacactctgtaagatctcaaaagtatcttttccatcctcggaatgcgccatgagtaccagactcaaaagcaaaatgagcagataacttcccagtgctcccgccagtattttcgcaaaaggattctctggctgccccagatttgtataagaagtgatgatccagccaaaatttcggtagtccaccgcggtattacagtattcgcagactccgccgcccaaaatgtccacactgcctccgcagttggggcatttgtattcccggagtgccctgctgtgctgcgttaccacatcctgtctgccttccagttccagccggatctcctcataacggttccggatcttctttcctgtatccagtgtcaatcgggtcctcacttccacgctgattctgtaagactctccccgtgtctccgcctccagaaaacgcacaccgcaaatgcaacagtccaccacattctgataccgtgccaccaccgtatccagatcacaggatgcgaaaaagcgtacctgctctgccgtatccgccagatggatcattcgcagctggtattccagattctgaagaaaattacccgtggagaattccaggattgcggcctttactttcgattcgtcttgaattctcggctttctgcgagtctccatcacgatcaacattacaataaatataatgagcatgtaaaacaacgactggaaaaataccggagccagaccaattcccagcatcatggctgcggctgcctttaccgcattgtatccgttcctgcccaacgccaacagcaaaaacataatgccgcccgcacagatggccagtaccgcaagagaaatcgctgtaattcccaccacagcaccggctttcataaagttggaaatacttttctgtcttgcgtcctcctccagagaaaatccggatacctttgtttcaaaatcactgacgagaaactttgccccgcaggcatcacagccatcgatatagctggtcagttttccctcatgtccacagttagggcagataaccatatctccctgcacatccgctttcaaaaagctcgccgctgcaatctccggtgtctttaggaacgcaatcttttttcccttgcggtaataagtccgtctcatttttaccggctgggtacggcggcagctataatcataaccatccttccagggaccatcatagtccgccagtcgtgccggctcctgcatctccatatccaccgtcagttcccgctgctgcagtctttttctgctcaggcgcagactttgccagaaaggctgggttgtctgctccatcaggttctgttccgcttccccgttgccctgatagaatgcttttaattccccacagaagtcttctgtccgtccctcgatctctttccgtgcatcattcagaaactctgttgccatttcgttttttctctcctcataagtgatcctgccgcgcaaaggtgctgatatcttttgtatcttatgtcccaactactttgtcccatatagctatgtatccattatataagttggtacccggtatttcaagacactttcccgtatagaatgatttgcctcatcgaatatctagtgctggtgcagatacttctctctggtagccagtccgccgcggatatgacgctcggatttattcacatccaataccttccgcgcctgcttcgccaacgccggattcacctgcaccagtcgctccgtcacgtccttatgtaccgtgcttttgctgatgccgaaggccttggcagtctgccgcaccgtggcgttgtggtcgatgatatagcccgctatccctatagctcgttcttcaatatagtctttcaaaggaaaacccctcaggatacttttttacagtgtatgaaagtatctgaggggttatgccctgattatgtttatctatttattttattcatttttctaagaatcgcctgccaatacatcctatccttcaacaccctgataacggttaccgttgtgccttcaaccacaaagaaaatcaaatatgtactgtagggtttgtaataaatctctaatccctcaatattatatcctgttttctcatacccttcagcaaaaggatctaaggctttgattgcagaccttattttcttggaaaaattttcagcatattccctatacataaaagtctgcaatatataagtcttcatacttttaatatcttgcaaagcatccttcgacaagacaattttatattttttaggtttatccatatactatatcttgtcgatttcctcccatgcttcttcaatggtgtatacctcaccatttttcatactctgcactccttttgccaattcctgatagagtgcatcgaaagcatctttctccgtatagtcatatgtgcgattatttactgttgtgtctactgctgctaatggtgccatggtatcacttcctttctgattctattatatgcaatatatgtttttatagcaatacacatatttttatttaaaatttttcagattcactttcatctgtggcggattgctattttcatgtaaggtgcctctattaagacctataagattttctaaatcatccgcatttaatgttaagccatattccgaagaaagttcatctaataattccgtcggtgtaaatacaccttgactcaataaaattcccacagcctgctttagtaaagaaggtttagcagtaaccaacgtatcatctaatggttcaaccttccttattccttgcttttgcatatttcgcatcatcttttgatattcatcatttcctatcaatccaagactatacgaacgtctaatcatcgccgcaattgacaccttccacctttttttaagttcaacataatatggaagcttattagcataatttcctatatcagctctaaattcattttcaggcattagaaaagcagcggcaaaatcattcgcctgattttccaattccttgaactcctcttttacctctgataatccctcattccaatcatgtaataaaatgtgtcctagttcatgcgctaaatcaaagtgtattcttgctgctgcatttttattttttgagaaaccaattaaataagtttctgtattgcttgatgatattttatgactatatgcatctacatctcctgtatttgtctcaaagtctgtcaccactagaccatgtgactcaacaagatatatcaaattatcaattggtttatttccaagtttccaatgctttcttagcaaagttgccgcttcctctggtgtacagccttgcggaatttggggcaaatctaaaggttcaaaatccaaatattctttcaaaaactcatacacaattgatataaatgttaccttgctctcttgctcctcaatatattttttgcttgttgttaacaacgatctaaaataagttgttgtttcctccagttcaacattaaagtcctcaacaaaaaatttaaatggaaagtttaaacactcgcttattttttgaatcgttccaatgtctggattctttaattttccattttcgtacattgaaatggtttgacgctttactccaattttatctgccatttcatttgcagatatatctctccataatcttgctatcttcaacctttcgccattaaattgcctatcaggataagttctcctgaaatcaactatgttattcattcttccagctccttaattatctattaagcatttttgctgttttcttttttgtccttcttttcttcaacatttgttctctgttttgcccgctcccttgcctttgcattcaaagcaacagattgattatactgtaaatcattatcttcttcaacaacttctggaactatagactgtctatgtttaatatatgaactccagtcttcctgatccacaatttgtaaatcactgttaataacacagcattttattgaaacaagttcatgattatattcattaaataaaataaccgcataattttcaatggcatctttttctacctgcatatcttttaatataccatctacaatttgtgctacttcttcctcacgatcttgatcttctaaaaaaacactcatctgagaggcttcgcctaatgcaaagttaaaagactgcgcaaaggcttccatataatgcaaccttttccgttttccttttcctctacacaactcaataaatctctcttctcgcataactgagaaaataaaatgtgaagagaaatctaccagtggaaccatattccaaggtcctctttttgcataccttgcgataagtgttccctctttaaatgaattgatgcagttcttattaaataagtcccacttcaaataatgtttaccaacggaatgtctttcatcaattcccatcttctttaatcctatttccagttcatcccccaaggaagaagacaatttgtctactacttctataatgttactttccgaaatgaatttataagtcttttccatagaaacctcctattaagtgttaaatacactataggacttttttcaaaatatatcaactatatatttatatattttttaaaaggtcatattgttttcatttttccaaaacatatatctatttttcattcttttggaaacttttttattcagcgcacctctatcctattatagcaatataaaaaggctgatttctcagccttttccctactctatttcaaccaccacactactgtcggtttttatacatccgtatgtactgtgcttttgctgataccgaacgccttcgccgtctgccgcaccgtggcgttgtggtcgatgatatagcctgctatcccaatagcccgttcttcaatatagtctttcaaaggaaaacccctcaggatacttttttacagtgtatgaaagtatctgaggggttatgatagagattggcactacttcagaatttcgtgtttttattagtctttttcattttgcgcatgttccaattcatatagccgtttaatcattgcatctatgacgcaaccattataacattcactacgactgcaattgcccggtatattacaaatcttataagctccattcaccaaaattcttccttctttatcctttgatgtaagtttttgcatcctaatatcctctatccacaattattttttcataattcttgacaacgaaactgcttcttgctactatcttaagtaagaaatgggttttcaccacacttattgttgtggcttgctcgtttctttttttattgccaaaatatcatacaaatatttgttcccgttttgagcatgattaataagtaatcttgctctaaaaacattatatctgatcaacacatcattctcatacacaggaatcgcaaatcgtacatcatatctataccatccatgcttagcatctttatcatgtttttcttttttgttttcctaataggatggattctttgcaatctggattagttccgggatagctgttgtagcatttgctttcgcttttgcattagctcccagcaataattttttactctctgaacctgtatattcgtccggaagtttattaccaatgtatactttttccgaggtttcttctatttcataatagtcacctacatattgttctaaataagtttttacttcatcccaattaacattccttttccctttaaatacaatgtcattaattaagaccaacctatttccatctgcatccaaaataatatttatctttctattttcaatcataagtatatcccttgtccgacatatctgaatcatgtatttggtttatcatttcatcaaaatatgccttataacgatacgctgtcctgcggctgatttgaccttcctttacaatttccattattgtcattcctgctttgtacttaattgcaaattcctgataagacgacttccatgcctcattatgttttttacgtcctcctaagttacgtgccttaaggcgttctacttcagccttaagctcttcattctccttctccaattctttaatacgcatctttgcttcttctaaagtacttatcacaaatatctctccatcctttatgtgtcaatttggtttatgacatcattataattataagcagcaggcgtgtcaatttgatttttggcacacaaatatctttgcaaaaagtattacaaacatctccttttaaaaacattaaatcaaggttatctgttttcattatagtaaaagcaccccctgatatctactcgagagtgcccttatttcagttctattcaattctccatatgattttgcttttgtatcgtttcatattgttactaccgcatgtactgtgcttttcgagatgccgaacgccttccgtcagtctttacgccaaaatataattctccatacttcctatttcttccaccttttcagtttcctctgattctgctatgtactcactatcctttgcccattgcgatgcagcttcttccatcgcacgttccactttaccggcatttgcttctatcaaaatcttacacaagaaatctgcggtatcttccgctgaatttggattatgaaaacgataatttaatttcatccgtctcaagcgaaagctacacccccttacctcgcctgtccttctctcccatactatgagaaggattcttagattagaccagaccttttatttaatctaagcataatccacttgaaatcaaattacgttcccaaaatactggacttttgtccatttccaccatacttttttaaaaattacaccgatcctgactacatcatattccattcaaagccgtaaaagtgaaggaaaacgcttgaaaagattttatgttactaaaccttttcaagcgtctcaatgccaatcccgtatacaattttataatcggcattctcttctttgccttgttttttctaaattcaaatttaatttcatttctatattcataacttggcaagcagtgcatttgtacacacaaaatgcatttttgcttgttgggagcatctcccaaaccctcagaatcaatcagaaatcggattgggccatattgtaaataaaacctttggcaacatcattaaactcaacatttacaccacgatatcccttgtcggatactttgacactcaacgcttccccattataatatttctgccacatcttatctatgaatgagtacgattagttctttcttattctttctcccctgcggcagccatagcctccagtgtacgataatctatttttcccattggtgtcaatggaatatccggcaaaaaataaaagtgttctggaatacaatggcttgcaagattctctttacaccggagcaggcactctttttcaagtacatcttgatgtattgaacttacaatgaatgcaactggtatctgaccagttaaatttttactgactcttttccccaccacagcacaataatctactcccggcactttcatcaaaacttcttcaatcaaattggggaaaactttaaatccaccttctcggataataatgcgcttaattcttccgtctacataaacaaacccatcttccgtcacatgagccatatcccctgtatgcacccataaagttccatccttatgttgcttaagtgtgcttgcattctcacttacagctctgccacaataaccgttcataatacttgggcctttgacgcaaagttcaccctgcttcccatatggaagttcatcacatttttcatcaaatactgccaatgtcatgtacggcagaggaatgcctatacttcctgccatagagcgattctgcatatttgtacacacactagatccagtttccgtcatgccatatccgtttaaaatattataacttgcattatgcatgtgaaagaaagcattcattgccttttcactctccgggttaattccatctccaccagttgccgccgtaataagaaacgataagtcaacatttttcattttagaatcgtgacttagccgctcccaccatgatggtgctgctattacatgctccggtttatttttcagatattgaggaaatttcttctgtataaactgaggaattaaatttacagcaactccagcagttaaaggaaggtttagacaagtacacaacccattcaaaataaatggcggcaccaaacacaaaaatttttctccacgcttcataggcattccagacaccatatactcaaccgcaacacataccatactgcgattcgagatttgaactcctttaggcactccggttgtcccgcccgtgtgtgcaattactgctatatcatctggcttgcaatgcatttcctgcattgctacaccgtctgtacctaatttgataaactccttatatccaatgaattgtcccttgaagtttgccttattgcaaaaaggaattccccacgactgaagtggagtcatcacaacagcttgcttaacttcagtatctgtgattgcttcacgcatatttttcaaacatgtatccaacagcacgacatagctattcttctgttcattaataacatctctaaactctgaaggtgacaagcgaagatctagcatatttgcaatagcaccgattttgttcaaggcataaaagcaataaaccatttccggagtgttggtaacacacatggcgacaatatcgcctttttttacccctagtgccatgaaagaatttgccaccttgttaatgctttcaaaaagtctgcggtatgaaattttcttaccaaaatacattagtgcaatatcatccaaatggtctttatttttctcccagaggagttcataaactgtgcactccggcaacggcgtgttcagtgctttctcactgtaatatttcaaccacggcttatctatagacgggtatcctgttagctctttttctgtgctttcatttattatcttcattgtttttctcctcgtcttttatcatatctccgcaagaactcccaacatctctactaacgtagttgaaatgttgttattgtcttgtcccagttccactaaagtcttcatttgctcgtatttttcatattttccatgagcgtcctccgtcctgagcagttcccatcttttttctccaatttctacatactgctccttcatgtactgcgtagtcacctcaaacaatttgcgttcctctctttgtcttgcataagcagccacatagaatctcaatgccgtgtccagcgtcttactatcctctgtccctttagataccgatctaaacagcataaccttggaaaaccatttgaatgcaaatgaataccattccatgcgcagataaaaatcccccatgtactgcatctgctccacaacattatccggttgcgagaaaaagtccacacccgttttctttgtatctagtttttctctcttccacagaatacgcagcaatgtttcctctccgtctttctcctccatgctctttaagaagtttattgctccttcctgcggtgtcctttgggacatgagacttctggtttcttcaaggacttctcttccaagcaaacctgcttttcccggttttccgctctcactcagataagcgcatacattgtgataagctttgagcatttttttctgaaattcagtcacaacattattctgtgtttttagacttgtccgcatcaagctgtccagaatacatcggcgcagccagtaagtacggattccatgttgaacacacgcatttagccgtgccatttcctcttcctgatcttccactctcagttctttatcatgcagcatataccacgggaaattgcctctaagattctggcaatccctcataagcacttcccatagcaccttctctttctcattccgggaatccttgaatttccagatttctgcataatccgaacaaacctccgcatagagttcatatggaagctctgtattatcaccatccaccacaaaaaacgtcgacgcttccggatcataaagcttgcaaaaacgttcggcatcttctccataaagctcggcaaacagatctctacacagacatctcatttcatccaggccttgaactgccagttcgtaagcttcatggtagaaatgttccgccgaacaatcataagcggtggcattgattgcttttaccttttgctgccgacatacatagtaccagtctgatgcctctttattctcatttgctgcaattgtttgagtattccaaaattcgatacataatctttcaagtcttcttgcaatattgctttggctgttatttgtatacaaatctgccagtttaaagcagcattccatatagtacagtgtatctttcttgggaagttcacccttcgccggctccacgttttggtcgctgaaatcgtttccaaccatctgaacaaaggggatttcataaacactttttaatttgtcaatataggcagaatataaatggatgaagaactcacctaccgttccgctttccttattcgcctcgtaaatattagccatagcacccttgatgcggttcagtgtttccttctgtgtatctctctgcatgtcaacgtaggcaaatacaatctgcataaaggcataaatgcgctttagttcataccagcgcggatttttccctttcttctctccgtaaatagtaagaaagcattcaaaaaggtactccataacatcctgcttgatataattctgtttgttgctgtataaagcctcacgcaacgcttcatgcagcttgaatccgtcacgccctactttctcaataggagcggtatgttcaagcacatttctggcattgagcagatgattgtccatcttctgttgcacaatcttaatccaatcgtcatcccacacatcaatgcaggacagaatctgaaatgcatttaccatcaggtcagacaaatctttatagaagtaataccccacaaactcatccacatgcgcacattccttaaacacatccggtgttacgttcacacccggcgtttcctgtaatttccagtagaacaaaaccaccatccgcaacaggtgcggaagataataggtttgcccctcgttttcctgtgaaaccacgctcaacattctttccaccaaggcacgttcatccggttccagatcctgcacggtacacattatcgttttccggaaacaattctcaatcagatacctctgtgccaatttttcgttaaaaccatgtaggcatatctcctcattcaaatgcccttcaaataaatctgcaaataattctcttgagggcatgcggctgacaaccacccatagtgcatccactctttccatcaaccgattgtttccggtcagccatgtgtagtctcttccgatttcattgtcacgattcaattgaaaattatccagcacaatgatgtactttatgttcttaggcaatgcagccttgagtttttccaaaaagaaatcctgctttcctgcccggttgttcaatatgtcaagattctgtttcagaacactgtatatttttttgcgctctgcaccctcccctatatccttcaccagattgagtgcctgaattactgttttgagccccgtgagttttcctgccagccccgacaatattttttcaattgccgcttcaatttcctcattttccgattgtccaagagttacatttttgattttatctgtaataaatgttgcaatatcaagtgcagtgtcagcttttgcaccctttttaccaagtgccggtcgatagattccctgaatccattcatacaaagtaaccacgagatcagcttttccctgttctgtttcgttgcccctttttcctgcataatagctctgcaactgcaatgcaatgcgatagtagacctccgtctgatccacacaatccgatatatccaggtagacgcagagaggatcgtcctccctaatctgtttttgattatgctttatcttatccagtgcattcttcaccaagaaagattttccgcttccggcatctccgtaaactgtaaacagtgctctttgttcctcggtgctgtaaaattcttctgcaaaatctacaatatgtccttcttcatctctttcaagaatattgattttgcttgtttcctttgcggtctcataagtttcctgtaacatcccgtccccctctatagcaattttttcatcgactgtaatactgatcttatctcctgcaaataattggctgccgtctgcaaaccactcatatttccagaccattcccttggaaatccgattgtttccacgctgtgtccgtatcgcattcccaatattcttgctgcctcaagctgttgatatggaacataaatctgactggttacaatcaatatgcgttttcctgttccgactgcctttttgtcctgccaaaacaaaaatgtgtccgctgtgtttgctctgcgcttgtccggttccgttgaaggtgccgccaacaccgtgattgtcggttgtcctccatactctgctaacgcccatgcactgtttatattttctgtgttttctatcacctgttgcgtttgttctatgtcaaaaacttgttccattgctctgcacatcaagtcatattccgtgacagcatctttcgcataagtatccgtagcttttctctcagaatccagaatcgggcgcattcctgtcaatcccacaagatattctgctgttatcttctgttgccgaagcagctctccagcataccgggttcgatataaacacgacattcttgcgcctccgagtacaagtaccgcatcataggatgctctcattggttgaacaatatctaccagtccaagactatgggctgccgacattactgccctctcctgttcttcattcagcgctgtatcgtcaatcatccatctggctctctccccggttttggaatcaaacgcagctttctgctttgccctgaaatcccagcgttcactaaattcacaaagccagcagagtttttgttctttaattgtagtcaatggaatctttccattgaacttttctaccaacacctctaattcaggtgtgtcgagccatttgaaacatttttctaaaaacaacattctgctctcgtcacaagaaaattcgaaaatagttaagccccctttatcaaatatcatttttctatttcagcatcacattctttttcaagaacgcaatcaagtcacactgctgttccctctggcgctgaaccagtcttggtgccaacacccatgcattcgccgcattgatctgtaccttatctacaaatttattaatttcctccggagacggaatttttcctttgtaggttgtgagtttctcttcccacacatcgttgtaccagtcctgacattcataaacctgctttcgaacttccatccagaaagtatgcaaatctcccggtatatccattcttttcagtggaactgcataatcttctatcagtttccagagaattgttgccattgcatcacgaagcaacgttcttgcctcttctttttcatataagtctaatcgtatcggtctgccaacacttatataaatatcctttgagtcatagtcattaaagctgataatgggtacgacctccgtcccgcattcttttgccagtagccaaggtccggcaaatagtcggtttatcagcttctcctccgtattgttatatcccccctccggaaacagcatgatactgtttccagcattcaggactcttttcattttttgcactgcctgtcatctgctttccgaatcgcaccggtttacataaatcattccatttgcccataatgcaaggaatttaggattatgctctgtctgatcatctgttgaaccattcaatacataggcattacggtctattgcatacaatgtggagatcacatcttcatcaaaagaatgattacaggcaaaaatataatttttccctttttgtaattgcggataatctacaatatgtatctttcttgttgttccgagtttgagaaaaatgtgccagcttttattcattatttttcttatacgcaatccaggtttagaggtaaaatgctccacatccgcatattcatattcctttaagcctgttcttttcatatttcctcattgtctactttttgtttgtctcaccagtttctttgcatactacaaagccactgcaatatttaaggtgtttcaaaaagtagactttttgaaacaccttagatataattactttgtaaatgttttttcagaaaaatgtgtatatggttacatttatgggttgtttcatgttgtctacaatttggaacaattttccttgtttttctctccttcttttagttccatacaccttcgataaaaagtagaataattcatctgtaagtctgccgctgctttgcgtaaagatatcttgtcctcacaccacagttgataatacttttcaaaattctccggcacattctttttcttacaaccgaactggattcctctcctttgagccgctgcgataccctctgcctgtctctgtctgataaatgccctttccgtttctgccacatatgccaagatctggagcaccagatctgcaatgaatacccctgtcagatctccatgcgctgtgtttgtattcaacagcggcatatctatcacctgaatatccgctccgatttctttcgtgattttccgccattgttccaggatttcttcgtagtttctccccaaccggtcaatgcttttgataatgacgatgtcacctttctttaaccgtttcaatagttgtaaatactgtggccgcacaaaacttttcccggaaattttatccagataaatattctttttcttaatctgttgttcctgcattgcaagaaattgtctttccggattctgatcttttgcagatactctgatatacccatatcgttccattttgtctgcctccttataattgtgtttctcattatagattgcagacacataaacacccatcaaattatatgtacttaaaataagtccacttttgacattatatcacattcagaacttaaaatgtacttatattaagttctgataggagtcttattttctatggaaaaagaaaaacatctaggattaagaattgattttgaaacgcatgaaaaattaaagagccttgcagaatatgaaggtcgatccattaacggagaagtcctgtatttaatccgacaggctattgcacaacacgagcagcaaaaaggggctttaaaataatacatcgcttgctctattttatcacccaaagcaatctctttatcaaccgttctatattgttactaccgcatgtaccgtgcttttgctgatgccgaaggccttggcagtctgccgcaccgtggcgttgtggtcgatgatatagcccgctatccctatagctcgttcttcaatatagtctttcaaaggaaaacccctcaggatacttttttacagtgtatgaaagtatctgaggggttatgcatcctgacaattaagccgctatttgacaattattttgtttcaaaatataatagttgtactttgcaagtatccattttgaacatacgggaggttttttttgtgaaagagtcaaagctccggctgcgttccgccggtttactttctgttgcggcaggatttatgttgtttctttatgctccattggaaatttattttaataacaaatatgaattctggtttgatttttatgatctgatcccgctctgtctgttgatgtttgcggtatttacgggtgtcagcttcctgctggctttcatcgtttcgaagataaataccaggctatatcatggatttctcacagtttatctgattgcgttcctctgcacttatattcagggcaatttcatgataggcaatctgcctcacctggatggaagtacggtggattgggcacagtattccggattgcgtatcggctccgttgctctctgggtggcagtcacggttctggtgatactggcggtgaaaaagctgtcccttacaaaggtggcagatgcagcaggtactgtcagcgggctgatcagtctggttctgttggtgactcttgtaacgctagggttcacaaaacagggcctggaacacaaattttctatgatcaacaccacctatggggaactggaaatgtctaccgatcaaaaccttgtacttctggttctggacacagtagacggagacatcatgtcacaggtgatcgaacaccatcccgaatataaggaaactctttctgattttacttattataataatacgatgtcggcctatccattcaccgtatattcaattccttacctcttctccggcgaatggtatgaggatcaggaagaatttatcgaatatgcaaagagagtctatcgggaagctcctttctttgatgatctggaagccagaggataccgcatgggaatgtatgaggaggacgcttaccgtctggaagaaagcatgttccgatttgaaaatatgatcgacacgacccccacgatctcttccattgcacaatttatgaaactggaaatcaagctggtcggattcaaatacatgccttttgatctcaaacgcttctgcctcaccatcccggcggaattcaattcactggagaagaccgatgatatcagtgattacgaactcttttcttccgacaatcaggtcttctatacctacctgaaaaagacaccggtaacactgaccgatgacaaatgcttcagattcatccatctggtaggcgcccacagtccctggcatcaggatgcacagatgaacgagattgaaaacggcacctacgaacaaagcattgaagccagcatgacaatcgtggctacgtatctgcaaaaactgaaagccagcggtgtctatgataatacggccattatgatcctgtcggaccacggatacaacattgaggatgatgacagttccgagaaacggcaacatcctattctgttcgtaaagggtgtcggtgagcattatgatgaactacagatttcctctgctcccatttcccaatctgattatctggaagcctacacacgacttctggatggcaaacagggggatgccatctttgattacaaggaaggagatgccagagaacgacgtttcctgttctatgattacgatgagcccactcatttttatgagtatatgcagaccggatatgccggagatgtagacacgatgtacttcaccggtgtggaaatcacaccataatggtctcactcggaaataatcacttgcattatcttctctaaaaggtataatgtttataacagccttgtttttaacaaatattacacgtacatacgagatggagggttcttatgaaattatcaaaaatcgaacaggtaaacgagtttcttgctattgttgacagttgtaaaggggaggttactttaagatccgtagacggtgatatttttaatctgaagagcaaactttcccaatatattgccattgctgctttgcttggtcagcatggtgatgaacttgagttattctgctcagacagctctgatgagggaaaattcatgaatttcctgatggaaaatcccggtgtacaatagattcacttataaataatatactataataacaaagcactcccattaaccgggagtgcttttgttgttactttaagatgtagtttcacagcagctgcagcaatctccggttcttatggtagcagaagatccggtcagacagcatctctccttctccgtagacggcattgatatgctgtacggaggaacggatctcctgtacaccggtgcagtctacgggatgcaggattgcttcatgtacgcttggaaagactacatagtagtccccgcccagtttctccgccaggattgcttttaccccgggatagaaaaaggccacagccccatggattctggcagtagtggtgaggagatatcctctctgtccttccctgtggttccaggggctgatccaggtctgacgcccttcctcttccggcagcagaatgccttcctcatagggaaaaaactttctcctgtcatctcccagaaacaatctgggcggcatcttgcggcaggtgttcatcatggcttccgtgatcaactggtcttccgtaagcttccatggcagtaccatacctcgggacacctgtatggtcagactgcttccggtcttctcactggtcaacagatgcagcaccagcgccacatctccaatcttacgatagatggcattgccaagctcctgcctgcaccgttcataattcaccggacgcacgatcatatgccttctgcagatagcatagctcagattctccccggagagtacgatgtcctcttcttcatcgtcctccgtcaggcccgccgagatctccggtaaaatactctgccatccttcctgtccgtatcgctcatacaaaggccgtatcagccagtgctgtatatattctctttttccacgcatccataatgcgcagagcatatcttcacgtatcatgatctgttctcttccatacatacaccggttcataatattcatgatatgaaccgccatcggatcaccgcataccatgtgtcgttccagcaggcgtatggtcttgccccgtgccgtttccatgttctgcacattccaacgcaattccttcttaaattcttcgtatgtcattgatcccccattattttctccctgcaaaagcagagaactgatccgtaaatttgcgtacaaaaataaaaggtactattaaaaaaatcgttggaaatcccggccgaacggcctatttagaattcttatttcagagatttacagtttccgaaaccatccggatttcggataactccaccctatcatagatagattgctttgtctatatgcgatttcaccaaggatatcttttgtcaaatttcacgaaaaaataatttcaaaaagaaaaaaagtccccgttttccgcaaaaacagggactttacaaatgtcaaatatgaaattacacaacgcgtcgcactgccaggatcggacggtaattggcattgctgatcttgataccggtacgctgtgtgctggcatgcacgatcagcccgccgccaatatacatagccacatgaccgtcataacagatcagatctcccggctgtgcattgctgtagtccacaccggtaccgcagcttcgctgctcataagaagtacggggaatgctgtaaccgaaatcactgtagacgcggaaggtaaatccggaacaatccgcaccattcgtcaggctggtaccgcccgccacatacggattacctatgtactgacaggcatattttgcaagacgctttcccatatcactgccggaggcactttcgatgactgaggtataattggtcgttgcataagtgccggtggctgcggcagtatttccctgctgtgccttcgcctgcagctgttttaactgtttttgttcctgctgcaacagtgccttcgctacggaagcctcctgctttgccttcttaatctccgcatcatagttggcggattcctgctttttcttggccagcatcacatccagttccgatttctggttctccagatccgccttatcggcttccagctgatccttatcgacctgcagctgggtcttctcttcttccagctggttccacagcgccagtacctgttccttggtctcttcgtattcctgcagtttctggcggtcatactcgtagacgctctccacgaagtccatccggttcagcataccactcaggccaccaccctgtaacagaaggttcacataattctccgaagaatcattttcatacatcatgcgcatccgactgaccatatcgtcatgctgctgttcttcctgcgccttggcaatattgtactcttcctgggtctgatcaatctggatctgcttgtcggcaagttccgtttccttcgctgcgatctcatcttccttcatgccgatactggtcatggtgttgatgatctccgcattcaggtcatcgatcttctcctgcaccagatcctgttcatcctgcagggaattgatctggctgttgatattgttcagctggttctgatgttctttaatgttgttctgcagatcactcatggaaggtgctgcttgcaccgtctccgcaggagattcccagacagagccggtggctgtcagcgtcaccgctgccagaagaaaataacataaaaactttctttttgctctatttacttttctgccggcagtttttttcttcat

SEQ ID NO: 478 - DNA, 18203 bp, unidentified
  source 1..18203: mol_type = unassigned DNA
gaaatctgaaaaatgcaggccagaagagaaacggattgaatccttgcaaatgacgctgaaacgtgatataatcgtggtacgaacaaaccggttgtggtacgacaacggtatgttctggtactgtaactgatgttacgaaactgtgaagaaatacttggaaaagcacaaaaattcagcgtagctgcgacgacacctgtcaggttcgggtcgtgtcttggtacgacaacgagaactcccacacctctcagatggttcgtaccattaagtacttcgctgagaactgctgatcggagtttctcctgagctgaataaagcttgactgcgccctttctcttgtgtgatgcgagagaaagggcgctttttgctgaccgttttgggtgcgataaggtgctttcgtaaaatggtacgacccattcgtaatgatccgacaaaagcagcacgcattccatctccatctattgcaacccttctcccgatatgataaaatggtaaaaataaatggagacaacgaaacagtatgattacgaaacgtgaaaaactgcagtatggatacctgtttctgattgatctgctctctctggttctcagcattgggctggcgtgggggctgaccgcaggtgttctgcacaagatgggggacttccagctggacgatctggtagaagcctgttttttattgctgctggcctatatcctgaccttttttacatttgatcagagtgaaaatatcgtgaaccgcactccgattcgtgaagttgaaattgcggtgcggttcaattttttgttgaccctcattgatgcggcctgcctggcgctgaccaaggcttccatgctgcactcccgctattttctggtgtttgtgcccgtcatcgatgtctttgtgatgacgggcgctcatgctgtcctcaaaaagatgctggtacgctcccgctataccaaggggattcagagccttgtgggagtggtgaccacgcaggagaacgcaagccctgttctggaagagctgaaaaaggactggtccaagcgcgtgacaggtcttgccattctggaagctgccccggagcagcttcacactgagatcgatggggtgaagatcgaggcgaacttcgataatttcatggactggttgcggcaggcagcgctggatgaagtgtacctggatgtggcgcaggagagtgaagaaaacatgctgccctacctcgaggagatggagagcatgggtctgacggtccatttccgcctgccggtgctggatcggatcgaaaaagcctgctgtgatgagaccagtgcagtgcgcatcagccgggaactgagccgctgtgcgggcggcaatgttgtgacgatgggcacggtggaactcaagctgcgggatcaggtgctgaaacggaccatggatatcgtaggcggcatcgtggggtgcatcatcagtatccccatcattgcgttggtggccatcccgctcaagctggagagccccggcccgctgatcttcaagcagcgccgggtgggccggaatggacgtgtgttctacatccacaagctgcgcagcatgtatgtggatgcggaagcacgcaaaaaggaactgatggcccagaacgaaatgaacggcctgatgttcaagatggaagatgacccccggatcacccgggtgggccgcttcatccgtcgcaccagcatcgatgagctgccgcagttttttgacgttgtgcggggctccatgagcctggtgggtacccgcccgcccacgctggatgagtaccggcagtacgaaagccatcacaagcgccgcctttccatgaagccgggaattaccggcctgtggcaggtaagcggccgcagcgatattgatgattttgaagaagtggtcaagctggatgtccagtacatcgacaactggtccatctggatggatatctacctgctgttcaggacggtgggcgttgtgtttgaccggaaaggggcaaaatgaattatattctttttggtggatctggttttatcggcacccatctcattcatttgctgctgaaggagtgcgtcagacccggcgacgtgatctacgacctggatcttgtgatgcccggggaagagggcgtggtgccgggcattgtggaaaagaacgatggggtgcagtatatccggctggatgtgcgcaagcccatcgattttgagttcgttccgaccccggaggacgtgatctttgatctggcagcggtccaccgcacccccggccacccggaagaagcctattttgaaacaaatatccggggcgcggaaaatgtgaccgcatttgcggaaaaatacggcatccggaagatcctgttcaccagctccattgcaccctatggtgcgtctgaggaccttaagacggaggagactctgccaactcccaacacgccgtatgggatcagcaagctggtggcagaaaagattcaccagatctggcaggcccgtgatctggcccgggagttgaccatcgtgcggccaggcatcgtttatggcaaaggggagcacggcaacatgacccgcctgtacagggggcagaagaagggctacttcttttatgccggccggaaggacaccatcaaggcgtgcatctatgtcaaggagctggtgcgcttcttcaagtaccggatgctggatcattctttccccggagcagagatctataactgtacctacgagccggcctataccattgaagagatctgcgatacaatgcagaaggcgaccggcctgcaccgccatgtgccgttggtgcccgccggactgctgctgtttgcggcgggcattctgggacccatcgggggcaaaaaggtgggcatccatcccgcccgtgtccggaaactgatggtatccaccaatgtctgcggcagaaagctggccgccactgattacaagttccactatacgctggaggagagcttccgggactggttcgaggattgtgaccgcaaggagctggtatgaccatggagcagaatgcacagcccatccgtgtggcccagatgatgacggatatgaactacggcggtgtggagatggtggtgctgaactactaccgccacatggaccgttccagagttcagtttgattttttcgcgctggaaggctcgaccctgccccagcgggaagaaatcgaacggctgggcggccgggtgtatgtggtgccaaaatatacccacctgccgcagtatgaacgggagatcgggcggctgttccgtcagaacggataccagatcgttcactcccacatgaacaccctgagcgtgctttccctctggggggcaaagcgtgcaggggtgcccaaccggatcgcgcataaccattctacggtgggcaggggagaaggggcaaaaaatgtgatgaagtacctgctccgtccctttgccgcagtgtatcccacccggctctgtgcctgctccagaacggcaggcagctggctttatggtgaaaagcctttccgggtgttcaacaatgccattgagctcgaccgctttacttatgatgccgccaaacggaaagccgtccggcaggagcttggcctgggggatgaactggtgctgggccatgtcgggcggttctgttatgcaaaaaatcacgaatttctgctggatgtaatggcagaggtctgcaaacaacggccggatgccgttctattgctgatcggagaaggggaaaacgaagccgctgcccgccggaaagcggaggcattggggctgcaggagaatgttcgctttctgggccgacagagcgatcccgcaaaattctatcaggctatggatgcctttgttttgccctcgcggtatgaggggcttgggatcgtgctgatcgaagcacaagcggcggcattgccggtcatctgttccacagaggtgccgcaggaggctcaggtcctgcccgagatgcagtacctgagcttgcaggaaagcccggcagtctgggcggatgcggcgatccgggctgcagaaaatgcccggcggcgggatacctctgccgagatgcgggcaggcggcttcgatatcgtcaccgaggcgaagaagctggaaaagttttacttcgacctgctgaaatgaggagataagatggaccctttggtaagcatcatcgttcctgtttataatgtaaagccatatctgagccgctgtgtggacagtctattggggcagagctatcagaacatggagctgctgctggtggacgacggctccaccgatggcagcgagaccctctgtgatgaatatgctgcacaggatgcccgggtgcgggtgctccacaagaaaaatggtggtctgtccgatgcccgcaacgctggtgtggacgcagcaaagggggaatatctctcttttgtggatggcgatgactgggtgtcaccttattacatcgagaacctgtaccgggcactggagcaggcgggagcggatttttcagccagctgttttgaagaggtgttcgagggccagccggtgcagtccgtgcccacagagcgtctggaagcattcgagatcctgagccgggaggaatgcctgcgccgcatcctgtatcaggagggcatggaggtgaccacccccaccaagctctataagcgtgcactgtttgagggcgtgcgctacccggtgggcaagctctatgaggatatcccggtcgcctacgaggtgacaaagcgtgcccataaggtggcacatatcgcaaaccgggattactattatttccagcggggcagcagcatccagaatatggccttcaaccccagaaagctggacagtgtgcggcactgccacgcgctgatggaaaatgtgaagcgtgatttcccccagctgagccgtgcggcagaatgccgctatctgagcaatgtctgcaatattctgttccagatccgggacaggcagcatgaaaaaatagagaaggctctctggcaggaagtgaaaaaataccgccggaacgttctgctggatccgcaggcccgcaaaaaggcccggctggcggcggcgctttcctacagcggctatgccatgacccgacgggtctatgaaaaaacgcagtggcgtggaaaaaagtaaagtggagggatccggttggaggaaagagaaccgcttgtatcggtcattgtgccggtctataatgtttatccgtatctgcgggactgtgtgcagagcgtgcaggcgcagagttaccagaactgggagctgcttttggtagacgatggctccaccgatggcagcggggaactttgtgatgaactggctgtggaggatggccgcatccgggtgttccataagcccaatggggggcagtctgatgcccggaacgttgggttgcaacagacgcagggaaaatatttttacctgctggacagcgatgacctgatccgctccacagcgtttgaccaatttgtggagcgctgtgaggcagatggtgctgatgcagccctgaccccgctggagatgttctcgacagagcagccggagggacggacggaaaatccgcaccagatcccagagctgctgaaccgggaagagaccatgcgccggatgctgctgcatcagggcatcgggcatggagcaggcggcgttttcttccggagggaggtttggggcgatctgcagttccctgtgggcatcctgtacgaggactatgcggtgatgtatcgggccattgcccgctgtgcaaaagtggaagtgtttccggaaccgatgtacgattaccgcatccataccggttcgaccatgaagagcggcattgccgagaagaatctggtcattctggatgtgggcgaagacgtgacccgctttattgcggaaacggtccctgtgctgaaagcagaagcggaatacctgcagctggttacatacctgaagacactgaaaggcattctggatggcgattttgccagctatccggaggctcaggcacggatctgccgctttgtgcaggaacaccgggcgcttgcccggcggccctgggccaaaagagcagaccggatcaaggtggaaacacttctgatcagcaagcggctgttttatgccgtctatgggctgggagaatggaaaaataaacacacagtcgaaaaataaaatggagaagttatgctgatttatctgggggcttttgcggtttctgtgggcattgccgcctatggcgagcacctgcggacgaagaaaaacaacgagaagggcttttatctctgcctggcgctggcggtgctggtgatggcggtattggcaggcttgcgggacccgtccattggcacggacagcgtggtgtatgaggaatgggtggcggatgcaaagctgcaggatggcctgctggcctgcatccggcagcggcacaaaacagagccgctgtttatgacgctggtctatctggcggcccatgtttttggtgatgtccattggctctactttatggtggacctgctggcctgcggcctgtttatgatcgggctggtgcagtataaggagtatgtctccgtgccctatggctggctggcttacctctgcctgtattatggcgatacctacaatgccgagcggcagtctgtggcgctgggtgtggcatttttggcgttcagctttgcgtggaagaaaaagtatcactgggcggttctactgctggcggtctcctgcctgttccacaatgccacctttatctcgtttggtgcgctgttgatctatatcctgcttcagcatttcgacaactggtgggtcaagggtggcctggcggcattttcggtctaccttgccttcttcagcaaggctgtggtcaggctggccctgaatgtggacttcattgatcggctttacggatattattatgatgccaatgcgggcggcttcacgctgaatcccatcattgtgcgtctgccgttcctgatcctgcccattgtgctgtaccgctggtatgccagagaggaaggggcgggccatcgccgctttactcgctcggatgccgatttctggatcgtgatgatcctgatcgagatggcaacggcccagctgcgcaacatcaatgtgccgctctaccgcatctgcctgtattttgcgttcttccgttatctcgccattggacgtgtggtcaagtgcgtggaggatgagcgtctgcgcaagctgctgaaggctgccatgtggggaatgctggtcatcatctggatctatcaggcgtatattcagggcaacaatgccatttgcccgtacacctcggagatcctccacattggcagagaaacattcttctgagggaacagaacatggagacagagctgatcagtgttattgtcccggtctacaatgtagaaccctatctccgccgctgcgtggacagcatcctgcaccagacctatcggaattttgaggtcctgctggtggacgatggctccaccgatgccagcggagccatctgcgacgaatatgccgcacaggaagaacgtgtaacagcagtccaccagaaaaacgggggactctctgcagcgcgcaacgcgggactcgaacgggcacagggaacgtatctctgctttgtggacagtgatgattttctggacagccggatgctggaaacgctttgccgtgacctgcaggaacaggatgcggatgttgctgtggtgggcttccggatgtttgaacgggaggaagagcttgccccggcagagctcgccgtaccggtgcagtgtatgacaggccgggaggccatccgcagcacccttgtctcggatgagctgggggattttgcctggaacaagctctacaagcgggaactgttccgggatatccgctatccgctggggcggatgatggaagatcagggcacgacataccgcatttttcagcagtgcagcaaggtcgtataccgcccggtgccgctgtattattactatcagcgcccggacagcatccttcaccgcaggaacatgaagttctacgaggataagctggatatgggctatcagaaatatcaggccatccgggaagcatacccgggaatgtcagaaaatgatgccgccatgctgagcgtggtggagcactgctatccgtatctgatgcaggatacggagcgccgcgcaaagatggaggcctttctgcaggagtgtgacccggcggcggcaaagctgctctgcaccagcagccagcggaagtatcagctgctcagatgcagccggaggctgtatgcaaaactgttcctgctgaaaaacggcccggcggcaaaataagggaggaaaatttgtgctgaacgataccgtcagtatcattgtgccgatctataataaagaaaagtatctggaaaaatgtctggacagcatccttggtcagacctatcgggatctggagatcattctggtagatgatgggtcaacagacaactcccttgccatctgtcagcactatgcagaaaaagatccgcggatcaagatataccataagccaaacggcggtgtttcttctgcgcgaaacctgggattggaaaaaagtacaggcacgctgatttcttttgctgatccggatgattcactccacgccgagtgcatagaacggctcaaaagagtgctggatgagaccggtgcggagattgcttattgctatggtctggatcttctgggcacgaccggacgaacgcagacgaaaagcgatgagacggagaaagtcagtgttatgccggtcagacgatatgactggaacagccggaaggcacatacagtgtgctggggtgcgctttaccgccgtgcggtcacacaagatgttgtgttcgacactgacttaaaaattggtgaggatacgctgtttcttgcaaaatgtatccgacaggcagaaaaaatttcctgcatcgacaaggcactttactattactatgtcaatgatgactcggtgacgagcgggcattattcggcaggaaaactgacagagctgaaggcatggcggcgtatctgtgaagtgtttgcagatgaaccgttcgtgtatcggtctgcacgggccggatatgcgctccggtgcagagaaattgtggtgaaatactgcaaggatgatacttttatggagcaggcgtgtgccgaagcggaacgggagtttaagagaaatgccggcccccttctggcaggctggcttcgtgcagggcagtatcggtattttataaaaacgttgtattcgtatctgctctggaacagctggctgaaaaagaaacaggccagaaaaacttacgaagtggagatctgaatgaaaaaatccctcagtctgaatgcagcaatgagcgcattcaagacactgatgaatattatcttcccgctcatcacattcccctacgcttccaatgttcttcaggtggaaaacctgggcaaagtgaactttgctagctccgtctgcgggtattttctgctgtttgcaggccttggcatctcctcctatgcggtgcgtgagggctcccgctatgtgaatgaccgggaaaaactgtcggcttttgcatcggagatgttctccatcaatatgatctccacggccctgacctatgcggcattggcggtgacgatgcttttctggacaaagctccatgcctatactgacctgatgctggtgctgagtttacagattttttttacgaccatcggcaccgaatgggtgttcacgatctttgaggagtatacctatatcaccatccggggtctgctgtttcaggtgctgtctattttcatgctgtttgccttcgtcaagacccgggatgactactgtatctatgcgggcatcacggtgtttgcggcggtaggtgccaatgtgctcaattttttccgggcccggcggtactgcactatccggctgacaagaaagatcgactggaaaaagcacctcaagcccatcctcatcatctttgcatccacgctggcaacgaccctttacgtcagctcggataccacgattctgggcattttgggaacagattataatgtgggcatttactcggtggcgggtaagatctatggcattgtaaagaacctgctttcggcggtgctggtggtgtctatcccgcggctgtcccattatgcgggcgtgggggacaaggcaaacttcaacaagctgttcaacaatatcttcaacgcgctcatcgtggtggtggctccggctgtggtgggactgtttgccctcagccgggaggtcgtcctctttatttccggggaaagctatctggacgcggtgatgcccctgcagatcctgagtcttgccctgatcgtctgcctgtttggctggctgtacaattcctgcgcgcttctgccctgcggaagagaaaaggaactgttctggatcacgctggtcagcggtctgctgaacgtggggctgaacatcctgctcatcccgcggttccaggagaatgcggcagcctttaccaccctgctggcagagctgtgctccatgatgctctgcatccgctgctccaggggcctggtcacggtctcagctgaccggcgcaccgttggctcggtgctctgcggctgtgtgggcatcgttcttgtctgtaccggggtcaaggcactggctctgcccaatctcatctgcattctggcggcagtgctgggctcagtggctgcatacgcagccatcctgctgggcatgaaaaatccgctggtgctggaatatctggaaaaagcgaagcagaagttccggaaaacatcctgaatggacaggacccgctgcgggggcgaacactctctgcggcgggtctttttcagaaaaacggcgttttttggtgcgttccggcaaaatcaccacatttctttgcttctgcaacaaatgtttgttaataaattatccatctcccgtccttgcaatacacacgctttttgtttataataaggatgtacggggaagttcgcagtgcgcggcccccgatgaagagcaaaattcgattccgaacgaaaagaatttgagaggagtttgttaccatgggtttaggtaagaaaacgatcgacgatcagaattactgcggcaagaaggtccttgtccgctgcgatttcaatgtcccgatgaaggacggcgtgatcaccaacgagaaccgcatcaatgcggctctgcccaccatccagaagctggtcaacgatggtgctaaggtcatcctgtgcagccacctgggcaaacccaagaacggccccgaggcaaagttcagcctggcacccgttgctgtggctctgagcgcaaagctgggcaagaccgttgtgttcgctgatgacgataacgttgtgggcgagaacgcaaaggctgctgttgccgcaatgaacaacggcgatgtcgttctgctgcagaacacccgcttccgcaaggaagagaccaagaacatgcctgagttcagccaggagctggcttctctggcagatgcatacgttgacgatgcattcggcagctgccaccgtgcacactgctccaccgcaggtgtcaccgactacatcaaggataccgctgtcggttacctgatggagaaggagatcaagtacctgggcaacgctgtcaacgatcctgtccgtcccttcaccgccatcctgggcggcgctaaggtcgccgataagctgaacgtcatctccaatctgctggagaaggtcgataccctgatcatcggcggcggcatggcttacaccttcgtcaaggcacagggctacgaggtcggcaagagcctgtgcgacgataccaagctggattactgcaaggaaatgatggccaaggccaaggagaagggcgtgaagctgctgctgcccgtggatgcagcctgcatcaaggacttccccgatcccatcgacgctcccgtggatgtcactgtggtgcccgtcaccgccatccctgctgacatggagggctgcgacatcggccccgagaccatgaagctgtttgccgatgctgtcaaggcatccaagaccgtggtgtggaacggccccatgggcgtgttcgagaaccccaccctggcagccggtactctggctgttgccaaggctatggctgagagcgatgctaccaccgtgatcggcggcggcgacagcgcagcagctgtgcagcagatgggcctgggcgacaagatgacccacatctctaccggcggcggcgcttctctggagtatctggagggcaaggagctgcctggtatcgctgtgatccagaacgcataagcatctgaaccagcatcactgaggtgcggcggcatatacgccgccgcactttttattttgggtaataagatctctcaggcttgccaacgttcgccagctccccatccgggaggcaggagatgtcgtttatcctgcctctcctgccgggagaggcggcaccgaaggcggcggggagatattttgataaggagatcgtaagaatggataaggcaaagcgtaaggcaatcattgcaggcaactggaagatgaacaagaccgccactgaggcagccaagctggtggacgagctgatccccgccgtcaaggatgcttcctgtgaggtcgttatctgcaccccctacaccgatctggttaccgctgtggaaaagaccaagggcaccaacatccatgtgggtgctgagaatgttcactttgagaagtccggtgcgttcaccggcgaaatcagcgccgatatgctggtggatctgggcgtggagtacgtcatcgtcggccactccgagcgccgccagtactttgcagagaccgaccagaccgtgaacaagcgcgctctggctgccctgaatgcgggcctgaaggtcatcatctgcgtgggcgagagcctgcagcagcgcgaggagggcgtgaccgaggagctggtgcggatgcagaccaagatcgccctgcgcgacgtgaccgccgagcagatggcaaatgtggtcattgcctacgagcccatctgggccatcggcaccggcaagaccgcgaccgctgaccaggccgaggaggtctgcgctcagatccgcaaggtcattggcgaagtgtacggcgaggctgtggccgaggctgtcacggtccagtacggcggcagcatgaacgccaagaactgcgaggagctgctgagcaagaaggatgtggacggcggtctgatcggcggcgcatctctgaaggctcctgattttgctgttatcgtcaatgccgcttccaacggctgagaaggccctctgacctgttttcccagcgcccggctgcgccgtttttccagcgctgtgccgggcgctatttgttctaaatcaaaggagattcaacgttatgtccaagaaacctgtacttctgtgcatcatggatggctttggctgggtgcccaacgagacctacggcaatgccgtggtcgccgcaaagaccccccatctggatgccctgatggcaaaatatcccatgaccaccatcgatgcctccggcatggctgtcggcctgcccgatggtcagatgggcaactctgaggtgggccacaccaacatgggcgctggccgcatcgtttaccagcagctgaccctcatcaccaaatccatccgggacggtgagatgttcaagaaccccgtgctggtcaagaacatgaaggctgccattgaggcaggcaaggccatccacctgatgggcctggtgggcaccggcggtgtccacagccacgctgaccactggttcggcgtgctggaaatggcaaagcacatgggcgcaaaggaagtctacctgcactgcatcaccgatggccgtgataccgacccccacgccggcaagggcttcctggctgacctgcaggccaagctggacgagctgggcgttggcaagatcgccagcgtttccggccgttactacgccatggaccgcgacaacaactgggaccgcgaggagaaggcttacgccgcattcgtctacggtgagggcaaccacgctgccaacgctgccgaggccattgaggcatcctatgctgccgataagaccgacgagttcgttctgccctgcgtcacctgtgagggcggccgcgtgcaggatggcgataccgtcatctttatgaacttccgtcccgaccgtgcccgccagatgacccgcatcttctgcgatgacgacttcaagggctttgagcgccgcggcggccgcaagcaggtcaactatgtctgcatggccgagtacgatgccaccatgcccaactgcgaggtcgcctatcctcccgtggagctgaagaatgttctgggccagtacctgtccgagaacggcaagacccagctgcgcattgccgagaccgagaagtatgcacacgtcaccttcttcttcaacggcggtgtggaggctccctacgagggtgaggaccgctgcgtcatccccagcccgaaggttgccacctacgacctgcagccccagatgagcgcccctgaggtggctgctgagtgcgtcaagcgcatcgagagcggcaagtatgatgtggtcatcctgaactttgccaactgcgacatggtcggccacaccggcgtgttcgatgccgctgtcaaggccgttgaggctgtggataccgctgtggatcaggtggtcaccgctgtgctgaacgcaggcggctgtgcctttatcacggctgaccacggcaacgccgagaagatgatgaacccggacggcactcccttcaccgcccacaccaccaatgtagtgccctttgtggctgttggctgcggcgatgtgaagctgcgcgagggcggctgcctggcagatatcgcccccaccatgctgccctatatcggcctgcctgtccccgctgagatgaccggcaagagcatcatcgtggagtaagcactccgcaaatcgctttcctgaaacgcaaaaagacctccccgtgcaggtgctgcctgcatggggaggtcttttgctgtatcgcttagtagtgcagctggtcagcggtcagtgcttccagcaccggcagcatggcggctgcctcggccttggcggcgggcagatccatatcgcggtagttgccgcattccacctcgctggcaccggggatatccccctcaaaggcggccatgaagcggaaggaatccacggtcagctccaatgcctgcgccggggtcagcccgcgggtgagcaggtagaagccggtgcggcagcccatggggccaacgtagatcacgccgtccttcaccgcgctgttgcgggcgtaggtggcaaacaggtgctccagcgtgtgggcggcacctgtggtcaggtaatcgccctgattgggcttcttcatccggatgtcccaggtcagcacatcaccatcctggcggctcaggtacatgccccggtccagtttggtgtgatcgacacagaagcttgcaatgcgttccatgatgttctccttcagaatcaggcctgtaggcgctggacactgccgtgggcacaatccacagcgatatccaggccatcgcggatgtggctgcaggcacctgcagcacccacgatggtgggcttgagcagggagttgcccacgatggcagcgtggctgttcaggccgggctcctcgaccaccagagcggcggcatcgcggacatagcccagcatctcgttggtggtggagggaacgaccagcaccatgccggggcggaactttgccttgacctcctccagagtgcggcagacgcaggccttgccgctggcggagaccagatcggtcttgccgcggcccacgcccacaccggtggccaggcagttgcccaccatgtggatcttgatcatgttggtggtgccggaaacgcccacgggcacgcctgcggtcacaacggccagctcgccgttgtgcaggtagccgttcttctcggccagagcggtggacatctcgatcagctcatcggtgctgtgggcggggcccatcagcagggaagtgatgccccagctcagggagagctgacgctgcacctgctcgtccatgacgcaggcaatgatgggctgcttggggcggtacttgctcagcagacgggcagtgttgccggattcagacacggtgacgatggcggcagcgttcacgtccttggcggtcaggcaggcagcgtgagcagttgcatcgctgacgctgatctggatctcggcgtggcgctgggagcggtagtgctcctcgttctcggtgcgctctgcaatggcggacatggtcttgagggcctccacggggtagtcaccggcagcggtctcaccagacagcatgatggcggaggtgccatcgtagatggcatttgccacgtcggagatctcggcacgggtggggcgggggttgaccatcatgctgtccagcatctgggtggcagtgacgatgggcttgccgaaggagaaggagcggtcgatgatgtccttctggatgccgggcagctcggtgaagtcgatctcaacgcccaggtcaccacgggccaccatgacggcatcggctgcggagaggatgctgtcgatgttgttcacaccctcgcggttctcgattttggcaatgatacggatgttggaatcgtactcattgagcaggttgcggatgtcgtacacatcctgtgcggtgcgcacaaaggaagcagcgatgaagtcaaagccgttctgcacgccaaagatgatgtcctcgcggtccttctggctcaggtagggcatggacagatgcacgccgggcacattgacaccctttttggtcttgatcttgccgctgttcaacacggtgcagatgatgtcggtgtcggtgacctgctcaatgtgcagcatgatcaggccgtcgtccagcatgatggtgccgccgggctgcacgtcctggggtagatccttgtaagtgacggagcagatctccttggtgccctccacctcgcgggtggtcagagtaaaggtctggccggcttccagcatctccacaccgttcttgaactccttcaggcggatctcggggcccttggtgtccagcagggcggcaacgggcttgcccagctcctcacgcagcgccttcagctttgccagacggccgccgtgctcctcgtaggaaccgtgggagaagttgaaacgggccacgttcatgccgtttgcaatcaggtcgcgcaggacatcgcccttatcggtagaagggcccagggtgcagatgatcttcgtttttctcataaaatacctccaacgttcacgctataatgctctctatcttgacgcagcagcccaagctggctgctctctggcgggcagtgattgctttgcgcccgcggcggcagtatacgccaatatggctgtttcaaaaaaccataccactatacattataagctcttggatacaatagcgcaagaaaaatctttgcaaagaaattgctaagatttcatcaggtttgaacaaaaaactttccaccacaaagcgcttgcataaccggcgggatttgcttataatgaaggtaagcaaaagtgcgactgttccggggcagccccggaggaaaatggagtgaaaacatatggaaaagcgtgtatttttgatcgtactggacagctttggcatcggcgcggagccggatgcagccgcctttggcgacgagggcaccaacacgctgggggccattgcagggcatcccaatttcaactgccccaacctgaaaaagctgggcctgttcaacattgacggtgtgactgcgggcgaaaagaccgacgcgcccgcgggtgcctttgcccgcctgcaggagcagagcatgggcaaggataccaccatcggccactgggagatcgccggtgtggtcagcccgaacccgctgcccaccttccccaacggcttcccggaggagctcattcaggagtttgaggcaaaaaccggccacaaagtcctctgcaatctgccctattccggcaccgaggtgctgaaggactacggcgagcaggccatgaaggaaaatgccctcatcgtctacaccagcgccgacagcgtgttccaggtggccgcccacgaggagctggtgcccgtgcacgagctttaccgctactgcgagatcgcccgtgagatgctgaagggcacctacggcgtgggccgtgtcatcgcccggcccttcctgggcagcagcgccgagaccttctaccgcaccaccaaccgccacgacctgagcctgaagccgccccgtgccaccatgctcgacctgctgaaggaggccggcagggatgtcatcgccgtgggcaagatctttgatatctttgacggacagggcgtgaccgaaaagatcaagaccaccggcaacaccaatggtatcgccttcaccaaggcattgcagacccgggatttcgagggcttggcctttgtgaatctggtggattt

SEQ ID NO: 479 - DNA, 23760 bp, unidentified
  source 1..23760: mol_type = unassigned DNA
tgtgcttgttgaatcaaccaccgatgccatgaaaaagctcgcggcattttacagaaaaagccttgatatcaaggtggtgggtatcaccggaagtgtcggcaagaccagcaccaaggagatgatatcgtcagttcttgagcagaaatacagcgtccacaagaccgcaggcaatttcaacaacgagataggcctgccactcaccattttcggaatcagggaaagccatcaggtagcggtgcttgagatgggcatatctgattttggcgagatgcacagactttctactatgtcttgcccggatgtcatggtcatcaccaatatcggctactgtcatctggagtttttgggtgacagggatggtgtgcttaaagcaaagacagagtgctttgagcatatgatgccggatgcggtcgcagtgctgaatgcagatgacgacaagctggccacagtgcagacggtaaatggaaagcctgccatatactatggtaaggaatcatcatcaggcgttcataaatcagtatataccacaaatattgaaaacctgggctttgacggcatgaaggctcattttgtcactccggagggtgagtttgatgcacacatccacatcccgggtgagcacaatgtatacaatgccatggcggcagcagctgtcggattgcagcttggcctcacaatagctgagataaagtcaggaatcgagaaagcagagacaatcgcagggcgtaccaatttcatcaaaacacacggcatgacagtgatagatgactgctacaatgcaaatcctgtatccatgagatcctctatcgaggtgctttcgcatgcaaagggcaggacaatagcagtgcttggagacatgggagagcttggaagtgatgagaaaaagctgcaccatgaggtaggcgaagcagttggagagaatcatatccatacactttttgccacaggagagcttgcaaaggaatatgcagccggagccgcagagaaatcgtccgatgtggacatccactatttcgaggatagggagaccatgacacaggagcttctttcatatgtgaaggagggcgacaccatactggtgaaggcatcacacttcatggagtttccgaaggtagtcgaggctctgagtaagtaaaaatggatattctccaagcctcataatattataaaagaaagagagaaaaataatggcacagaatccaatcgtaacaatcacaatggaaaacggcgatgtaatcaaggcggagctttatccggaaatcgcaccaaacacagtaaacaactttatcagcttaatcaatcacaacttctatgacggagtatgcttccaccgcgtaatcaagggcttcatgctccagggcggagatccggacggaaacggtacaggcggtccaggctatgaaatcaagggtgagttcacacacaacggtttcaaaaatgacttaaagcacacagccggtgtactttcaatggcacgtaccatgatacctgattcagcaggcagccagttcttcatcatgcatcaggatgcaccacatctcgatggtgagtatgcggcattcggtaaggtaatcgagggcatggatgtggtaaacaagatcgcagaggtgcgcacagactacatggacaaaccacttgaggctcaggtcatgaagacagttacagttgagacattcggagtggactatccggagccggagacagtttaatgataataattattgatgaggcaagcgcaaaacttgcctctttttactatcatgatgagatattcaagctgcagtggagaagtgtggcaggcaaggcatctatgtcagaagagctgcaagaaaaactgtatggtgcactactgggaaaattgctggatgagttgcagaagaaactgctagatgagcagcagaataatttgtgtgtgtatgaaatagaaaataattcaggatatacagaatctgcagataacaccgcgaaagctaatacgggaaatctaagaataccgaaagctcccgccgactacatctggatagtatcaaacaggcagcagaagcaaatagctgactcactcggcatagcatcagtaggagaaccgcagtgcggcacgcgctatgcagtcgagagccttgcagagattgatattgagtatctggagcgggtgcgcaggcggtataatcacatcccgtgggacatcggcgagacagacagatgtctgatacgtgagctgtccctgtcagaccttcctgcgctctatgagctctatgacaagcccggcatgacagactttgtgcaaccgctttacgactacgagacagagcttgaataccagaaagcatatatagagaacatgtatggcttttacgagtatggtatgtggcttgtattttccaaggaaacagggaagctgataggcagggcagggcttgagcatgatgaactgggctatatgatagcgccggaattatggaaccaaggctatgccacggaggtatgccgcttcatcatagactacgcgcgcgaaaacacagactttgaagagctttactgccggatagacgagagaaatacggcatcggtgcgccttgccaaaaagcttggatttacaaatagcgggcatatggatgatgatataaacgcttctatatatagaaaaaacataaaaaacaatgaaaaacattgaaaaatatgcaattaggcaataaaatataaacatagtttaacgatttggaggacgaaaaaatgaagaaatatgcatatggagtagatataggtggaacaactgtaaagatgggctttttcgagacaacaggaaagcttgtcgatacatgggagattcctacacgcacagagaattccggcgagctcatcctgcctgatatcgcagcatccatcaaggagaataacgagaagcatggcatagagatgggtgacatcgagggcgtaggcatgggagtgccgggacctgtaaaggatgacggaacagtattgaagtgtgtcaacctcggctggggcgtgttcaacgtggcacagtcactctcagtgctgtgcggcggcatcaaggtaaaggccggaaacgatgctaacgtagctgcactcggtgagatgtggcagggtggcggaaagggtcatcaggatgtagtcatgatcacactcggtacaggcgtaggcggaggaatcatccgcgagggcaaaatcgtagccggagtaaacggagcaggcggagagataggacatatgcctatggtagatgatgagtcagagtgctgtggctgcggcaagaagggctgtttagagcagtatgcatcagcaaacggacttgtaagagtggcagagagatacattgcagcacacagggatgtggcaacaaagcttgatttaaatgcaggcttcacagccaaggatgtatgcgatgcggcaaaggcaggagatgcagcgggcattgcggcagtagagcagtctatgaagcttctcggcaaggcaatggcagcagtagcatgcgttatggaccctgaggtatttgttgtaggcggaggcctttcaaaggcaggcagcatcatcatcgatacagcagcaaagtactataaagagtatgctttccatgcaagccgtgagatagagatcaagcttgccacactcggcaactcagccggcatgtatggcggagtaaagatggttatcggctaacaacataagattgcaatttttaaagaaataaaatataatggctactaaagatacactacaatcgaggtgagactattggcagattactcaacagaagaattagaaaaaatagcggacaaatttcgctcagataccagcggtataaggggaacaaaggattttacgagccccgaggagctttatgacgagctgaaaaaggaaatcaaaaagtatcatccgtcggatgacacgagccttgtggacaaagcctacagggtagcttatgatgcccataaggggcaggcgcgtaagtcaggagagccttatatcatacatccgctttgtgttgccatagtactcgccgagctcgagctggataaggaaaccattgcagcaggactgctccatgatgtgctggaggataccatcatgaccatggatgagatgcgtgcggagtttggagacgatgtcgcacatctggtggatggcgtcacgaagttaaagcacctgcatctgacagacagcaccaaggatccgaaggacaagaatgcggacaggcttgagatgcaggctgagaatctgcgcaagatgtttctcgccatggcaaaggatatcagggtcatcctcataaagctggcagacagactgcacaatatgcgtacactcaagtaccagtccaaggaggcacagcagcgtatcgccagagaaacacaggatatctactgccctatcgcgcagcgacttggtatcagcaagataaagatagagctcgaggacctttgtatgaagtacctctatccggatgcatattacgatctggtagagaaggtagcactcagaaagacagagcgcgacacctacatccagggcctggtaaacgatgtcaagaagtatgtttcggatgccggcatcaaggcagagatatacggcagggcaaagcatttcttcagtatatataagaagatggtcaatcaggacaagacgatagaccagatatatgacctctttgccatcaggattctggtggatacgataccggactgctacgcagtgcttggtatcatacatgagaagtataagcctataccgggccgtttcaaggactatattgccatgccgaagcagaacatgtaccagtcgcttcacacgacacttataggaccgagcggacagccgtttgagatacagatacgtacctatgagatgcatcgtacagctgagtacggtatcgcagcgcactggaagtacaaggaagcaaacaacggcaatgccactaccaccactgtcacagaggaggagaagctcagctggctgcgccagatactcgagtggcagcaggatatgtcggataataaggagtttatgactttattaaagagtgatttaaatttattctccgacaatgtatttgcattcacaccgtccggcgatgtaaagaacctgccaaagggttccacacctatagactttgcctacagcatacactctgcggtcggcaacaagatggtcggtgccaaggtaaacggcaagctggtgccgatagactatgtcatcaaaaacggtgaccagatagagataatcacctcacagaactccaagggaccaagccgtgactggctcaaggtcgtaaagagcacacaggccaagaacaagatcaaccagtggttcagaagtgagctcaaggaggagaatatacagcacggcaaggatctgatagcagcctatgccaaggcaaagggcatcaactttgcagagataaacaagcctgagtatcaggagaaaatacgccgcaaatatggcttccacgactggaactcatgccttgcaaccgtcggccacggcggactcaaggagagccagatagtcaacaggatgtacgacgaatacaagaaggatcatgtggtgcctgtgacagatgcagatgtgcttggcagcatcgcagaaaagcagcagacggcagcaggcacacagcctgagcacaagtcaaagagcggtattgtggtacacggactctatgacgtggctgtgcacttctcgaagtgttgcaatcctgttccgggagatgaaatcgtgggctttgtcacaagaggccgaggcatctcaatccataggacagactgcgtgaatatcatcaatctgtccaagatagaaaaggacaggctcatagaagcagagtggcaggatacagccctcatggacaacggtgctgagtatcaggcagacctaaagatattctgtcatgataggccgggactgctcgtagatatcacaaagatatttaccgagaaggaaatcaatatcagtggtatccagtccaagaccagcaagcagggcatcgctacaatcgaggtatttttcaatatcagaggcagggaccagataaaggttctcgtggagaagctcagacagatagaaagtgtaatagacgtagagaggaccaccggctaaatcccggtggttcttgcgtgaagcataacatataacagacaaggagtacactcatatggtaaatatgaagatagaccacttcgtagtgggaccggtgcagaccaactgctactttgtcaccaatataaagacaaaggaaatgataataatagacccgggcgcgtgtgcggatcagctcgccaaaaaggtggacgagtcaggcgcaaagccagtagcaatactgctcacacacggacactttgatcatgccacggatgcaaagccgctcgcagaccgctacggcatcaaaatatatatccatgaggcagacaaagccacactcgatgacccgcagcttaatgtcagctacatgatggggcagtcaaagaccttttatgcggatgtatttttgaaggataagcaggaaattgatattgcgggctttcacatagtagtgcttcacacaccggggcatacaccgggtggctgctgctattatttcccgtatgaggacgtgatctttacaggagactcactgttttgcggctcgatcggacgtacggatttcaagggcggcagcatgtcagacctcgtgcgcacagtgaaggaaaaaatcatgacactgcctgagcatacagaggtgtacccgggccacaacgacacaacaaccatagaaaacgagaggatgtataacccttacttatgatagtagtagtatttaataaaccggattttgaatatgatgtgcactcactgctcaaagagtttttcccacaggaggacgtgcagatgtactatagctgcccacctgatgaggtggaggggaaaaacctggcctgcacacatcacgagatgacagatgatggcgtaaaggaatttgcggatgcctcacaggtatttaagatagactatgtgggcgatgaaattgcagtggagtggacggtgaatagagccggaaaaagaatctgcacaaaaatatccgtagacagtgcagaccgcaaggaaactaaaaaccgccttaagctcgccctgtattccatgatagaaaagggcacaggaaagagtcttccgtggggcacactctcaggcatcagaccgaccaagatagccatgaaatgcatagaggacggcatgagcgataaggaaacctacgactatctgaaggaaacctacctcgcaagcgatgagaaaatcgacctctcaataggcatagcaaagcgtgagaaggcactgctcgacagggtggactatgacaacggctacagcctgtacataggcataccattctgcccgagcacctgtgcatactgctcgtttacgtcatacccgctgggtgtgtggaaaaaccgcgtagacgattacctcgatgcactcgagaaggagatagactacacggcacagaaattctaccacaagaagctaaactccatctacataggaggcggcacaccgaccacactaagccctgcgcagcttgacaggcttatcagaaaaatcaaatgcagctttgatttaaaggactgcctggaatttaccgtggaggcaggcagaccggactccatcacgagagaaaagcttatggcactgaagaaaaacggcatcagccgtatatcagtaaatccgcagaccatgaagcagcagactctcgatataataggaagacaccacacggtagacgatacgataaatagcttcaagctcgcgcgtgagctgggctttgacaacataaacatggacctcatcatgggacttcccgaggagacactcgatgatgtaaggcacacaatggagctggtgaaggagatggcacctgacaacgtcaccatccattcactcgcagtaaagcgagctgcaagactcaccatcttcaaggaccgctacagtgatatgcagatggtcaacacccaggagcatatggatctctgcgcagcctactgtaagcagatggggcttgagccatactacctctacagacagaagggcatggcaggtaacatggaaaacgtaggctatgcggcaaagggcaaggccggcgtatataacatattgataatggaggaaaagcagaccatcgtggcgtgcggagcaggagcaagcaccaagcgtgtctggcccgtaccgaatccggatggcacacaccgcattgacagatgcgagaatgtcaaggatgtagggcagtatatcgcaaggattgatgagatgatagagaggaagcagaggctgtttgaggaaaaataagcagtatgatatataataatgtataatattggtgctgtaataccatagtgattagcgaatgtgtcaaaaattataaagaaaacctaatattcattgacatagaattaaaaatgagtgaaaataaattactgaaaaaccctgattagatacagaaaaagatacaaataaccgaataaaacaaaacaggctaaaataattcgagggaggacaaaggtacctcccccgtagtaggtatagagggaaataaaagataccacaaggagaatttggaaagaatgtacagaaagaaaggcagaggatgggcaaagcatatagattttatgctttatgtagcaagattagcgctcaagagcttcatttcttcaatatactagtgggagatatgagccttgtgggcacaagaccaccaacactcgatgagtgggagaagtatgaaccacatcacagagccagaatgtcattcagaccgggactgaccgggttgtggcaggtgagtggcagaagcaatatcacggactttgaggaagtggtgaagctggatacccagtatattagggagtggagtgttaagaatgatttgaggattatttttaagactgttgtaagtattatgcaaagtgatggggcaatatagaaaaccatcacattgggaaatcctatccatacggatgtgtacataaaaaatcttgggatgaaggagatcagaggacatgaaagtatgtttagttggttcgtcaggaggacacctgacacatttatatatgttaaagccattttggaaggacaaagatcatttctgggtcacttttgataaggaggatgcaagaagccggctcgaaggtgaaaaaatgtatccttgttattatccgacaaaccggagtctaaaggctcttattaagaataccaagattgcatggaatgtgttacataaggaaaagccagacttgattatttcctgcggtgcagcagttgcggtcccgtttttttatattggtaaaatgatgggcgcaaagttggtttacatcgaggtttttgatcgaattgataaaccgacaatgacaggaaagatggtttaccccattgtggacaagtttgttgtgcagtgggaagagcagaaaaaggtttatccaaaggcggttaaccttggaagtatattctaagtagatgacgagaaaatgatttttgtgacggtaggaacacatgagcagccatttaatcggctgattcagaaaatagatgaattaaagaaagacggcattataaacgaagatgtaattatccagactggatttagtacatacgagccgaaatactgtcagtggagtaagttgattccatatcagcagatggtgaaaaatgtggccgacgcccgtattgtaatcactcacggtggtccggcaagttttatcatgccactacaaataggtaagactcctattgttgtgccgcgtcagcaccagttcaacgagcatgtaaataatcatcaggttgagtttgcaaggaatgtggctcagagaatgggaacgattattccagtggaggacattaatacactgggagatatcataacgaactatgatcagattgttgccgacatgggacatggtatgagtagtaataatgccaagtttaatgagaaacttgaaaaactggtagacgatttgtttggtggggaaaactgatgaaagaattactaataatggcaaagtcactaggtggcggcggatctgaagtggctttgatagaattaattaatgcacttcccgaagaactttacaatataacacttgtattgcttgattcggacaatgaatatgcttaccgtctaaaaaagaatgttaatattgttcagttgacttttaatagttcttttgcaaaatcactggtttcaatgtatgcttttccggcaaaggtattgaaaaaattatcggttaactcatttattgcatattatgattttatttcgaattgtgtgacgaacgtttttgaaaagacttatgacattgctattgacttctatggatatggttcatttgtgacagctttcttggcgacgaaaatacaagcaaagaaaaaggcaacatggcttcatgatgaaaaaccatactggatgaaaagcgttcaaaaatacttatgcgaatatgacaagatttatggcgtgtcccaggcagttgttgatgcattttgtagagagtatccgcattataaagataaggctgccgtattttataatgtaattgatattgaagaaatcaagcgaaagtctgaacaagatgagataataccgttcaaggaaagctttaatattgtaactgttggtcgattgacagaacagaaaggctatgacattgctataaaagcagcaagcattttgaagaagaggaaaatcaattttgcatggtatgctattggtggtggcagagatgaaaaaaagctaaagaaattagtagagaagtactgtctggaaaatcaatttgtgtttcttggtcgtaaaaaaaatccatacccatatatgaagcactgcgatttatatgttcaaccatctcgccacgaggggtatgtaattactttggtagaggcacgtgcattatgtttgccaattctgtcttcggacattccttcagcaagagagcagatacaagatggtatcaatggatacgttgctgaactgagtgcggaagatctggcagataaaattgagtatttatataacaatccttctcaaaggaaaaagactgttgagtatttgaaagaacatccgattgatttctctacggagttactaaagctagaaattatttgaaaagagattgtttatgagaaaatttaaagtagtaatgataacttcatactttgatagaaatggagtaacatcccaagtaataaattatgctacaaacttggacaaaaataaatttcaggtagcgattgccgctggagagccttatgacatcggctatgaaaaagcatgtcaagagaataacatagaattgtgtaagctgccacaaaaacagaaaaatgcatacatgtattataagactatttattcttttctaaaaaaaaagaaaccagatattgttcatgtacatggtagcagtacattaatcgccgtagaactttttaccgctatgttagcaggtgtacctgtacgaatttctcatagccataatacaacttgctcacatccgttgttacatgagacgctaaaaccgtttttgaaagtggtgtcaaattgttatttagcatgtggcgaacttgcaggaaagtggatgtatggcaacggagcatttaaggttataccgaatgcctttgagaccaaagcatttgctttaaattcagagactagattattaattagaaaaaaactagaggtgggcgataatttagtaattgggcatataggcaaatttaacaaccagaaaaatcaaaattatttaattcgcgcctttgagaagctttcatatgaagatgataaagcaatactgcttttggtgggaaatgggccagatttggaggagataagaaatcaggcacagcatacagcatgcgcagaccgtattatcttttggggagcaactgagaatccggaatatttatattctgctatggatgtttttgctttaccctctaggtttgaagggttacctgttgtgcttctcgaagcacaaatttcaggattgccttgtatcgtgtcggataaagtaacacgagaggtggattttggggatattatttggaaatcaatagaggatgatccacaaatatgggcagatacaattttatcaatggggcaaaggacagaagtacagagaaagcaatatcgcttgcaacatgtaaagcaaattgcacgttatgatattaaagaatccgcaaaattggttgagaatatttatgagtgtaaattactaaaaaagaaataaaagaaaaattaagaaaaaaaattaacaattaagctacatatagtttatgaaaggggattaatatgccaacatatgaaggattaaggctgaaagtattatgaaaatacttcacaagttttacattggtttagtgagtgcatggaagatgttctgtgccaaagtttgtgctcatgggaagcttcaagtaaaatgggtcaattcgattagaggagctttcaagactgaagttataggtaacggatctattacaattggacggtttttaatgtcaagaggcccattgtatctaaagtctgtaaatgatggaaaactgacgattggcgacgatgtgttttttaatcataattgctctataacctgtgcagagaaggtaacgattggaaatcattgtatgttcgccaataatattgttatcatcgaccatgaccatgtgataggtggtaatggcgtgacaggtgaacttactgcaaagccggtaattattgaagatcacgtttggtgtggagccaatgtaacgataacaaaaggtgttcatattggatctggtgctgttattggtgcgaatgctgtagtagtaaatgacattgaagcccatgcaattgttgcaggtgtcccagctaaaagaattaaataacataaaatagtagaggaaataaaatgatacccaaaatgattcattattgctggtttggcggaaaaccactaccgaaagatgttttagattgtattaaaacatggaaaaaatattgcccggattacgaaatcaaacgatgggatgagtcaaattttgatgtgaatagccatccgtttatgaaagcagcgtatgaagcaaaagcatgggcgtttgtttcggattatgcaagattgaaagtggtatatgataacggcggaatctatttagatactgatgttgaacttctgaaaaaacctgattttctgttagaaaatcagtgttacatagggattcagcaacctgaatccctatgtaccactggacttggttttggtgcccaaaaatcaagtccagtggtacaaaagatgatggaatgctatgattcgatttcttttacagatcagaaaaaaagcacatttgcgtgtccgtggcttaatgataaggtgattcgttcatttggtaaggttagcaatgaagatattacctacctaaaagaagtaacggtatatccgccacgtttttttgatccgctttcgacgggtaatacaaagaatttactttgtgatgaaacagtgtcgattcatcattacgcagcaacatgggcgggtaacaagcagagatggaagagaaagctgattcgtttttttggggaagatagatattttaagttaaagaagttgtttcgacgagtacagtagcatttgggggaaacaagcaaaggaaacgatgaaatggaatggttgacactatttatatatatattgattattttttttaatattttttttgacaaatttattccatatgctaactatacagatgagctgatatgcttgctttttatggctatagctatcgtatatatttgtaaagataaagggaaagtggctgttaataaggaacaaaataatagcatattatgcattctgttagtgctttttattggaattgtgggaaatgttatgtatggatatatgccatcagtttccgtaattgggagagatataataggaacgtttaagttctttattatatatttggtcggaagaagaattattgtaaaaaataatattcgattgaactcgaaaaaaataataagtacagcaaaaattataataactgttatttttgtttttggaatagttaatttgcttgtaaatactggaatagcagatgaagtaagatatggccttagaagttataagtttatttattctcattatacgtaccttgtttataatgaagtgctcttatacagtattctagcaacagaggataaaagaaatgcagtgtttaagataatgtcgctgctttcaattgcggcaactttccgaacaaagggatttattacgattgcatttatcttagcgtattacctcttgaattttgctaaaaagaaaagaatatcatttaaagatattttcaaaccgatttatattgctccaatcggaattgtaagcttttttatttcaaaaagcaaaattcagcaatatttatcatggggagcgagtcaaagcataagagttggtgtacatagcgttggattaaaaatcgcaaatgatcatttcccttttggaacaggttttgggacatttggaacgaatatctcttataaaaatcagtcacaactatataatatttataattcgttgaattattctcatctaatgaattatggatatgctacaatgtcggacgtgtactggccatcaatttatgttcaatttggttatattggaatgattgtttatgtgatactgattatacaaatttgcaaagatttgttgaataacgcaatgctgaataacaggtgtaaattttcaatattattgattctattttatatggtttctgcaagcttgagtgaagctacatttagcaatgaatctggagcgttttcggctgtggttatattaataatagttgcaatatcaagaaaaaatgcgcttataaagtgtgattgcaaggataacgaggggataaattgtggatgatttaataagcgttattgttccagtatataatgtggaagattatttggaaaaaagtttgtcttcattgttaattcaaacatacagaaagcttcaagttattataattgatgatggctcaacagacaacagtggggaaatatgtgattattatggagcaaacgatgggcggattgaggtttaccatatacaaaatgcgggggtttccaatgcgcgtaatcaggggctgaactacgcaaagggaaaatacatttatttttttgatccggatgattcccttgagccggatgcgctttggacgctctataaacaaataaaaaatggagcggatttagtagagtgttcatattttaaggactttacaaatgtaaaggaggaagtaattcatccggagaaaaaaatttccagtcaagaggctatcagaagtttattactgtgggatggatatctaacatcattttgctgggataaactgtataataaagaaaaaattggagatataaggtttgactcaaaattaaagattggcgaagataatctttttgtgtttgagtatttgctcaagtgcgaaagtgttatagtgctagactgcccactgtataactatctgataagagaaaattctgctattggaaatgtgtacacagaaaaaaagaaagattcagttcgtgcagcaggaacaatatatgaaatatgtagtaagcgaagtatgatgcactatgaagctaaaattcatgttgggttggcatcttttttttcatatgcgaatttattgaatacggttccttatgagaaaataaaagaatttaaaagtgattgcaaattttacattgattctatgaaagtatgttcttgtgggcttctttggaaattggttggaataaaaatgacgattctttataaaacggcgcagtacattccgtttctgtataaggcatcgggcttcatacgaaggaaaagccgttaataaatcagtatcattctttttcgtcaataaagtaactgataaaaaggataatatgtaaagtatactggctagctgtttaaaaagaaaattacatagcgtagtttattaatgtcggtttatgtaaaaattgtggaaggagttgagaaaaaatgagaaatcaaagatctattggtgtcaatgcaggactcaacatgattagaacggcatgtcaggtgatttttccattgattacttttccgtatgtatcacgagtccttcatgttgaaaatataggaatttacaatttttgtcagtcggttatttcgtatttttcattgctggcggctttaggaattagcacctatgctatcagagagggagcaagatatcgagataatgaagaaaagatgtcattatttgcttcggaggtcttttcaattaactttatttcgacagttttttcgtatctaattttaggagtgtgtatccttttagttccaagatttaaccaatatagttcaataatggtagcgttaagcataagcataatgtttacgctgattggaagtgaatggatatttcaaatttatgaggactataaatatatcacaattcgaggcattttgtttcagtttatttcattaatacttatgtttgtactcgttaggaatagcagtgatttgtttgcttatgtatggatcacagttatatcatgcagcggcgcaaatatacttaatgctgtttctagaagaaaatattgtaagataagacttaccattaatgcaaaaattctaacgcatttggctccaatattagttctgtttgcaacatcagtagcgacaacaatatatacgaatgcagatactacaatgcttggcttcttttcaggaaataaatcagttggattgtattctgtctccaccaaaatctacactattgtaaaacaaatgctggctgcaattattattgtttcaattccgagattatctgcttatctgggagagaaaaaaatagactattttaatagaacagccaaccagattttgaatgcacttgttgttattgtcgttccggcaatggttggattgattgcattaagcaaaaacatagtttttattattgcaggacaagaatatgttgatgcaaatatatcgcttaagattctttccgttgcgttgctttttagcatttttagttggttctatacatcgtgcattctaataccttataggtgcgaaaataaggtgttgatggcaacgattgttgcggctcttgttaatataggattaaattttatccttattccaacattccagcagaatgctgcggcatttactactgttattgcggagttactgtcaatggttataacatggtggtatggaagaaaatattttagggtcagttttctaaaaaaggacattctctcagttgctataggatgcctggcaatatggactatatgttctatatcagaaaaatatattagttcagtactgatttctacagttttttcagtgactgcttcggttgttatttatatgattgttctgttaataatgaagaatcaggcggtaaaattagttttagagatacttcatatcaaaaaataattttgtttttttttacacacgaaaatacagccggtggatgcttctaatcacatcatcatggactattccatccatgatgcaatcgaggctggtacgggatgacctatcacgaagatgtcgcagccgtaaaggacagcttcaagaagatgctggagaatggcgtgtacaaggctgatttatttgcagacttgtgatatactgggagcggtagctccctgcgctgctcgtaataatcacacacctcttcgtggtgagcagcaggcaacgatcttatggtcggctgagatgtgataaatattgaaggaaagtgatgtttatgaagcaaagagtaaaacaacttgcaataactgagaaatcagtgaaaaagaaaaagattgttgcagtagttattataatgtttattttttcgataataattttgggggtaggaagtaaattagtgttccaaaaaatttgtgaacgaagagaaacagcatggccagatttgggaacagcagatgatgagcaatatgagtggcttaccgaagcatataaaataaagcaaaaaaataatgaaaaaattgttatcttggcttctgatggaacaaagttggaaggtcattattatgagagaaagaagaatgctccattagtaatcttctttcatgggtttagaggtcatagttacgtggatggtgtgccgatttataaaattgcgcagaaagaaaaatggaatgttttacttgtcagtatgcgtgcgcatgatgaaagtgaaggaaatattttcacattgggagtgaaggaacgttatgattgtgtagattgggctaattgggctgcaaaacattttggaagagaaacaccgatatttcttatgggaatttcaatgggtggagcagtggtcacaatgagtagtaatttggattttccagattctgtttgtggaattattgaagatagtggatttacaacatcaacaaaaatgttagagttaaattgtaagagctctttgcctaaaggaatgccagtagaggtattcaaaatttttgcagatgtgggaataaagctttggggaggatttaatttaaaagaggctgatgcttgtaaggcggtatcacagacaaaaattccgattttaattattcatggtgatatggataacttggcaccattatatatggcaaaagaaatttataatagttgtaaaagcagtaaagaaatttatatagttcatggtgcaggacatgcagagaattataaaaaagatccagagggatatgaaaagataataacgacgtttattaaagaaagagtgccataaacgtaagcgcttaatttttaggtatgatagaaaaatccccgactacttttcagtagccggagcaccatgacaattttacatatgattgatttgattcgtttgcacgacgttcgatctcagctttgacggtttcgttccatggcaccagaagttacaaaataaaaagaccctagcatcatttctgatgctaagatcttgattggtcatcttaacttaatgacattgttctactaccggtttttctttttcaagacgataggcttttctctgctcaaatgtgtgcttcttgttctgtgatctgcgctcatactcaaaaaacataagtatagtaaaacactagcatttcctgatacttattatgagttgataattaacttgttgcaatgtacatgtataaccaggctacgaaggaatatatctatatgcaacagattggctgttgcctgtctgccgggtatgcacagacacctgttatatttgatatggtggataattttgagagtttatattgtatagacgtgttgcgggatgagatagatgaggcattttctcttattccatgtacttatggagagagggagcgttttaaggaacactttgaaatatatgatgagctgaaagattgcaggattctgttttcggagcttcagcatagtctggcttcatcatgggacaattattacctggctgcatgttcatattataaagagcatggtgatttaatggttgtcaagaattatgttactcaagatggactgactcttggagcatggattcagacacagcgcaggatatacaatggaagcgaagcattacaggcaatctgacagcagataagattgagaagcttaatctgattggtatggtgtggaatgttaacggtggaaagttttcgcgtgcttatgaagaactgaaactgtatcatgatacatatggaaatcttgatataaaggcaaaatatgtcagtccatcaggatttgcactcggaagatgggtttcaaatctcagaagttctgttaagatgcatggcatagatttggaggaaaagcaaacgattgtggcctgcggagcgggagcgagcaccaagcgtgtctggctggtaccgaatccggatggcacacaccgcatcgacagatgcgagaatgtcaaggatgtagggcagtatatcgcaaggattgatgagatgatagagaggaagcagaggctgtttgaggagtaaaaagagctataagctataaaataatgtataattgttggtgatgtaataccatagcgattagcaaatgtgtcaaaaattataaagaaaacctaatattcattgacaaagaattaaaaatgagtaaaaatatattactgaaaaatcctgattagatacagaaaaagatacaaataaccgaataaaacatacataaaataaaacaggctaaaataattcgggggggtgcaaaggtacctcacctgtagcaggtatagagggaaatgagagataccacaaggagaaataagaaagaatgtacagaaagaaaggcagaggctggacaaagcatatagactttatgcttatagatatcgcaagcatttttatagcattttttatttcatatgtgatacgcttcggccttaataacccatacatggacaaggactaccgtatactgggggtagcatttcttctgatagatttctttgttgagataatggcagactcattcaagaatgtcctaaaacgcggatatctggatgaagttatatcgacctgcaagcatgcagtgcttgtatttctggtgacagcactatttttgttcaccacacagatggctgatatatactcgcgattatcattttatattatgtttccaatctatgtgacaataacatatatagtcagggtggcactcaagagcttccttaagaaaaaggatttcggtatatcaaagaaatcactgtttgtcatagcaccggatgctatgcttcgtgatacactgcgcacagtggaaaaaagctgtataggctatacaaagatagtagcagcctcaatggatacagacctgaagggtaagactatatgcggcataccgattgtcgcaaaccacgatggcatagtggactatgcgtgcgaagagtgggtggatgaggtgctcatcccaccatgcagcgaggatgaatatcctgagaggatggcagatatattccttgagatgggaatagccgtgcatacaggaataacaaagaatggtactgcccatggcggttacaagcagatagaaaagataggcgactacacagtagtcacatcaagcgtgagctatgcaaacaccagcgcacttctggtaaagaggggcatggatatagtcggaggactggtgggctgtctgctcacacttatcatcatgatatttgtaggaccggcgatatatatagcatcgcccggaccgatattcttcgcacaggagagagtcggcagaaacggaagaaagtttaagatgtataaattccgcagcatgtacatggatgccgaggagcgaaagaaggaactcatggcgcagaataaagtgggtgacggaatgatgtttaagatggactttgatccgagaatcataggcaataaggtgctgccaaacggaaagaagaaaaccggaattgggcagtttatcaggaaaacaagcctggatgaattcccacagttccttaacattttaagaggtgatatgagcctggtaggcaccagaccaccaacactcgatgagtgggagaaatatgaaccacaccacagagccagaatgtcattcaggccgggattgactggactgtggcaggtgagtggcaggagcaatatcacggactttgaggaagtggtgaaactggatacccagtatattagggagtggagtgtaaaaggggatattaaaattatttggcagactgctgtgggagtgttgaaaaatgatggagcaatgtaaggaaaagcttagtattgcaatgtttaccgggcaaaatcagttgcggtctgatgggttgtggtggagttgaatatacatacaaatataagtctttttgcataaatatgcgccggaaaaatgagggtgaaagcacgactgattttgttgagtgaacctgtctggataaagatatgtaagaaaattgacgaaatatcgagaaaagacatggttactgggggagttggataagacagcataagaaaacacttagccgtgtgagcggtaagaggaaaaagaaataccatccaaatggatgtgtagatagaaagattatttaacggagagataggaagaatgcagcgtgaaaacgaagtacaacaagtatttctggtaggagctaagagcttaggagcttatggcggatatgagacttttgtttataagcttacagagtaccaccagaacaagaaaaatattaaatatcatgtggcgtgtaaagctaacggtgacggctgcatggacgaaataaaagtggatggtgtgaccagaatcaatgatcaggagtttgaattccacaatgtacattgtttcaagatagatgttcctcagattggacctgcacaggcaatttattatgatgttgcggcattgaaggcttgctgtaagtacataaaggaacatcgaattaagcatccgattgtttacatcatggcctgccgtatcggaccttttgctggtcacttctataaagaaatccataagctgggcggtactgtgtacctgaatccagatggtgctgcagtgataatagggacactttttgaggagaattctcaggcgaagtcagccaaattggaggtggctgcatgaaagagaaaaagagcggtcagcttaggatagcgatgctcggtcacaagcgcattccttcccgcgaaggcggtatagagattgtcgtggaggaattgtccacccggatggtggaattaggtcacgctgtgacctgctacaaccgtaaaggccatcatgtcagcggagtcgagtttgatggagaggaaagaagcgaatataagggagtacgattaaaaaccgtaccaaccattgagagaaaaggactcgcggcagtaacatcttctttctttgcttctctttttgcggcggtgggtccatatgatgtcgtacatattcacgcagaaggaccggcgttcttttgctggctgccgaagctgtttggaaagcgagtggtagtcactattcacggtctcgattggatgcgtgaaaaatggaaaggcggatttggttccaggttcattagaaaaggtgaagagcatgctattaagtatgcagatgagattattgttctaagcaaaaatatgcagcggtattttagtgaaagatataacagaacaacctgtttcataccgaatggaattgaacgtccgaagatcatagaacaggatttgattcggagagagtatggcctggaaaaagacaaatatattttatttttaggaaggcgggttcctgaaaaaggattgacatatctgattgatgcttttaaaaacgtagatacagattttaagctggtgattgccggcgggagcagtgatacagatacatacacagatcaaataaaaaatatggcaaaggatgatttgagaatcctgtttacaggatttgttcaggggaagatgcttgaagaattatatagtaatgcgtatgtgtatgtcttgccatcggatgtggaaggaatgccattaagcttattggaagcaatgagttatggtaattgttgtcttgtatcagacatcaaagaaataacggaggttgtggaggataaagctgtgatcttcccgaaggggaatgtaaatctccttacaaaaaaattacagtttttatgtgacaacaaaagtgaagtcgcgcagtacaaagcgcaggcaacggagtttatttgtgggaagtataattggaattcagtagtaaatgaaactgtatctttatattattaataggctctcggaatcatgagcctgccgactaagattcattggtcggatgaacc

SEQ ID NO: 480 - DNA, 9691 bp, unidentified
  source 1..9691: mol_type = unassigned DNA
  misc_difference 7257: note = a, c, g, or t
  misc_difference 7258: note = a, c, g, or t
  misc_difference 7259: note = a, c, g, or t
  misc_difference 7260: note = a, c, g, or t
  misc_difference 7261: note = a, c, g, or t
  misc_difference 7262: note = a, c, g, or t
  misc_difference 7263: note = a, c, g, or t
  misc_difference 7264: note = a, c, g, or t
  misc_difference 7265: note = a, c, g, or t
  misc_difference 7266: note = a, c, g, or t
ttatattcccccctttaaaagtaatttcctctgaggtttaaacaccatatagttgaataccagaaacaccgtagttcctaacagggcaaaaaacgaaccgatcaatgccgtactttccagccctgccccatgttcgatcgacaatcctccaaaataagcccccacggcattccccaaattaaaagcaagctggaccatcgccccgcccatcatctctccgccaggagaatattgaagcaacaacaattgctgtggagaagaaactgcaaacaggcaaccagtacaaacgcacatcagcaaagcggacaaaaagccgtacgaagcaaaaaaataaatcagcagaagtgatgcaaacatcagaaactgcatggacatcgctacgataccaggtgtaaaacgatcagacaaatgccctcccaaatagttaccgacacacatgctcgcacccgccagcaacatcaatacaggcattgtcccgacactgaaaccggacacctccgtcattaacggattgacatagctataccaacaaaaagctcccccgtttcctaacatggtagcagcaatcagcatccacggttccggccttctcaaaaaacgaaactgccctttcagattcgtcgccggcagggcgggcaaaacaggaacccacctccggataaaccaaatcgttacgccaccccacaacgctgcaatcacaaaaaccaaacgccaggacagaaagtaccccaggaaattcccggccgggacaccgaacaaattggcaatcgtcatccccataatcataatagctacagcagaagtgcttttccctttctccgccaaacggctggcaacaatcgaaccgactccgaaataagccccatgcggcaaccccgatacaaaccgggcacacaaccccatccaataatcggccgacagagccataagcagattcccggcaacaaaaagcccaaccaaagcaagcaagatcgtacgtagcggccaactcctggccaccaccactaccaacggcgctcccacacatacccccaacgcataagccgaaataagatgaccggcttcggataaggaaatatcaaatcctgccgccacatccggcaagatactcatcataataaactctgcaatccccaacccaaatgtgccaaaagacaatgcatacaaacctttcttcataacctaattcaatctttctgtttttccggccgcaaagaaacaacaaaattattaagtgtaattgtcgcagattatgcaattattgtctaattttactgtgttttatcagaaagttcatccgacatgcacgagaaactaaaattcgaacaaatcaaaaaagatagttgtgcctcattacgctacgattattccagcttgtacccgaaagacgaaatgcctcttcattttcatcccgaaatagaaatatgttatgttgtgaaaggttcaggctaccggatgataggcgactttctggagccgttcgaggagggagaagtcgtactggtcccgaccaaccaaccacattgttggatgtataaccccgaaagctgcgagcctgatggaaaacggagatgcatagttgtgcaattcaatcccgacttgctacaaaccggcctgtctttttttaccgaatgggaatatgccgctcaccggttatcggcaattcagcaaggcatcctgctgacaggcgaaacagccggaaagatcaaatcctgcttagaagaaatgaacctcctgaatgcaagcgaaaggatgctgatgttgatccgcatcctgcaacaaatcggaaccacaaccgatttaatccctatcggtttgcaggaaacggtattcaacggcattaccaaaaacatgcaacgcatgcaactgatcttcaaatacgtcatcgagcattacaaggagaaaataactctttcggacgccgcaaacgtaatcagcatgagcacaacagcgttctgctcgtttttcaaacgtgaaacaggcaaaacgtttacaaacttcatcaacgaataccggatagaggccgttggcactttactccgcaactttccggataaggacattaacgaaatagcctggcaatgcggcttcaccgacattccctacttcaatcgctatttcaaaaagatgaaacagatgactccgaaacaatggagatacgaaatacaataaaaaaaagaatatcctaatatgaatgcagaaattatccgattcttagacgatttacgacgaaacaataataccgtttggttccatgaaaatagagaacgatatgacaaacttcgctgtgcttttatcaacgaagtacaagagttaatcgaacgaatcagcgtatttgatcctgatatacggggattggatgcccggaaatgtctgttccgtattaatcgcgacatccgcttcagcctcgacaagtcgccttacaagacttatatgtcagcctgtattgctcaaggaggacgtcatagtatccggggagcttactactttcatcttgaaccggaatactgcgtactgtccggtggtatctggtatcccaaaccggaaatattgaaagtccttcgacgtgaaatatacaataacatagatgaatttgtttccatcatcgaagagccttccttcaaagctctgtacccgtcactcgaaggggacatgctaaaacgtatcccggccggtttcccctccgattctccttacggccatatattaaggcacaaagacttcagcgttatcggtattaagcccgacaggtttttcagccagccggactggatggaagaaaccatcgattgttttcgaaagcttcttccattcaaccgcttcctgaatgaaattgtggatgaatatatgggaaatctgtaaaaatactattttccgcaaatatccttaaacggacaatacatgcaggctttgccgttcggggtttgcacgaatggggtttctgtgtcgaagatttcatccaagcaatttcgcaggctgtcttcaaaatccgtgcgatagttggcgaagtccaaaacctgttctgttttgaaccggtctgtacgatggtaaattccaggatcgaaagaggaagaaaagagggtcctcatataatagatacccggctgaatagcagttgaaagctgaactgacctgttatacatccatgcatacataaagacctgcataaccgctttggaacgatccgtatctgctttgtcgaaaagagcttctacagaggtaaactgcgtcgtcccgcccccactcttatagtcaataatgcggacgacatcgcgtacttcgtctatacggtcgataaatcctttcaactggatattgcttttatccgtcaatggaaaaaggcattttatcttcttttccgattcgatataacggaaaggagtctgttttgcgtcacgttccagcactttctccacatatttgcgaatcatctcgccgatcaggaagttttgtccggtgagtggacgaacaatgtccgttttaaagaaaatttcggcaaaggcacgggcaactgctcccgtcaacataggcgtatcttttcggatcgctttcagcagatcagccgtcaccatctttccacagaatggctgatacaattcttccatcaccttatgcaggatacttccaaaaacattactttcgatcgtctcgcttacctcctcttcttcacgtattccctcgacaacggagaaatagaatttaagcggacaatccagataggtattgactgcactcgccgatatcgcccgcgtcccgccactccggaaatcagccagacggttcatgacttcctccgtcttagctacctgcaaggcaggagtcttggaagaagagacattgtaaacaaccaacttattctgtatcggctcctcataatgataatgcaactgatacacgaaacggctaacctcgcctgtctgcaatccgttgcttcttgtatcataaagcagactgacatggctggcacgataaatcaaacgatagaaatgatacgcccaaacactgtcctgatgttcgtatgtcggcaaaccgaatccacgacgaagattataaggaataaatgaattagccgctttcctcaacgggaaaattccttcattcatcgaaaggataatcaaccggtcaaagtcaagcgcacgagtctccaaaacacccatgatctgcaaaccggaaagaggttcaccatggaaaggaatcgtaattgtgtccgtcacacgtttcagcaaacggaaataggtgtcgattttcatttctacattcgcctcccgcatgacttccttcatccggttaaccgtagcgaaataatggaagataaactcctgttcgatgtcgttaatagttgaaagttgagagttgaaagttgaaagtggctccgtgtcactatttacactttcaactttcaactttccaccttcaacagctttattcagttcctgcaacacgttaatcaaataatcggagaaagtttccaccgcagtcaccggagtaaagaggatggacaacaatggcgtcttattcagatcgtcatacgatatgtaaatcttgttgttttctgaaatattttttaccagattagaaaccacctccggagaagtagtcgagatataccgatggttcaggattggcaagacatcccggaaatagaacaccggcctccggtccacataacgaatattcttttgcaaagccagaatatattccatcaaagatgcgaccggtgtaccggccaacggatatcccatcgtcacattgatccgtttgatctgttcgggaatggcattcagaaccggaatcaacaaatgttcatccggcagaatcacagccgtccgcaacgcttcttccgcactcatttcctcttccttgcaaagctcgttcagaatgctgcacacttgctttgcctgtccgattccggaagggatgccgatcacctcgatcttctttttgtcgtcatcttcattgtcaatagtcaattgtccattttcaattaattgcgacgggaattgccgcaaattgcgctccacgaagtaagaggctttattatctgggtccgtcactttcggagaggcgtaatcccagtaaaaatcagctattccccgtttttgcaatccggaaaggaaacgttcttcagccaccgagagggcattcagtccgacaaatacaacctttgtatagggcaggtcgcaacattcgtctttctccatctgttcgacaacttcccggaaaatcataccttcatatcctttgccttcggtggcaagcgcttcccgcaaatcggtatatagggcatataaaatctgccagaccgccagaaattgttcctggttgggcgtatctcctttcgggtaaaaagaagaccaaaaagtccggatagccgcaatttgttcagggctcagaaaactaaaatcattctctatctcacgcaggtccgtcacattggtgaagagcatacgggcatctgccatatatttatcgatatcgtcgaaatcattcagcagcatttccccccaatacaagaactcgtcgaacgtttcggaagaaccgctatgtctcaaataaatatcatatagtttaaacagcatgctgatccgatcggcagcctgctttccgctcaactgtacaaacagatcgttgatcgtcaggatcgtcggcgagaaaagaggcttctcagatacttccgacaagtatttctggaagaacagcccggtacggcgattcgggaaaacaaaggccagacggctcacttccgccccgtattcagaataaaaaagggatgcaacctgatataagaatggtttcattaattgtttggattaataaatgatgatttatcagtgtatattactgtaatatattttctatcatttgtatttcttccgctgaaaaggctgtattttgtaacgccttcaggttatctatcaactgtgcaaccgaactggctcccaccaggacgctcgtcacccggtcgtctttcaacagccaggcaatcgccatttccgctaacgtctgtccgcgttgtttggcaaggtcattcagttgtcttactttatttattttttcttccgtcacctgttcacgttgaagatggcctgtagatttggccgcacgcgaattatcgggaataccgttcagatacttatccgtcaacatgccctgtgccaatggcgagaaggcgatcatccctactccttcctgcttcaacagaggcaacaagtccggttcgatcctgcgatccagcatcgaataacgcgcttgatggatcaagcaaggcacacgatgttctttcaatacggcaagtgctttttccgtctgtccggcagtgtaattcgatatcccgacatacagggcttttccctggcggacgatgtcagccaatgctcccatcgtttcttcgaccggcgtctgtgggtccggacgatgcgaatagaaaatatccacatattccaatcccatccgcttcaaactctggtcaaggcttgccatcagatacttgcgacttccccagttgccatacggaccaggccacatgtcatatccggcttttgtggaaataacaagttcatcccgatattgtcccagacctttcttcaggatacggccgaaattttcctctgccgatccatacacaggaccgtaattattggcaagatcaaaatgtgtaatcccattgtcgaaagcggcatacgcaatctgaataaagttactgaacacatctacactgccgaaattatgccacaatcccagagagatgaccggcaatagcaatccgctccgcccacaacgcctataagccatatcggcataccggttgtcatttgctttgtacatttccatataaagatatttttattacaatgaatcttttcagatatacaaatataatcaagaataccaaaagaacgggcaattcggataaaatgatcgcttctcggaggaaacaacatcaaccgggtataaacaaaaaaggctatcctcacggacagccaatcttcattgttaaccttaaatctaataccatgaaaaacacagtgcaaatatagagagtttatgttatgcagcataatatttccacaaaaaaaagctttctcttaacctgatttaaccatttcatgttttacaacataatttttcatacacttttgacttagtcattccctgcacaaacaacagacacattatgattgaaacagcctacaatactggataaaaacgatccaaatgcaaaagtaacgaataactcatacaccttaccattttttnnnnnnnnnncttctttcctaccgatctgctaatgatcggaaaattaattcttacttattgaaacgttctttcaatttagccaacatatcctgagtcatggaatccagatcatattccggtttccagccccattcctcacgggcacatgtgtcatccaaagagttaggccatgattctgcgatagcctgacgtaacggatccacatcatattccatctggaagtcaggaacatactttttgatgttgttgtagataatttcaggatcaaagctcatggatgcaatgttgaaagagttacgatgaacgaacttcgtcgaatcggcttccataatttcaatagctgcacgcagaccgtccggcatatacatcatatccatgaatgtaccctgcttgatcggacatacgaacttctcacctttggcagccgaataatagatatcaactgcgtagtcggtcgtaccaccacccggaggtgtcacataggagataagtcccggaaaacgtacggaacgagtatcgacaccgaaacggatattatagtagtcactcaacaattcgcctgaaaccttcgtgacgccatacatagtacgcgggttacggatcgtatcctgcggagtcttgtctttcggcgtgttattgccaaacacaccgattgaactcggagtgaatacagcacaatgcatttcacgcgcaacttccaatacgttaaacaaaccgcccataccgattttccaggcaagctgcggttttgcttctgcaacggctgacagcagtgcagccaagttataaatcgtatctaccttatatttggacacagtctcagcaatctgctgttcgtttgtaatgtcgacaattgcagaaggccctgattccagcagttcgcctttaggctcctgtccggggatgtaacctgctacaatgtttccaccgtagatacctctcaacttcatggttaactctgatccaatctgaccggtagaaccaattactaatacattcttcattgcgtttgatgttcttttaagttttttcgatggcaaaggtatagagaataaaaacattccggtatgaatttcttgtattttttagcctatatattcaaaaaaaatatgacctttgccacatcggcagacaaatcagagacaaagaaaaaatggtttcaagaataatattttgccacttgtctgcgataatagagatataattgtcaacttaattaaaaatactaacaaaaaacaaagttatgtacggtaaactgaaagatttccttactcaggaattggcaaacatcaaagctgccggattgtataagaacgagcgtatcatcaccactcctcaaagagccgacatcaaagtaaacgcaggaagcgacgttttgaacttctgcgcaaacaactatctgggcctgtctgacaaccaacgtctgatcaaggctgccaaagaagctatggacacacacggatacggcatgtcatccgtacgtttcatctgtgggacacaggatctgcacaaacaactggaagccgctatctccgactatttcaaaaccgaagatacgatcctgtacgctgcatgtttcgatgccaacggcggtctgttcgaaccgttgttcactgaagaagatgcgatcatctccgatgctttaaaccatgcctccattattgacggcgtacgtctttgcaaggcaaaacgctaccgttatgccaatgcagacatggccgacctggaacgttgcctgcaagaagcccaggcacaacgtcaccgcatcatcgcaacagacggtgtgttctctatggacggaaacgtggccccgatggacaaaatctgcgaactggcagaaaaatacgacgcattggtaatggttgacgaatcccactctgccggtgtagtgggcccgacaggacacggtgtggctgaacaatataatgtatacggaagagtcgatatcttcacaggtacgttaggtaaagcattcggtggcgccatgggcggattcacaaccggaaagaaagaaatcatcgacatgctgcgtcagcgctcccgtccttatctgttctccaactctgtcgctcccgctatcgtaggtgccagcctggaaatgttcaagatgctgaaagaaagcgatgctttgcatacgaaactgatgaacaacgtcagctacttccgtgaaaagatgttagcagccggtttcgacatcaagccgactcagtccgcaatctgcgccgttatgctgtatgatgctaaattatcccaggatttcgcagccaagatgcaggaagaaggcatttatgttaccggcttctactacccggtagtgccgaaaggccaggcccgcatccgcgtacagttgtccgcaggccacgaaacggaacatctggataaagcaatcgctgcatttatcaaagttggaaaagaactgaacgtaataaaataa

SEQ ID NO: 481 - DNA, 14468 bp, unidentified
  source 1..14468: mol_type = unassigned DNA
  misc_difference 8311: note = a, c, g, or t
  misc_difference 8312: note = a, c, g, or t
  misc_difference 8313: note = a, c, g, or t
  misc_difference 8314: note = a, c, g, or t
  misc_difference 8315: note = a, c, g, or t
  misc_difference 8316: note = a, c, g, or t
  misc_difference 8317: note = a, c, g, or t
  misc_difference 8318: note = a, c, g, or t
  misc_difference 8319: note = a, c, g, or t
  misc_difference 8320: note = a, c, g, or t
gttatgagtatatctgataacttcgagggtggtcttatgaaggctatacgttcacttgaacagcatgttgacagccttatgtcatacgattttacaggacttacagatgaggaacttttagaagatcttgctgtagttgatgacagaagaatctggaagatagcagaaggcttaagaagaggcatagagccagcagttatgcatgacataacaaagattgacagatggtttatagataagcttcagattatcgttgagatggagaattcattaaagaaaggtcctcttacagaagaattattaagagaggctaagagaattgagttccctgataatgttattggagaacttacaggacatacagaaagagaaataaaagaacttcgtgataagtatgatattcacgcagcatttaagatggttgatacttgtgccgctgagttcgcagccacaactccgtattactattcagtatatggcagtgagaatgaagctgcagagactaaggataagaagaaagttcttgtacttggttcaggtccaataagaattggacagggtattgaattcgatttctgttcagtacattgtacatgggcatttaagaaagagggttatgagacaattattatcaataataacccagaaacagtatcaacagactttgatattgctgataagctttactttgagccacttacagaagaagatgttgaaagtattgtagaattcgagaagccggatggagctgtagttcagtttggtggacagacagctatcaagcttacagaagctcttatgaagatgggtgtgccaattcttggaactaaggcagaagatgtagatgctgctgaggatagagagttatttgatgagattcttgaaaagacacagattcctagagcaaaaggacagacagtattcactgttgaggaagcccttaaagctgctaatgaacttggttatcctgttcttgtacgtccttcatatgtacttggtggacaaggtatgcagattgctgtatctgatgaagatgtagtggaatttatgggaattatcaacagaattaagcaggatcacccaatccttgtagataagtaccttatgggtaaggaaattgaagtggatgccgtatgcgatggcgaagatattcttattcctggtattatggaacacattgaaagagctggtattcattctggagatagtatttcagtatatccagctaagtcaatctctccaaagataactgaaatgattgctgattacacaggaagacttgcgagagcacttcatgtaaagggtatgattaatatccagtttattgtatacaacgatcaggtatatgtaattgaagtaaatccacgttcaagccgtacagtaccatatatcagcaaggttactggtattcctattgttaagcttgcaactaaggttattacaggagctaagataagagatttaggttatgagccaggtcttcagaaggctgctgattactatgcaatcaagatgccagtattctcgttcgagaagatcagaggtgctgatataagccttggaccagaaatgaagtctacaggtgagtgccttggtatatctaagagctttgatgaagcactttacaaggcatttgagggagctggaataagacttccaaagcataagcagattattatgactcttgcagataaggataagcaggacggtattgatatagcacagagatttgaagcacttggatacaagatatatgcttcaagaggtacagctaaggttcttaaagaaaatggcgtacacgctattcaggttaataagattggacaggaagctccaacactccttgaccttatattagagcataagattgatcttgttattgatacaccagaaaatggtattgagagagcaaaggatggtttccttataagaagatatgctatcgagacaggcgttcactgccttacaagtcttgatacagctcacgcacttatctcaagtcttgagcatgcatttaataatcaggaactttcaatagtagatattgctacaattgataacagaggttaattgaattaatgcaaatagtataattatgcagagtgatatatatataatgagcacaaatgtgctcatcctaaaagctacgcaaaaattgtgatataatgtttatataatacattttataagtaatattatagtcctccagaagctaagtaaggcgaatgtgccttaaaagcttttgggggacttttataatcagagggattatgttaaaatgcttaatatgtcctgaataatatatttgataatcagggcaaaaaggagaatatatgagattattgaatataggtgataagcttattaatctaaagaataaattgaagttaaaaaatgcagtgtcaatagcggcagctgttatgcttggtgtaacttcacttgcaggctgtggctttgtgtctaacccggttgaatatatgagccaggcagataatgagaatggtacggttagcgataacactgataagataacagataatagtggaaataatgcgggcggtatgaaagataacagctctgatgccggaagtattgttaatggcagcgacaatagtaatggtaataaccagaccagtggtaagagaaaggcttgtattgttgggacatatggaagtgtgagtgagcttgttaatacagcagattatgagaataaaatagatattgaattaattcaggaaaataaagattttgatgaaacaaaggatttaatatcattggcttctaaagtccaggaaatatgtagtggtgatgcggatatagttatcgtatcggcgaggaaaagatttgcagaccagattagatattttcttacttatacaatagatacagataagagtatatatgttgttgaggaagataataacaattataagacagaaatagctgatattgttgataataaagcgaataaggttaatgatagtgcaaaacatcattttgacgtgacagggattaaggatatgggctatgtcggtatggttaatgattatataggcaatgatgtgtatacagcacagaaaataatggcttcatatgagtctgtagtagtagtcagcgatactgctgacggaagtctgtcgccagcaatgacacagcttgtaaaagatgtatcaggttatattaaggtaattgttgttaataattctggcagtgaatatgactatgcggctgatggtttaaatgtcatcacagcacagacaatgacaagctggcaggcaagaataatggcaatgttatgtcttacagataagaatataactgactggcaggagttctttaattaatggcagttgtgaagctgtaatgtggcagtgcaatttgcagatgcggtatattacataattcgtgcagttatatcagggcagctgaattaaataaaacagagtaaagattttgtgagttgaatcattaaataaagttgaattgataattgtacacaaatatgttactattatacatatgatgcaattcggaaagggtatatatattatgaatcagacaaaaatacaggacgtaataagacatatcagcaaagatgaagactacggcgtagatatgatggagaagctttctttagctgatgcagtagaggttatggctgttgtactgccatctttaaagaaaagagccaaggagatgggcaatactaacgatttagcatattttggaagaattgaagagatatatgcaaaggttatagctgataaattaagaaaagaggaacatttatgggttgtatattcaagtacaacatcgtacccatatatggtagacagtgatttatttgttctttttaatcctaagaattcttcacttattgagaaaaagcttaagctcagtggttacgaggtatcagttggtgttgagaataatgatgcgtttgctatggagttatgccatatgtatcgtaatggatataagaatataagacttacagatggcgacaagcttgaatatgtaataccaagagaagcatttggaacatatgatgagttctttagggatgattatgtgactaacccaggtttacagaatacaatgatttcttattttcaggagttcagaaagaatacagacaaagatacaataaaagagcttcttgataagagagaaaatgctatgttaaatgctatggttaattctgaatatatggttccatgtgttaaggaggagacagaggaagaagtatctatagcacatcattttattgatgttacagacagggttaagcataaggaagacgagcaggttatagcaataccggcatttacagatggttttgagatggacaaatgctataagggacagtatgagaatatgctctatacatataaggaacttgttgaggctatagacgagcttggagcttcaggagcaatatttaatccacttggaataagttattatattccacttgaaacacttaagaaaatagaaaaagatttcaataaatagaataatatgtaagcctgcttgtatcgggttttatgattgtatcacaattatgtgatatattgtaagatgtgatactggcaggctttttatgtaatagggaaatctaattaatttaattcattatacataaaaagtcctatatacaggttcgtactgcagtgcaaatataggcacctataatgaaaaatacttatgtaaaaatacttttacaaaattactttatgaaagtgttggcaaattacttgtaatgatgtaaacttagattaacttaagaaatattatgtatgattatggaggtaatgtttatgtggttagctgatttgggcaatggaaattataggaatccgatactttatgcagattattctgaccctgatgctataagagtgggagaagattattttatggtagcatcaagcttttctaattcgccagcacttccaatattacattcaaaagatttagtgaattggaaggttgttaattattgcttgaaacacattccggaattcagatataacaatccgctgcacggatgtggtgtgtgggcaccatctataagataccacgagggtacatattatgtatgttttccaatgccagatgagggaatatatatgacaacaaccaaagatccgtttggtgaatggagcgagcctgttaatataagaccaggtgcaggctggattgacccttgtccattctgggatgatgacggtaatgcttatcttgtggcaggtgttgcaaagagcagaattggatataagagtgttcttcatatagtaagaatgagaccagacggtatggggatatttggagatgaagtaaagatatttgatggtaatgagaatgatcagataacaatagaaggacctaaaatgtataaacataacggatattattatatatttgcaccagcaggcggtgttaagaccggctggcagacaatactccgttccaaaaatccatttggaccatatgaatataaggttgtattaagacagggtgactctccagtcaacggacctcatcagggtgcgtgggtagatacaattactggtgaggactggttcttacattttcaagatgtgtatgccgcaggcagaataacacatttacagccaatgcattgggaaaatgactggccaataattggtgttaataaagagggcaatgattacggtgaaccagttatgcaatatgtaaagcccaatattggaaagacagcagaggagtttaaggacacagataaatatccagtatgtgagccagacacaacagatgaatttgataccgacaagatgatgttacagtggcagtggaattctaattatgatgacagctggtatgtgactaagacagatgcctatggaaagaaaacaccagacggctcatatataagacttaatgcacttgcatcaacacctcttagaccagtgagcgattacagaaatcttctcttacagaaatggcctgcacctgaatttgagtgtgttactaaaatgtgcgtgaatggtcttgaaaatggagactatgccggaattgtgtcattaggcgtggaatatggagcagttggaattgtcaagaatttcggggaatatgcaataaggacagtcagaggcacccagagctttgattgtgaggcggcatattctaaggaagattttaaggactatcctatagctaaggatacatttgctgataaggaaaagactgtatatttaaggtatacagttaagagaacaggaactaaggataccaaggaaatggcactggctgttaaaaatgttcctgtagaagaggtgactttggagataagctttgatggaaaggcttatgagaagcaggtgagctttacagcaaaggcaggacgctgggttggcgttaagaatggaatgtttgttaatcataataatgagattaagaatgagaatcagggggatggatttgtgacggttgattatatcagatatagatgtatagacaacgggagattggattaaattaacataagtaacaaagatatgctttcgctgagtgtcgctatcagcggtactaaagtgctaaagtacagcacttaagtgccggcggctccacatatggctgggacataggatgtatggcaggagttattttagttgttggagatgtttaattaaatagttatgaagagtgtgtattttgctgtagtggcggagtgcacacttttttgtgggaaggtttggaagctgacattagaatatttatgaggattttgcttgcattggagagcagggtggtatatagtatcttaaatgataaattttatgagatttgagtataaatattgcgatttaaggaagtactatgatggttaatttaataagaaagcagtcgcctgcaagaataatagcgtttgggtttatatttgtgattatagcagggtcagtgcttttgtctttgccgtttagtgttagggatggtgttgatttaaaatacacggatgctttgtatacatcaacgagtgcagtatgtgtaacggggcttgtggtggttgactcatatgacacatttacacctgtggggcaatttatactaggggcacttattcagataggtggtcttggtgtgacaactatgggtgccggaataatacttgttatgggtaaaaaggtagatataaaaggacgtactcttttaaaggaagcactgaatatggatacggcaaaggggcttgtaaggcttatacataagatatttattgttacgcttatatttgagggggctggtgcaatagcaggttttctggtgtttataagagattatccattttttagggcattgggaataagcgtgtttcattcggtagcggcgtttaataattctggttttgatattcttggaaataaccagaaccttattaattacagtggtaatatagcacttaatattataacctgtacgcttgtattttttggaggtattggcttttttgtaatatgtgaattgtgggaaaagagatttaagtggaagaaattctcaatgcacacaaggattgtaatatcagtgagtattgtgcttattatcgctggtgctctgcttcttaagattacagaaaatatctcgtggatgggagcattctttatgagtgtatcagccagaacggctggatttgcaacatattcacttgggacattttcaaaatcgggactacttgtgattataatacttatgattataggagcttcgccgggatctacaggaggtggaataaagacaagcacattttttgtcctcatacagggtgttaagtcggcagcaactaataagtcggagaaagcatttcattatgcagtacctaaggaagcgttcagaaaggcttcggttattatgatacttgctatgtgtgttgtgaccgtgggagcttatcttatgggaatatttgagccggatattgattttattgatatattatttgaggtcgcaagtgcatttggaacggcagggctttcaacaggaattacacaacagataggaattgcaggaaagctgttatctattgttattatgtacataggaagacttggaccgcttacgattgctacattgtggcatttctctaagggagagaggattaattatccggagggtaatataactatagggtgatgattgtgaaatatatgtggagagagtattgatgcactgttttggtgaatgttgttattgaaacgaaacagttgtgagggcggactatattgcaagctgggtactgttgaagccgccggcacttagcggctgtattttagccgcttannnnnnnnnntggtttcaagtagcgaaagcgtgcccagcggtaatatagtccgccctcacaacgtccgttagccaacacccaatcatcaatacacacccaacaataatacgtgaattcggaggtaattatgtttaaaactagaatatcaaataaaaatactacttatggaattataggtttaggaagatttggcgagtcgcttgcattatcgcttgctaacagcggtgctgaatttatggttatagacaaagatgaggaaaaggtaagagaaatgcgcgattatacggaaaatgcctatgtcgtgcagacacttgacaagaaaagccttagcgcaacaggaatacagaattgtgatgttgcagttgtgtgtataggtgaacatattgatacgtcaattcttacaacgcttaatcttgtcagtatgggaataaaaaaggttatagcgaaagcaagaggtcttgaacacggagaaatattggctaagcttggggcagaagttgtatatcctgagaaggatatggcagaaagacttgctaaccgtcttatagcttcgcaggttatagatgtcattcaacttagtgagaaaattaatatatctaaggttatgcttcctgacaggcttgagggcaaaacagttgtggatattaatatgcgtaagaaatttaatgttaatataattgcaattgagaataatggggaagttatgcaggttgtaaatccagagtatgtgtttagaaatggggatatattgtatctttcaggtagttcggaagggcttaataagtttggtgagtggataggctagataggacagacaattacattaaatcaacataagcaacaaagacaagcttatgttgatttaatccaacctgacaccttacaggggtgcctttttggcaggagatggttagctaatagaagacatggtcgcctattattgtgccgcctttatcgacagtgctgtcgtagacgtgaaagtacagagcggcgattgttatatgaccattaagaacctcattagcggctctggtacattcagcgttagcacctctggcaaggacaattgcgaaacgtccacttgcgacagggctgaactgggaaggggcgtagagtacggattggattgtgttgccaaatttaggactgtttacacgatttacgataacgcttccaacggcaagcttgccctcataaggctggttggcagcttcacattctatcatagcggataccattgcaaggtcgcttgtatcatatgctataggtgtattattaatgacttcatcaactgatggggtcatttttttgatttcttcaagctgtctttggatttcttcctgacggatacgttcctcgtattccaatgcaagggcttcagctttggcaatattttcagagttagtatctatttttgactgctttgaagctatgagccttttaatattattagactcagctattgactgctcttttaaagacacaagttctgtcatattagtctgtagacttagctggttctggttaagcacagcaataagagaacttaattcttcaagcattttgcggtcatattgggaaatgcgcgaaacatattcgtttctttgcaataaatcagccatacttgaagaagaaagcaatacatcaagaaaactatagtcgctgttctcgtacatatattgtatacgaagcttcatagtatcgaactggtgttgtttctcaatctccatattgcttatgtcttcattaaggctgtcaatctgttcctgtgtatcagcaattctgtcattaatagagttcagcttttcaccagcattatcaagctctgaattaaggtcgttaagttcacttgagagctgcgactgctcatttcttaagcgttcaagttctttgttattatcatcatattctgtcttggtatcagcaagtgaatatacaggtgatgtaacggatatgaaagtcaggcagacaatgagtgccaacgctatgtatttagttactgcattaaaatgtttcaactgcaagttatatcctttctgattctataaatttgatgtcaggagtggctgaaagtcaaaagtcttatcgtgcaggcaagaacaactgtcagacattttatacctgatatcgtattattaatattttttagctataacaccaaaatcttaatatagtataaaatgtgtccacataaattgcaagcagccacaacgggtgttattattaattagcatatcaaattaatggtaatgagatgatgagagttttatcgtggtatactaaattatagaaagaaagaggaattatatgcttgaattaattaatattaagaaagattatgaaaccggtgatacaaaggttgcagctttaaagggcattaacttaaggttcagggactgcgaatttgtatcaatactcggtcagtcgggctgtggtaagacaactatgcttaatattatcggaggacttgataagtatacaagtggtgatttaagaattaatggtgtgtctactaaagattataaggacagggattgggatgcgtacaggaataattcaattggttttgtattccagagctataatcttataccacaccagacagttctttctaatgtagagcttgcacttacattatcaggtgtatcaaaggcagagagaaggaaaagagcagttgaggcacttgagaaggtaggacttggtgaacagattcataagaagcctaaccagatgtcaggtggacaaatgcagagagtagccatagcgagagcacttgtcaataatcctgatattcttcttgcagatgaaccgacaggtgcacttgatacagagacaagtgtacagattatggagcttcttaaggagatttccaaagacaggcttataattatggttacgcataacccggaacttgctatgaaatattcaacaagaattgtaaggcttcttgacggaactattgttgatgactcagatccatatacagaggaacagcttaaaaaagacatagcagagggaacagataagtcaggcacagcaacaaccaatggttcagcatataattcaggcgtgtcaggtcagggaacaagtatatatgtctcaaagactcaaagaaagaaaaagccaaagacctcaatgtcattttttacagcattatctttaagttttaacaatctgatgacgaaaaagacaagaacaattcttacagcctttgcaggaagcataggaattatcggtatagcactcattttatcaatatcaaatggtatccagttatatattgacagggtgcagagggatacattatcaagttatccaattcagttacagtcagaaactgtagatataagtagtatggtttcaagtatgacagataatggcggcagtggtgaaacacatgaggatatggataaaatatatagcaacaatataatgtctgatatgatgaatactatggttgcagaggttcagagcaacaaccttaaggaattcaagcattatatagagaatggtggaagcgatataaaggattatgcgagtgccatagaatatacttatgatattccagttaatatatataagtcagatacatctgataaggtaacacagcttaaccctaatacaatgtttgatgcgatgtatggcggttcttcacagagcagtatgagtggaatgagcatgtactctaattcaagcgtatggtcacagttatttgataataaagagatacttgagtcgcagtatactgtacttgccggacactggccggaaagctataacgaggttgtgcttgttgttaatgagaacaatgaaattgatgattatactttgtattcaataggacttaaagaccctgacgagattacagagatgattaaggctatgatgtcaggaaagagctatactcttgataatgatgaaacaacttacacatttgacgagatattaaatacaacatttaagcttatacttccaactgatgtatattcgtataatgaaagtaatgaaatctgggaagataagtctgataatgatatatttatgaaaaatgttgtcaacaacggaacagatataaagattgcaggaattattaaaccttcagaagaagcagtaagtacatctttaagccgtggaattggttatacaaaggaacttacagaatatattatcaatggtgttaatgacagtgctatagctaaggcacagcttgcagatgaggatacagatatattcacaggtgttccatttgataataataaagatacacctataacaatggatgatgtgcaggcatatcttgagagtattccatcagatgagcaggcacagacaagaatgttcttatcgactatgacagatgagcagatacttgatatgttctcgcagtcagttaaggcacagacaactgatgcgacactggaaactaataaaagcaagcttggaataactgatttggacgatccgtcaggaattaatatatatccatcagattttgactctaaggagcatattcagaacataatatcagattataatacaagccagcagaaagatggcaatgatgaaaatgttatcaactacacagactatgtaggaataataatgtcatcagtaacagttataattaatgctatttcatatgtattaatagcatttgttggaatatcacttatcgtatcttcaataatgataggaattatcacttacatttcagttcttgaaagaactaaggagattggcatacttagaagtataggagcatcaaagaaggatatttcaagaatatttaacgcagagacacttattgaaggctttgttgcaggtgcacttggtataattgtcacacttattttatgtgtgccagctaatgcaattattaaaaatgttacatcgattgccaatgttgcacagcttcctgttgcaggtggagttattcttgttataataagtatgcttcttacgcttattgcaggacttataccggcacgacttgcagcaaagaaagacccggtagttgcattgcgttcggagtagaaacgaggattaatatgagatttacattagatacacatacgcacacaattgcaagcggacacgcatataatacaatagacgagatggcagtatatgctgcaggacatggggttacacatcttgcaataacagaccacgcacctaagatgccgggaagtgcaggtgtattatatttttctaatatgggaataattccaagaaagaaatatggcgttaatatatatatgggctgtgaagttaatattatggattatgacggcagaatagacttatcagagtatggacttaagggctgtgatgtagttatagcaagccttcacattccgtgtattaagccaggaagcattgaacagaatactaaagctttaataaatgctatggataatccatatgttaatataataggacaccctgatgattcaagatacccggttgattatgaacagcttgtaagggcagcgggggaaaagcacgtcttattagaacttaacaatacatcattatcacctacaggaccaagacagggagcatatgataatgatgttacaatgcttaagctttgcaaagaagccggcgtatgtatatctattggaagtgatgcccatattaaagagtcaatatgtgattttgacagggcttataaggtgattgaggaagtaggtttcccgaaggagctgattgtgaacagtaatacagaattatatgagtcatatataggaaaaagacagtaaaattaataaaatgtatttactgtaggactttactgtgttaaactgtacaatatattataaatgcagattagcaaaagttgagggttaatatgaacgataagttaaaatcaaaagaagttgagcaattatttgaggctatattaagtcttaatgatgttaaagagtgctatgatttttttgaggatgtatgcacaattaatgaacttttatctttagctcagagatttgaggtagccaaaatgttaagagaacagaagacatatcttgagatagcggaaaagacaggtgcttcaacagctacaataagcagggtcaaccgttcgcttaattatggcaatgatggatatgacagggtatttgaaagacttggtatattatcagataagcagtaa

SEQ ID NO: 482 - DNA, 30511 bp, unidentified
  source 1..30511: mol_type = unassigned DNA
tatttgccatcagaaaatgctccggcaccgccaaagccattcataatggcacaggttgggcatttgatacaggatttgatattctttccgtcaattggacattttctcttctctaaagtattaccttcctcaaatacggcaacctttagatcaggagctttcttcataagctcataagcagagaatattccgcccggaccagcacctataattattacatcatatttcattaaatattcaccccacaatcgttaatcgtcctaagtattatattataaaagcaggattattaacaagcaaaacaattaagatatgaatattaatcttgaaagtgttgtaaatacaacatattaatgcggaatgaagatgttacaatccagacatactaataatccacatacagataagtgtaattgtggtcttacaagatatacaggtaagagtgactgtaagcttacaagataataaagcagattataatatgatgcacatataagcataatagccagcttatatataaagctgataaattaccagcagatagattgaaaaatataataaaaataatggaggaattatatgaacagggcagaacagattaaaggctatcttaaaagacttggtgatggtgaaagtcttgagaatgttaagaaagattttgttaaggaattcaatgatgtcaatccaatagagattatggaagcggagcaggcgttgatagcagagggaacacctatatcagaggtttcaaagctgtgtgatgttcactcagcattatttcacggtgcgactaaggaagaaagaatagccaaggcggaaaatgaaatatcagagatgaaaaagtactatgatgacacaatgaaaggtatgactaagagtgccattgcagatatgcgtagagacagagaaagcatttttaataaactggctatgataagcggccacccattaaatacttttgtgaaagaaaataaggcaatccagcaggttattgatgatattaaagaaaatattacaagcggacatattgatataaaggcactgaaagagaagatatataagctcagggagttatcaattcattatgccaagaaaggggatttgttatatccggtgcttaatgtacgatataaaatcagcggaccttcggcggttatgtggacagttgatgatgagataagagatgagctgtcagacatagcaaagcagttaaattacgtggacggtaataacagtagcaaagcagacaataataacagtgcggataacaataatggtaaaagtctggacggtaaattaattgaaagaatagaaaatgttataaagagggcagaggagatgatatataaggaagataatatattgtatcctaactgtgccgctaattttacggaagctgagtggattggaatatatcacgattccaaagattatgccgtgtgccttgatacagtatcagacagatgggagaaagcagaagaagtagaaaatgtgtataaacctgaagtgtcagaacaatctgataagaaagaagatgttcagaatgagttatatatggcaggcggacatatgacactttcgcagcttgaggcactgcttaatgcaataccaatggagataacatttgttgatgaagataatatcaacagatattttaatgaagggtcaaaggtatttaaaagacctgttatggcaattgacagggaggtattctcgtgccacccaccaaagattgaggcaaaggtcagaagaattatagaagaattcaggataggaacacttgatgaagtacctgtctggatggataaacaaggaaggactatgcttgttaaatatattgcggtaagggacaagcagggaaattatgttggaactcttgaggcggttcaggatatggaatttgctaaagaacattttgcaaagcttaaataaacgtgtatacaaggtttctctttaaatatagccgataaggacattgacatttctttcacataaaaatataatataatattgtctgaatggaattgattcagcattaagtatattgatatggtagaattatgaagaataacaataatgaactcattgattatatgattaatgattttaaaagtggaattaagcacggagtgcttgttgccaatctgacatatgagcttgcacagatgtgtggtttgtctaaagatgaggcatacgaattaaagattgctgcgatggttcacgatgttggaaagttaaagctttcagaatatctgtatggaagaaccgatgaggcacttccggaagatgagaagcagtatatgagtatgcactcaaagataagctatgatctattgaaaaaatacgattattcagataatataatggatgtcgttctttcacatcatgaatgttttgatggaagcggatatcctaatgggcttgttggtgagcagataccattaggagcaagaatattaaaggttgcagatgaatttgcggcacttatatcagacagaccatataggaaagcatttgatatagacactgctgttacaattatgatagatgagattaagaatatggatatcagagtattccttttattccagaggcttattcacgaagattcgactatagaattgattaataatagcagattagatattgatgatttggatataagtgatatactaaaaatcagtcaggattaggagtaacctaattatgccttagggcaaataaaacaggctgttaatacagctaagaagaatgaggtaattaactatggcagagtcaatggttggcttaaagagaacacacagatgcacagaagtttcaagtgcagatattggcagtacagttacagttatgggctgggttgctaaaagacgtaatcttggttcacttatatttgtggatttaagagacagaagcggtcttttacagattctttttgatgagaatattatcggcaaagaaggatttgacaaggcatatacattaagaaatgaattcgtaatagctgtagtaggtaaggttattaagagaagtggagcagttaatgacaatcttaagaccggtgatattgagattgcggctgaatcattaagaatactttctgagtcagagacacctccatttccaattgaggataatattaatactaaagaagatataagacttaaatatagatgccttgatcttagacgtcctgatattcagtctaatatcattatgagaagcaaggttgccactcttacaagagcatttcttgctaatgaaggtttccttgaaatagagacacctatgcttactaagtcaactccggaaggagcaagagattatcttgtgccaagcagggttcatccaggaaaattctatgcacttccacagtcaccacagctctttaagcagatgcttatgtgctctggatatgacagatatatgcagattgcaagatgtttcagagatgaagatttaagagctgacagacagccggaattcactcagatagatatggaattgtcatttgttgacgttgatgatgtaattgatgttaatgaaagacttttagcatatcttttcaaagaggtattagatattgatgtacagcttccaatccagcgtatgacatggcaggaagctatggatagatttggttctgataagccagatttaagatttggtatggaacttaagaatgttacagacatagtaaagaactgtggtttcggcgtatttacaggggctatcgagaatggtggaactgtaagaggtattaatgccaatggacagggaagtatgcctcgtaagaagattgatgcacttgtcgactttgcaaagggatatggtgcaaagggtcttgcttatatagctattcacgaagatggttcacttaagtcttcattctctaagtttatgactgaggatgagatgaacgcacttgttgaggctatggaaggtaagccgggtgaccttcttttatttgctgctgaccgcaataagattgtatggaatgtacttggagcattaagagttgaacttgctggacagatgggacttcttgataagaatgattataagttcctctgggtaacagaattcccacagtttgagtggtcagatgaagaagagagattcgtagctatgcatcatccatttactatgcctatggatgaggatcttgataagcttgagtcagacccaggttcagtacgtgccaaggcttatgatattgtacttaacggtacagagataggtggtggttcagtaagaatccatcaggctgatgtacagtcaagaatgtttaaggcacttggtcttacagatgaagttgctaatgagaagtttggtttcttacttgatgcgttcaagtacggagtaccaccacacgctggtcttgcatatggtcttgacagacttgttatgcttatggctaagagagattcaataagagatgttattgcatttcctaaggtaaaggatgcttcctgccttcttactaatgcaccagatgtagtagatgcaaaacagcttgaagacttatctatcagaattacagagtcagaacaggaataatattttaagagcatttgaaagtatttaatggatattttcaaatgctttttttaactatatttttagacaatactttgtgaaatctggatgaaaataatggctttatcagcttttttttagcaaaaatattgcatttgaataatcatgggtatatactttttttataaatctttgcaaaactataacaaaagactggagaaaaattatgacagagaatcagtatataagggcaaacaggactgttttatttacagttctcatagtatttggttatattgcgctgaccctgatggcagcattaggagtgggtgacggacataacaaaggaaagattttaatacagtttgttgtggcacttgctgtaattattgtatcagtagctgcttatattttaaggaagaagaccagagtgtgtgaattaacgattgcggtatcaatggcatttggatatgttgttcttatactgcttaattcaactgatggtgtatggacatatgtacttcctttgattatggcttcgatggtatatcttaatgaaaaactaatattgtgggctgatggcgttgcgatagctggtaatgtcataagacttattatggattataatatgtataatggagtggctatggcaagcagggttcttgctatattagtattggttattgttacatgtatatctcttagtgtaacaaagctgcttaagcagttttttgcagagaatatgaataagatagaggcagcagcagttatacagaaagagaataacgagaagatggttgttgtagctgataatataaccagacatttcggacaggctatggatatgcttgatgagttagaaaagagcatagatataaaccacaattcaatgaaagatatagcagaaagcacagaaagcacagcagaagccatacaaagacaggccactatgtgtgcagagattcaagaaaacactgatattgctgaaaaagagataagcgagatggttgaggcctcacacagaacagatgagactgttaatgatagtaaggctatagtagttgaacttaaggaacaggcacagaatgtacatgatgcaagcaatataatcgtagatgtgattaacagtcttacagaaaaggttgatgatgtacagggatttattggttctatcgtagagatttcaagccagactaaccttcttgcattaaatgcttcaatagaagcagcaagagcaggagaagccggaaagggtttcgcagtagtagccgaagagataagacagctctcagaacagactaagaatgcatcttcaagcataacagatataatcaataatctttatgaagatacgaagaaagctaatgagagcataaaagcgtcagttgagtcagttaataagcagaatgaacttattgataatacaagagtgacttttgaggacgtaggaaaaacagttgataatcttatgaacaatatacattctgcagagcagagcattaacaagatactggattcaacttctgttatttctgataatatttcacatttatcagcaacaggagaagaggtagcagctgcttcaactgaaggcctaaaagtatctgacacaacagttgaaagtatgaagaactgtaagaatatattacataacatatatcttcttgcagaggatttaaagagttcagtagataactaaatggattgtaagagattaagcagattacaatgtattgcaagactagcagttgattattataagttgtaattaataatataatcaggatggttttgcagggttattaatatttataagacaacagtatgtttattataaggagtgcaaatgacattttatgtctgcattatttataaaagacagctgttgtttttttatgtaatagggaatttcgatagaatttcctatacataaaaggtgctatgtgccgatgatgcacacttgcacgaagatgtaggttgtcgcaagcgacagtgcttagtgtgagaaggtgcttcatatattttatttatataggaatattttatgcttgacttgaagttaactctaaatgctattatcaaaatgtagagttaataatcaggtttaattaataattatatgaggtgattaattatgagaagaaataatattagaaaaacagaggcacttataatggcatttgcattatcagcaagcctgttgttaacaagttgtggcaaccaaaatactaatggtgacagtgttaatgaaaataatagtacaacagacgaagctggaattaatcacgattatccggtaatgttgttctcttatgataagaatgatactaattatgaagaaccagaagcgtttaattcagaacatcttggcggcaattatggtgagattgagaagatagaatattattctccaactactaatgctacaagaaatgccaatgtgtatcttccatatggatatgataagagtaaaagctatcctgtagtatatcttcttcacggaatgagtggaacatatgaagattacagggttcttggtgcaagaccaacagcacagaatattgtgtatgaatacaaccgcaacgatatgatattagtaagctttactgtatttacggatgttgacggaaagcaggaatctgattatggattttcggatttaactgcaagatatgatgcctgtgaaaatgatgtgattaatgctcttattccatatattaattcgcattattcaactaagataggcagggaatacacaggaattgcgggatattcattaggtggacgggaagctctttatttatgctttgcacaccctgatatatttgggtatgtaggtgcatttgagcctgttggaggagttgttaatacaggaagcggtgaaacattatatggcaacaggggatatcttcttcctgagcttgttaaggaaagcggggaagcaccacttcttacacttatagtaacaggtgatgaagatccatattgcagggtatcatcagagaattattcaagatatatgacagaacattcaattgaccatatattctattacagacacggcggacacgaggcaggtgtatggaataatggcttatataactttctaaggcggatattctaatgaagattgtattaaataacttaattattgtacaaatgtataattatacattgacttattgataaataatctataaaattaatagtcaaacaggttgtataactacaactatagaaaatggaggttgtaatatgtattcatttgatgaagtattgaactatgatccagaattagctaaagctatggatgatgagttagcaagacagagaagccatattgaattaatagcttctgagaaccttgtaagtaaagctgttatggcagctatgggaagccctcttactaacaagtatgcagaaggatatcctggaaagagatattatggtggctgcgaatatgtagatgttgttgaaacacttgcaattgagagagctaagaagttatttggttgtgaatatgccaatgttcagccacattcaggtgcacaggctaaccttgcagcattctttgctatggtagaaccaggtgatactgttatgggtatgagccttgactgtggtggacacctttcacatggttcaccagttaatatctctggtaaatattttaatatagttccttatggagttacagctgaaggctttatagattatgatgaagtattaagaattgctaaggaatgtaagccaaagatgatcattgctggtgcatctgcatatgcaagagttattgattttaagaagttcagagagatagctgatgaagttggtgcttatcttatggtagatatggctcatattgctggtcttgtagcaggtggagagcatccaagccctatcccttatgctgatgtagttacaactacaactcataaaacattaagaggaccaagaggtggtatgattctttcatcagcagaagctgctgaaaagtttaagtttaacaaggctgtattcccaggaatccagggaggtccacttatgcatgttattgctggtaaggcagtatgcttaaaggaagcacttgacccaagctttaagacttatgctaagaacattgttgataatgcacaggctctttgtacaggacttatgaacagaggttttgatatcgtatctggtggtacagataatcaccttatgcttgttaaccttttaagcaagaataagactggtaaggaagtagaaaagcttcttgatgcagctaacattacatgcaacaagaacactatccctaacgatccagcttcacctttcgtaacaagtggtatcagacttggtacagcagcagttacaacaagaggcttcaacacagcagatatggatgtagtagcagaagctattgctttacttgtagatgacgttgatgctaatcaggctaaggctatggctatggttaaggaacttacagacaagtatcctctttatgaataatgctggaatatataagaaatgaacttctggggatgactgataaaggagaatatgcagcatttacatcctcacttattcctggctgcgataatataataggaataagacaaccggtattaaagcaatatgcaaaacagctgataaaggagaataaggatttccggcagctgcttagtgaaccggatatttatcaggaagaaacactgcttagaagctacataataggaatgggaacagcgaaggagaaagactttaagaaggctttaaaagacttcaacacattcgttcctcttgtgaacaactgggctgtaaacgacagcttctgtgtagaattcagggttatggatatgtttcgggacgagtttctgccatacataaaggaatgtatagaatcgtttgatgaatacagggcaagagtagggcttataatgctgttagaccactatttaaaggttgatatgcatggcatgaaaagaccgagaatgaaaaaggttactattaaagatatagaaagcacagatgaaataaattgtgctaatggtttatatcttgatgatatattttcacttgtaaacagggatttttcggcctatggatattatacacagatggcagcaggctggcttcttgcggaatgttttgttacatttccaaaaagaacgtgggaatatcttacagataccgactgcttaaagttagataagttgtcatatcagaaggcggtacgaaagatatgtgaatcgctcacgccggataaagaagttaaactaaaagttaaaaaggatctgaagcagatgtaataatctgtttcaggtctttttttattgctttagtatattttaataatttgaatatcaaaataaccttgacaaacacataagttttgtagtataaaaataatgtttgaaaatcaaagtaagataatcaaattgttagtaagtcaaataaataaggacaaaaaagtatgataagaacaagaatcataggaacaggaagctatgttccaccagatatattgactaacgataatctgtcagaaatggtagatacgagtgatgagtggataaggacaagaactggtatatgtaacagacatatagcaaaagatatggataatgctgatatggcatataacgctgcaagaaatgcagtagaggatgcacgtattgaagcttctaagattggtctgattatagttgcaacgtcaactcctgattatgcttttcctaatcaggcatcacttgtacaggcaaagcttaaagcagtaaatgctatgtgttttgatgtaagtgcagcatgttcaggttttattacagccctggatattgcagcttcaatgttaaaggcaggttcgtataaatatgcacttgttattggttcagaaaaaatgtcagaaatagttaactggaaagacagaagtgtgtgtgtgctttttggagatggtgctggtgcagtggttcttaaagcagttgataacaacacagaagatgttacaggtgccttagttggtcatgaaagaggaattattgacagcaatatctacaatgatggaacaggtgcatctgttttaacaggtggcagaagattttctgattcatgcagcacagatatatttatacatatggatggacaggaagtgtttaaattcgccgtaaagagtgttcctacagctatagaaacacttttacataataataatatggatattaatgaagttgataagttcatattgcatcaggctaatgtacgtattatagagagtgtagctaaaagacttaaggctgataaagataagtttccagtcaatctgaatgaatatggaaatacatcatcagcaagcattcctattctgcttgatgagttaaacaggaatggaagcttaaaacagggagagaagcttgtacttgccggttttggtgcaggattaagctggggaagtattctgcttgtatggtagcacggttaaagatgctaagcttattatatagatatttgcagactgcttactaaaagatatcaggcagccggataagcggcattttaacatatataagatgtttatggcaaaagctttgccatagatatcaaagttgtgggcttttgaccccgacaacatataataaaaaataataagaattaaggagatttaacattatgtttgaaaaagtaagagaattagttgcagcacagttaggtatagatgaggcagttattaagcctgagtctaatttcaaggaagatcttaaggcagattcacttgatctttttgaacttgttatgtcacttgaggatgagtgttcagtaactattccatctgaggagcttgaaaagattcttacagtacaggatgttgttgattatatcgaggctaaccagaaatagttataaatgtcaggaaggaagataagttatgaaaactcgtgtaacagagcttcttaatatagaatatcctgttatacagggcggtatggcatgggttgcagatgctaatctggcagcccacgtcagcaaagccggtggaatgggatttattggagcagctaatgcgccggcagaatgggttaaagaacagatacatattgcaagaaagataacagataagccagttggtgttaatattatgcttttaagtgattatgcagatgagatagcacagcttgttattgatgagcatatagaagcagtaacaacaggtgcaggcaatccaagcaaatatatgaaggcctggaaggaagctggaataagggttattcctgttgtggcatcagttgcacttgcaagaatgatggaacgtgccggagcagatgcagttgtagcagagggcatggaatcaggtggacatatcggcgaggaaacgaccatgacacttgtaccacaggttgttgatgcagttaatattcctgttatagcagctggcggaataggtgatggcagaggtgtatgtgcggcatttatgcttggtgcagaggctgtacagatgggaacaagattcgttgtggctaaggagtcaaatgtccatcagaattataaggacagagttatagctgccaaggatatagattcagtagtaactggcagaagtacaggtcatccagtaaggtcacttagaaacagcatgacaagagagtatcttgatatggaaaaagaaggcgttgagtttgaaaagcttgaaagacttactcttggaacactaagaaaggctgttgtggatggtgatgtcaagcagggaactgtaatggcaggtcagatagcaggtcttgtcaataaggaacagacatgtgaagagattattaaggagcttatgaaggaagtctctgaggtatataattcacataataagctggcataaaacagtgtatggaaatgaggatttaaaaggtatgggaaaaacagttgtaatgtttccaggacagggaagccagcgtactggaatgggaagagaaagctataatagctgcacttcatcagtaaagtgctttaagaaggctggtgaactgacaggtatcaatatggagcatttaatatttgaagaaaatgatcttcttgataaaaccgagtatacacagattgcgttatatgtaacagaaatcgcccagcttgctgatatggttgagcagggccttacgtatgatgcagctattggactttcattaggtgaatatagtgcacttactgcaagtggtgcgctatcttatgaagatggtgtaagacttgtaagaaaccgtggaatatatatggaacaggaggttccggctggtataggcgccatggctgcagttatcgggcttacatcagatgaggttgacagtgtacttgctaaatataacaaggataaaagtgggaacacagagtctgataatgatatgtatcctgatacagtttccgcagctaattacaactgccctggccagatagtaatatcaggtaaaaaggaatgtgtacaggaggctatggaagtgcttaaggaagcaggagcaagaagaacactccttcttaatgtaagtggaccgtttcattcaaagcttcttaagggcgcaggtgataagcttatgaaggatcttgaaaaagttacttttgataaagtgaagtatccttatgtggcaaactgtacagctgagtatgtggatgagaatacatccagtggatatataaaagaacttctttcaaagcaggtatatagttcagtacgttttgaacagtcagtcagaaaaatgatagccgatggttatgatacatttgttgaggtgggactaggaaagactttatctggctttgttaaaaagatagctaagagcatggaaaaggaagtagttataaaataacaggcaataaatgcagacaagatattggtaaggctttagcaatattgtatcgatgaaaggcagtgtgttatgtgtatggataattgtataaaaagatatgaaaacaagatagtgcttgtaaccggagctagcagaggaataggagctgctatagctgcccgttttgccaaagagggggctgtggttattgttaattacagtggtaatgatgaggcagcagatagaacagttgaaaatattctggctgccaacggaaaggcagaaaaatacaagtgtcaggttgattcgtatgaagaaactgaaaaaatgattacatatataatggataaatataagagaatagacattcttataaataatgcaggtataacaaaagatggtcttatcatgagaatgaaagaggaagattttgacagagttatagatgttaatcttaagggaacatttaactgcataagacacgtaagcagatacatgttaaagcaaagaagcggaagaataatcaatatgtcatcagttgtaggcatagctggtaatgcaggacaggttaattacagtgcttctaaagcaggtgtgataggtattaccaaatctgcggcaaaggagcttgcatcgcgaggaataactgttaatgcagttgcacctggatatattgatacagatatgacaaaggttttatctgatgaacagaagaagtcagtacttgatatgattcctctttcaagaatgggaagcgtggatgatataagcaatgctgtagcatttctggcatcagatgaagcagcatacataacaggacaggtgatatcagtagatggaggtatgaatatctgatgagaagagtagttgttacaggtatgggtgcaataacacctataggtttaagtgtggatgaattctggaattctgttaaagagaatacagttggaatagataatataacaagatttgatacaacagattataaggttaagcttgcagcagaggtaaaggattttgatgctaagaattatatggatttcaaggcagccaaaaggatggaaaagttcagccagtatgctgttgcggccgcgcatgaggctatgaaggattcggggcttgatatggctaaagaggatgctttccgtgttggtgtatcagtaggctctggtgttggaagccttgaagctatggaaagcaatcacaagaagcttcttgaaaagggtccatctaggattaatccgcttcttgtacctcttatgataactaacatggcagctggcaatgtatcaatacagctaggtttaaagggtaagaatataaatgttgttacagcatgtgctactggaactaactctataggtgaaggctatagaagcatacagcatggagaagcagatgttatgtttgcaggtggaactgaaagttctatatctcctattggaatcggtggttttgctgcgcttacagcactttcaacatctacagaccctaagagagcctctatcccatttgacaaagaaagaaatggctttgtcatgggtgaaggagcaggtgtggttgtacttgaagaactggagcatgctttaaagagaggagcgcatatatatgcagagatcacaggctatggctgttcttctgatgcataccatataacatcacctatggaggatggaagtggagctgcatatgctatgacaagtgccatgaaggaagcagaagtaaaaccagatgatatcgattatataaatgcacatggaacaagtacccatcataatgatctttttgagacaagggcgatcaagctggcacttaaggatgcagcttacaatgtgcctgtaagttcaacaaaatccatggttggacatctgcttggtgcagcgggcgcagttgagttcatagcctgtgtcaagtcaatccaggatggttatatacatccaaatgtaggactatcagaaacagaggaagaaatggatcttaattatgtcaaggatgaaggaatcgaaaaggacgttgatgtagtcatgacgaattctcttggttttggtggacataatgcaactcttatagtaagaaagtattcataatatgatgaacgcttaaagtacataagtagattgctggtgagatatatggaataccagaatatgaataaaaggtcatgaagaaatggagataatatatggaattagaaaatgtaataaagctcattaatgctgtatcagaatcttcacttacaagctttagcatggaagatggcgacactaagctttcgcttggcgctgacagaagtgacagggcagctgttaaagaaactgccggtgctgatgatatagttaatagcgataacggcaatgaatcaggattgaataaatcggacattaaaacttctgatgataatgtgcttactgttaattcaccacttgtaggtgtattttacagttcagcatctccggaagctgatgcatatgtagcaataggtgacagggttaaaaaaggtcaggtaatcggtatagtagaagcaatgaagcttatgaatgagattgaaagtgattatgatggtgtggttactgatattcttgtagataatgaacagatggttgaatatggacagcctatgtttgttataaaaccagtctgacaatacgtcggtatcaaaggcatgggtttttgataccgacattatatatatgaaattcgattatttaatataaggagttaagtatgcttacaacaaaggaaataatggatattataccacacagacatccttttctgcttgtggatacgatagatgaacttgagcctggaataaaggcaacaggatataagtgtattacatatgatgagccttattttgcaggacattttccagctgagcctgttatgccgggggtccttcagatagaggcatgcgcacaggtaggcgctgttgcgatactttcgctggaagaaaacaaaggtaaaacagcatattttggtgcagttaataatgcaagatttaaaagaaaagtagttcctggtgataaacttaagatggaatgtgagattataaagaaaaaaggaccagttggcgtgggaaaggctgttgcgacggtagatggcgaggttgcacttacagcagagcttacatttatggtaggttaatccgtctgatgttataaatataatatgtggattatggaatgattataaggagatgaagctgtgtttaataagatattgatagcgaacagaggcgaaatagctgttagaataataagagcctgtagggaaatgggtatacagacagttgcagtatattctgaggcggataaggaagcacttcatacgcagctggctgatgagagtgtatgtataggaaaggcagcagctaaggatagttaccttaatatggaaagaatattgagtgcaacagtagctacacatgcagatgcaatacatccaggctttggatttctttctgaaaacagtaagtttgcatcattatgtgaaaaatgtaacatcacatttataggtccagattcagatatcatagagaaaacaggtaataaacaggaagcaagaaatacaatgatatcagcaggtattccagttattccaggaaccaaagaaccagttatggatgcagaaagaggaaaagagcttgcagacaatataggttatcctgttatggttaaagctgcacttggcggcggtggcaaggggatgcgtgttgtatatacaaaagaagattttaaaagggaattcgataacgcacagagagaagctgtgaatggctttgctgatggcacaatgtatatagaaaaatatatagaaaagccaagacatatagagttccagatattagctgataaatatggaaatacaattcatcttggtgaaagagattgttcaatacaaagaaatcaccagaagttagttgaggaatcaccctctcctgcgttgaatgatgaattaagaaagagaatgggagatactgcagtggcagtggctaaggcagttaactatgaaaatgcaggaacagttgagtttcttcttgacaaaaacgacaattattactttatggaggtaaatacccgtattcaggtcgagcatggtataacggaacttgtgacaggtgttgatcttataaaggaacagataaagatagcagccggcgaaagtcttggtattaagcaggaggatgtaaggatacatggtgctgccatggaaataagaatcaatgctgaaaaccctgaaaagaactttgcacctaatccgggaacaataaagaatatacatataccaggtggtaatggtgtaagaatagatactgcagtttatagtggatatacgatacctcctttttatgattccatgataatgaaggttatgacatatgcaaacgacaggaaaacagtgattgagaagatgagaagtgtccttggcgagattattattgaaggtgtcacaacaaatacagattttatgtatgatatatgccagaatgagaagtttattaaaggtgatgtcagtacagatttcataccagaggagtatccacaggtatgtaaaaaatagttgttcgttatgcacagtaagagtgcgtggaaatgaggatttatatgcagataaaaggcttgtttaaaaagaatatccataaaaataaaatcaacaatctggatagcagtaatataaatgttccagatggattatatacgaaatgtccggtttgttcaaaaataattttaacagaggacatgtatctgaataattgtgtatgtccggaatgtggatattatatgaagctggatgccagaacaaggatatccatggtagtggataagaatacattttcagaatgggatactaacattgaagagagcaatccatgtgaatacccaggttatgaggagaaaatccagaatcttaaaagaaaaacaaatcttgatgaggcagtaataaccggtgttggaaagatagatggcagcaaagctgttataggtgtctgtgatacaagatttcttatgggcagcatgggcgaagttgtaggtgaaaagcttacacgggcagttgagaaggctacagagcagaagctgccggttattatatttacatgctcaggcggagccaggatgcaggagggaatagtatctcttatgcagatggcaaagataagtgccgcattaaaaaaacatgatgaggcaggacttttatatatcactgttcttactgaccctacaactggaggtgtaactgcaagctttgctatgcttggagatattatacttgcagagccaggtgcccttataggttttgcaggaccaagagttatcagacagactataggacaggaactgccagaagggtttcagagagctgaatttctgttagagcacggctttgtggatgcgatagttaaaagggatgagctaaagaagacacttgcgcatctgcttgacatacataagtacagtggagcttatacagaagttaaagaaaatgtggatacataccggagcaattcagatattatgaagaagtatcttgagtatcttgataatatatatttcaaaaagatagatagagaagaagaaaaaaaggctgaggctgataataatctgtataatgagtatgatgtatgggaaaaggttgaaatagcaagaagcagtgaaagacctaatgccgcagattacatagaaaaaataactaaagatttttttgaacttcatggtgacagaaacttttgtgatgataaagcaataataggtggaatcgcaacatttggcggcattcctgtaacagtcataggacatatgaagggtaagactactaaagagaatatatcaagaaactttggaatgcctaatcccgaagggtatagaaaggcactaaggcttatgaagcaggctgaaaaatttaacagaccggttatatgttttatagacactccaggagcatattgcggtcttggtgcagaagagcgaggccagggagaagctatagcaaagaatctgtatgaaatgagcagtcttacagttccggtattgtcaatagtaactggcgaaggtggaagcggtggtgcacttgcactaggtgttgccaatgaggtatggatgatggagaattccatatattcaatactttcaccagaaggctttgcatcgatactgtggaaggattctaagaaagcaaaagaggctgcggaaataatgaagctgacggcagcagatttatatgagcttggcataatagagaaggtcattccggaatatccggttataaatgaaaataatataaaaagagtgacattatatatgaaacgcatgatatgtgattttatgtacagatatattgatatggacaaggaagaacttgcaagacagcggtataacagattcaggaaaatgtaagaaagcactaaatctattacatttttttatggttgtattaatataattgtgttaatatgattatgttaatgtgattgttttaatgtgattgcgtaggaagattacggaattgttatatctaaacagaaagaaggaatatatatgtcatatggatacagacaatacagggatactgctcatagatggacacagataggtgttggtttaatatctgtaatagcaggtcttatacttattgtatgtgtaacggcacctatgtatgtctcaagcatgttaaaggatgcaggactgtcagctgctatatcgcaccgttttatggatactgtttttgattcacttggggataatatggaggcgttatccagaattcagacaagtatagaggattctaagatagtagacagaatagcacagaaatatacaacggctatggttgacgggatgcttaaagaaaaatcctttgatgatatagagattaatatagatgcagagctggatgagcttatggatatgacatataacaaaatagcatctaatatcaatatgggaaatatacaggaaacaatagtcagggcagctcttagctatagtaaaaatgctgcaaatgaggctataaataattatgccagtggtatatatggtgatatatcttatcgtctgcagccgcttataaaggtatatggaataataacgtctgttgtgtttaagatattgatgcttttaatatatatcacattattgattgttatcattgcatttaatcctgtcagggttgtaaggtacacactcccatgtatatttgtcataacaggtggtatatatatttttattgcaaatataattggaaacagatgtatggcggctgtaagtaacagatatctaggaagaactgtgtttatagatactcagattgcttatagggttatgggtgttatgtgtatactggcagcagcttcttatgttattactttgatatatggaatggttgtgaaaaacaggagaaaaagaatatagaaatatctgagattaatgtttgataagagtttattagagtttataagagcttataaaaactcataaaacattataaaagatgaaaaatggagctgctacatatatatgtggcagctcctgattttgttttataatacttgttatataatattttttaaagtattatttgttattcttcttttcgttctcaagcttcttcatagctcttaccttaagtgaaagaccaaagaggttgatgaaaccatcagcatcatggtggtcataaaggtctccagttgtgaatgaagcgatagattcgttatataatgaatatggagatgttgtaccagctttgatgatgttgcccttgtaaagcttgaacttaacttcaccagttacgtattcctgtgtcttttcgacaaatgcctgaagtgcttcacgaagaggtgtttcccactttccttcgtatacaacctgagcgaacttgttagcaacattaatcttctctgctgttgtatccctgtcaagaactaattcttcaagctgctgatgtgcttcgtaaagaatagttccaccaggtgtttcatatacaccacgtgacttcataccaacaacacggttctcaacaatatcaattataccaatgccgtgcttgccgccaagtctgttaagttctctgatgatatcagaaaccttcatcttcttgccgttaacagatgtaggaacacccttttcaaatgtcattgttacatattcgccttcatctggagcttcttctggtgtgcatccaagaacaagaaggtgcttatagttaggctcattagctggatcttcaagctcaagaccttcgtggcttatatgccagatgttacggtcacggctgtagcttgagtcagggctgaatggaaggtgaataccgtgctgtctgcaatattcgatttcatcttcacgagactgtaatgtccatcttgaatctctccaaggagcgataatctggatatctggagctaaagccttgattgtaagctcaaatctgatctggtcattacccttacctgtagcaccatggcagatagcaacagcaccttctttacgggcaatttcaacaagtcttttggcaatgataggtcttgccattgatgtaccaagtaaatatttattttcataaactgcgtgagcctgtacacatggaacgatgtagttatcgcagaattcatctgtgatgtcttcgatatataacttagcagctccacaagataaagctctttcttcaagtccgtctaattcctcttcctgaccgcaatctgcacatacacagataacatcatagtcgaaagtttcctttaaccaaggaatgattgctgtagtatcaagaccacctgaataagcaagaacaactttctctttcattattaatgtacctccatataattaagtaataggtttaattatgtaataaatattatgtagtaaataatgctattacaaagtgtaaaactctgctgattataataaactacttattatgaaaatgcaataggtaaaaatgtatattatgcaattttatgcaagaatattgcataaatataaaaaataatgaataaacactttacatagaaaaaaaagttgttataatggaacttgtcatttttattgatgaataatatatgtacacgaatgaataaataaacattcagatggaggacgtatggttaaggttggaattatcggagctaccggatatgcaggtaacgaattagtaagacttcttcttggacataaggatgtagagattgtatggcttggttcacgaagctatatagatcagaaatattcagatgtatacagaaatatgtttaaacttgtagatgccagatgtatggatgataatatggaacagcttgcagatgaggttgatgtaatatttacggcaacaccacagggcttatgtgcatcacttgttaacgatgagattttatcaaaggtaaagataatagaccttagtgcagactttagattaaagaatgtagatatatatgagaaatggtataagcttgaacataagtcaccacaatatattgatgaagcagtctatggtttatgtgagattaacagggataaagtgaataataatacaagaattattgctaacccgggatgttacactacaacatcaattcttacattatatccacttgtaaaagaaggaattattaatccagatacaataatcattgatgctaagagcggaacaagcggtgcaggcaggggtgcaaaggttgctaatcttttctgtgaagttaatgagagtatgaaagcatatggtgttggtacacacagacacacaccagagatagaagaacagcttggatatgcttgtggaagagatgatttaaagcttatatttacaccacatttagttccaatgaacagaggaatacttgtgacagcatatgctaatcttgcaaaggatgtaacttatgaagatgttaaggcggcatatgataaatattatgacaaggaatattttgtaagagttcttcctaaggatgtatgcccagagacaagatgggttgagggaagtaactttgtagatataggatttaagatagagccaagaactaacagaattattgctatgggtgcattagataaccttgttaagggtgcggctggtcaggcagtacagaatatgaatcttttattcggttttgaggagaatgaaggacttaagattgcacctatgtttccatagaattatataatacaggcggcactataaatattttattcatataagattaataagacgttattggtaagtaataatcctgatagataattattatataggtaatttaataacaagcggttattaatctggacaggaggcagttatgcagattatagaaggtggagttacagcagccaagggatttaaggcagctggtatggcggcaggaattaagtataagaatggtaagaaagatatggcaatggttgtttcagacaagccttgcgtgacagcagggacatttactcttaacagagtatttgccgctcctgttaaatgggataagaatattgtatacaatgaagcttatgcacaggcaattgtagtcaacagtggtgttgctaatgcctgtactggtgttgagggtgatgaagcctgtgcacttgaagctaagacagctggagaggcacttggaattccagctgatgcagtgcttcttggttcaacaggtgttattggaatgcagcttcctatggatagaatgtgtgcaggaattaaggcacttccggaacttcttgattatactaaagaggctggaacacttgccgcagaggcaattatgacaactgatactgtaagcaagcaggttgcctgcacagtaaatattgctggcaaagaagtaacggtaggcggtatgtgcaagggtgccggtatgattcatcctcatatggctacaatgctctgttttattacaactgatgcagttatagagaagaaagcacttcagaagatgacaagtgatattgttgaagattcatttaatatgatatctgttgacggagatacatcaactaatgatacagtgcttgttcttgctaatggcgaagcaggcaatgatactattaaggaaggcagcagtgattatgatacattttatgaggcattatcttatgtacttacagagctttctaagaaaatagcaggagatggtgaaggctgtacatgtctttttgaagttcaggttaagggagcttcaactaaggaacaggcaagaattcttgccaaatcaatagtgacttctaatcttacaaaggcggcaatatttggacacgatgctaactggggaagaattctttgtgctatgggttattcaggcgttgatttcgagccggagaaggttgatatattctttgaaagcaacgcaggaaagcttcagatagttaaagatggtactgcaacagattacagcgaagaaaaggcaactgaaattctttcacaaaatcctgtaaccgcaatagcagatattaagcagggtaacagtgaagctacagcgtggggctgtgaccttacatttgattacataaagattaatgctgattacagatcataatagttaagaataaaatggcattgtaatattgtcaggaatgaggataataaatgagtacaattaatatggaagaagagttaaagaaggcacaggtgcttgttgaagcactcccatatatacagaagttcaacagaaagattatagttgtaaaatatggtggaagtgcaatggttgatgaagaacttaaaagaaaagttattcaggacgtagtattattaaaggttgttggatttaagccaattattgtacacggcggcggcaaggaaatcagcaaatgggttgaaaagtctggaatgacaccggaatttaagaatggtttaagagttacagacgagccaactatggaaattgctgagatggttcttaacaaggttaataaaagccttgtatcgcttatagaggaacttggcgtaaaggcgtgtggtataagtggtaaagatggcggtatgctaaaggtggaaaagaagtattcaaagggtgaagatataggatatgtaggtgaagtcaaggaagttgatacaacacttatacattctcttcttaaggatgattttcttccagtaatatgccctataggatatgatgacaatttccacgcttacaatattaatgctgatgatgcagcttgtgccattgcaagggcagttaatgcagagaagcttgcattcttaacagatattgaaggtgtatacaaggattataatgataaatcaagccttatctcagaactttcaacaactgaggcaaggcaattattagcaggtggtacaataggtggtggtatgttacctaagcttaataactgtattgatgcgattgaacacggtgtttcaagagtgcatatacttgacggtcgtattccacactgcctccttcttgaaatatttactaacaagggtgttggtacagctatattatcagaaggtgctgagaaattcttcgatactaatatataataacaggagtagttatgcagacagaacagattattaaaacagcagaagaaaagttaatacatacatataacagataccagattgtacttgataaaggtgatggtgtaagattatatgatacagacggaaaagaatatcttgattttggtgcaggtattgcggtatttgcattaggttataataacaaggaatataatgatgcgttaaaggcacagattgacaagcttatacatacatctaattatttctataatgagccagcggtaaatgctgctaaagcacttacaaaggcttctggaatggacagggtattctttactaacagtggtacagaatcaatagagggtgctataaagcttgcaaagaaatacgcttatttaaagacaggaagaacagattcagagattatagcaatgcatcattccttccatggcagaagtatgggagcattagctgtaacaggcaataagcattatcaggaagcgttcggacctatgattccgggaattaaatttgctaattataatgaccttgaaagtgttaaacagttggtaaatgataaaacttgtgctattatatttgaaacagtacagggtgagggaggaatatatcctgcaactaacgaattcatcaagggtgtaagacagctttgcgatgaaaagggtattcttcttatacttgatgaaatacagtgtggaatgggaagaacaggtacaatgtttgcattccagcagtatggagttgagcctgatattcttactgttgccaaggcacttggctgtggtgttccagtaggtgcatttcttgccaaggaagaagttgccaaggcacttgtaccaggagatcacggtacaacttatggcggtaatccacttgcgtgtgcagcagcaacaaaagtatttgaattatttgagaaacagcatatattggataatgtcaaggaagtatcagcatatcttgaagaaaagcttgatgaacttgtagcagaatatgattttataattgagaggagaggacttggacttatgcagggacttgaactttcaatcaatcctaaagatgttattgctaatgcattagacaatggacttatactgttctcagccggaactaatgttatcagaatggtgccacctcttgttataactaaggcggacgtagatgaaatgataacaaagttaaagaaatcattttaataaaggttggatgaataatgaaagtaattaagaagcttgtgtcagttcttatggcaggtgttcttactttatctgtgatggcatgttcaggtacagataagaataagacagcaagggaacttgatatagagactcctgtaacagttaatgtctggtatgataataaggactatgacagctatcttgaaaatgtagcgaaagaatttaaagaggctaacaatctggttactgtcaatccggtatatgttgagtcatcagattttgttgatacaatttacaatgaaactgtaagaaatgataatgtgccagatgtgtatcttatgtcatcagagaattgcaataaggcatatcttttaggtcttatgcttgaaaatgattcttacaaggatgtatacaatgataaagtatatggacaggctgcccttatagcaagctcatataatgaaaagttatatggctatccggttacatttaatatgccggttatggtgtataacagtaagcttgcaggtgcagttgatacatttgatgagataaaagaatataatgataactacgaagttacagaagataataaaagtgttcagaggatatttaactttgatgcatcatcaatgtttcttaattatacatttacaggaagatacgttaatataggcggcaataatgctgaggattcaggagcatttgcaatagatgaggtgcattttaaaaaggctttaactgaatatgtgaagttaaaggacacttatgcgattgatagatataattcatcattgcagtcgtgtgtatcacagtttgcagagggaaagcttatatatacaatagttgatgccgacagcctttcaacaattgatgcttcaggtgttgaatatggaataattccagttccaaagcttgcagatgatttagagtcaaaggcaatgtcagttactacgatggcgatagtaaatccatacacatcaaatattgcggtatccaaggcagtagcaagggcaatatcatatgactatgcagaggatttggaaagtcttagcggacatatgagtgcaagggcagacataagctataaatcaaagacccagcagagcaattacaatacactgcacacaatatatgctaacagcatcgtaaaagccaaatatgtaggcgtaggcaacatatatacaaaatatgagattatgcttcaccagttatgggacggagtggattttaacagtgcatataatgagttttacaaagaaatctccaattatatgacactatcaaggcttaataattaaatatggaataatacattagtgtggataaaaatgtaatttactccaatatcagtgaataaaatcctgctatcagtaaatactttattaacaatagagattgttaaaggaggttgtctgatggcaggatttattgttgcaataatctcaggtgcgttaatgagcctgcaaggtgtacttaatacgaatgttacaaaagcgagcagtatatgggtggcggcaggcttcgtgcagtttacagcacttgcaacctgcattataatgtggctgtttaacggaagacctgatattagtggaatatttcaggtagagaataaaatatcattattaggcggtgtgataggagcattcataaccttcaccgtagtaaaaagtgtatccgacctaggtgtagccaaagccgaagtcacaatagtagtagcacaggtaatagtagcctatataatagaacttatgggcttatttggaagcaaaaaagccgacttctcgtggctcaaactcttagccctgataatagcaatgggcggagtatttatgttctacaatacagggaagaattaaagttgtaaaactgacagcgaggggatataatgtgcgtaagctacaagccgtgccagacagaaaacttaaaagctgctgtgcttgcacaaagctgcttttaaaatttctgcctgatagggcgacagcctgacagtccaagaaagccagagctttctaggacctgcacggcgaaaccagtgggaaatcaactaaaggcgatgtgcaaagcacgagccagcaaaaacaaatcataagcaggctaaggaaagcgatgtgcgaagcacgagccagcaaaaacaaaccataagcaggctaagtaaagcgaagtgccaaagcacgagccaaaagtaaaggcaatccgtggcagtacataataagccaaggcaaagtagaagcgaagtgcgaagcacaagcgcaatctatgccaccaccgcatttcccaccccaccccaaataaaagagaggacctcaaccaatgaccaatttattcaaaataacaggcacagtaaccctgaaaaaaggcgccggccgtcaattaaaatccggcggtatgtgggtatacgacaacgaaatagacacattttccgaaaccgtagaagacggaggccttatcgaactccatgatttcgatgattactttatgggaataggcttcgtaaaccgccgttccaaaataacagtaagaatgttatcaagacacgagggagagattaacgaagaatttatcaaacagcgtgtaaaagatgctgtttcctacagaatggatactgtcgatacatcttcctgccggcttatattcggagaggcagattttcttccgggtatagtaatagacaagttctcagatgttcttgtagtagagtcacttgcacttggaattgacagatttaaacagcttattgtcgatgacctgaaagaaatacttaaagaatatggcatgccaataagaggcgtatatgaaagaagcgatgccaaagtaagacagcttgaaggaatggaaagagttaaaggctttatcggtgaagaattcgataccaaagttatgataactgaaaatggtgttaaatattatgtagatgttaaggacggtcagaagacaggctttttccttgaccagaaatataacaggagagctatcggcggcttatgcaagggtgcgaaggttcttgactgctttacacatacaggttcatttgcacttaatgcaggaatatcgggagcttcaagcgtattaggagtagatgcatctgaacttgctgttaatcaggcgacagaaaatgccaagcttaacggacttgaggatattgtccgattcaaatgtgcagatgtgtttgacctgcttccacagcttgaaaagagtggcgagaagtttgatgttgtgattcttgatccaccagcatttaccaagtcaagaaattccattaaaaatgcagttaagggatacagagagattaatcttagggggatgaagcttgtcaaagacggcggataccttgcaacctgctcttgttcacattttatggatccggaattgttcactaagacaattggcgaagcggcaagaaatgtacataaaagactaagacagatagaatacaggacccagtcacctgaccacccaattctgtggtcagccgatgagtccttataccttaaattctatatttttcaggttgttgacgaaaagtaa

SEQ ID NO: 483 - DNA, 36582 bp, unidentified
  source 1..36582: mol_type = unassigned DNA
ataccgcattgtcaacatatgaaattggtgtcttaattcccaatgtcgctatataatcaatcagcttctgtccttcatagcccacaacaatcactattcttgagagatgttgtttctcaagctgatgcaaaagcctgtctataagcgatactccattaacctttaccatacatttggtattattctgggtaagttcttttaaacgctttcccattcctgctgctaaaataattgcctgcataatcccctcctataatccgactctactcttgttccttatgtcttttaattgctttttgaatttcctgaataatatatttagctccaaccgatgcactactgccaagattatacacatattctttaacaaatcgatctatgctgtccttatatgtatcagaagctgccagcatctttgctgctgtatcagctgtcttatcaatttcatcaagcttaagtacacgcccgatttcatatctcatccatatattaagtggctcaattccaatctttttgtattcaggattcattatcttcattggtgtatcaatgaaaagaaccggtttacatgtagtataagcatattcatatgctatacctgaccagtctgtaatcataagatctgcctcaaaaacagtactgtttgatgaaaaatcagtctgaatctctatatctgtatcatccttatatctttctttaagtccttccatcttctcaggcatatgtcttacatgctgtgggtgtggtcggactgtaatcttataaccatgtcccttaagattatcaagtatgtcctcaagacagctgtctacaatattatctttctgccatgatggagcaataagtattgacttaatatcattttccttctttggcatcttttcataatcctcacgcatctcatcaagcaatgaatatccccactcaacaagctccttcttaggaagattatacacttcttcagttttttctatttcttctttctgaatctttcctgtacataatacagaatcatagtgatccattgaaccggttcgcattgtcatattaaggctgtccatgccatgaggaacataaacataattaatatcttttctgatataacttctcttaatgtgataattctcaatatcaggcatagtcataacaacaacgtctgcatccatcttcatcataagtgttataagtttcttttcccctatataataaggtttaatcttactttctttttctgcaattctgaatatctgatcatcaggatcacttgttacataatggattgtaatattcgtattattaagtatgtattcaattatccctttaaaatacttataaaaacctgagccctctgaatagaagacaagatgtttattaacaacagagaaaaactttttataatcagctttttctctcttaatatcttctttgtttcttttaccttttttcgtaccaagagcttcaatctctgcaagttctttcttagtttcctcaagagcctcataatcaacataattcttaggattaatcgcccagttaagaagatataactgaagaattgcaaatatgttgctggcagtccagtaaagagctactcctgcatatacaaagcatcctaaatataacgacagacctactgaaaatatcatcataccatacttattaagcttactctgttctgcctgtaatacgttacttgcattctgtgcaacacataaaagccatgctgagacacctgctataattggtgttattattgataatccccactgttttgtagtaatccatgtaaggtcatagccacagaacttcatgttcgcaacaccttcattaattccgtctttaataactgcaacaactccaagcagaagtattatctgtataataagaggtataagtgatgccagtggattatatttttcttttttataaagcttagactgttcctctgctatctcatccttatccccataatgcttaataagaatcctgttaatatcaggctgcatcttaaccattttgattgaattcttctgtacccagattgatactggtaagagaactatcttacttatcagagtgaataatataattgccaatccataatcatgcagtagtttgtaacaaaaattcattacataacctaatgctgtcgataatatttccataaataactcctcttttgaagatttgattgattatgtcagaatcatccaacacaataattaatcatatcacttattattaattattgaaaggtatttttacatattcaatatactttttttacatactcaatataatttttacacattttgcataaaaaaagaacactgttcttacataatacagtgtcctttaatattatttatttcaaaagatattcagcatatttaactgccatatcacgccagttctccaatgcctctcccatatctgcaccacatgattccctgtacatagcccatacaaaccagtagtacgcaataatagcaacatatgccatataatgaaatcttgttgtctcattatattcttcctgaagatattcctttatgaattcctcagccttatcaaaatcatacatggcatcaaccacataatatccaacatcaattcccgggtcagaatatccagaatactcccagtcaataagtatgacacttccatccggtcttatcatccagtttggcttatatgtatcgccatggcagaaacatttttcaactccatctgctagagtcatcttatataactgtccgatacgattcttaaggtcctcatactggacgaaacacacaggatccttcttctcaagaagcttctccatatcaagtgcatcttcccatggcttcattccataatcagctgttatatctgccttatgcagctttcttaaaactgccaatatcttcttagagtcctcaaatgattcataatcaggctctctgaattctggaatgaataccgatatcttccagccctcattaacatctgcatatatgtatgtaggatctacaccagcttctttagctttaataagtgattttttttcatttcttctattgattatgctttctgttccatcgcccggatgtctgtatatataatcaactccgtcaatcttgaatataaatgatgtgttggtcattccttcgcttacattcctgaaatcaattatatcttcctcatcacatctgaatacaagcttgatattccttataatctcactatgtgtatgtccaagatactgtgaatcaaactttctaagctcatcgaaatagtcaaactcgaatatattacctggaagatactctttaaagaatatatcaggcagctcatccagcttatcctttacaagaatctcccaatagcagttattataaaccccagattcacgtacagcttcaacctgattaataaatgcttctgagaattcttttctccagaatgaatgtcccataagaacatatccatcaatcttattatccttggcaattcttgttatctttccaaatccgtcagctcttgcatatacttcatctgttgtttcctttccataataacctgaataaaatgtatgatattcaaactgattaaaaggattctcgatataataactgtcacttacgcatatataagtatttttaagttcttttcttgcaagataaagactttcaatattattctttatattaaatgaatcattaataataaactttacaccatacttgtcctcaagatagtaaaacatctccttcttatagccaagtacaactgtaatattcttaataccagcatcctgaagctgctttatctgtctctcaataagacgttcacccttaacttcaaaaagaccctttggctgttcaagtgataaaggaataaatcgtgtagatgcgccagctgcaagaataacggcattattaaccctgtatggttcaagcgcctctaatccagtctttgtaatactaccagactctttttcaatataccctgtttttacaagtttattataaatatctgtgtcattaagagcttttgtctcctcaacatcataagtgcagcccgctcttccaatgcttccattatacaaactgttcaatacataaaactcttcttttctcattatacatatctccttatgccatgtttcctgagaacattcctcgaatcactgctttgattacattttctctgcatgattcatacttctttcccgaaagtataagtccctctaccttaatgttctttatgtccttcttgtcaactgaatacaaatcatctgaaagaaccgccatatcggcaatctttcctgcctcaaggcttcctctttccttctcgtcaaatgttacataatatccattatatgtacacatccttagtgcttcctgaaccgatactgcctgagactgattcatattattaacagctttgtcaatccatacaataggatccggtgatgtacatggagcatcagaaccgcacgaaacaactattccgttctcattaaatgttctaagtggattaagcctttctgttctttctttacccataatactttcaagatactcatcaggttcctgtttccagttaatgaaagcactctgtacaggcatctgtatattatagtccctgcatatcttaattccctcttcagttggaagacagtcatgtataattccatgtctgtggtcttttcttggataatcgtcaagtgccgccttaagtgccctgcatgcctggtcaaatgctttatccccaatcgcatgcatctctatctgcagtccggctctgttagccttcttgcagaaatcaataaccttttcatcatcataataaagtactccgtcaccgcctaaagaatcaatatatggttcattcatagctgcatcgtgtgaaccgaagcatccgtcaagcgcacattcaaaacacccgcctattcttggcagttttctctttaatgcgacatcaacattcattgactgtgggaatacccttacctgaaatccattagttaaggattttgcaaatattttttcaaatgtaatatcaagattgcctgtaaaacccacaccacttacagtatgaatacagccaattccatgagacgcctgaaaatcaatggcactctgcatattcttaaacagttcaataatagaaagtgaattggtaatgtaattagaacattcaaagaatgcctcctgattcatctcgccggtatcttcgtgataacctcttaacttacttactttccccttcagcttatcaagaagcttgctgttaattatgcacgcatgtccatcatatttaacaaccataatttccttatcagggcaaaccttatctaattcttccctgcttataagtcttccttctttaactgaatatggtgacgcaccgaatgctataagtgtctttttattaccgcttgactgtacgaattctttaaccatctgtgcaatctcttcattggactctgcatccataacattaagacctgcgtgaaatgtagaaaatgatgccatatgctgatgtgtatctacgaatgccggaaccagcaccttctttccaagttcaactgtctgcacattcttatactgttctggcagttcattaccaacatacacaattcttcctttatcctcaacgagaaaaccggctactgtatcattactgtcaactgtaagaacctttcccttataacatatcatagacattcaccttccctttatatctgcatttactgttcctgtcccggataatccttataagaagaatctaactgtaccagctcataaaaattatctatctccataatatctgatttctcacaaggtcttacctctaccgcatatctttccttgcgaagcacaagtggaatgaactcccagaaataatcattgccctccggctcttcattatatacctgtgcaaagtcttctcttaatcttgcactgtcttcctttgtccagtaagatattccataataattaaagcaatatgtattacccttctgataatctgttatatgtccattatcaagcttaaaactccagtcatcagtctccaacgaataagagccaaggatattgctgcagtactgatactttgtgataatagccggattagatatatacaggtccgcttcacataaatagcactggtcaatatgttctaatgctgccattgctgatgatatattattggttttatcatatatatcgttatcaataagattgataaatggatatttatcaagaatctcatcaaatttttctttcttatagcccctcacaagagttatatccttaattcctacagaaacaagtgcatcaagtaatgtatcaataattcttactccattaacagcaaccattggctttggtctgtctaatgtaacaggaaccattcttgaaccaaatcctgctgccataataaccgctctttttacacggtatggctcaagtgcctcaagacctttttcggtaatctccatctggtcttcacatcttttaataagagcttcattttctaactcatcaagtgccttggatatagctgttcctgaaatctttaatgtatctgaaagagttctcatcggatactctttcttaccgttcttttcaatatatgtaagtacttcaaactgataacgattcatatttcctccttacagcaccattggaattatatagattccaagtgcaatgcatgtaacaataattgtgcataccttccatatggtgtactgtctgtccatcttagccttagtctgctcgtccggctcttctataacgccaatctcttcctcaattgtcggcataacacattcttttctgtgagaatatgcaaaataaaatattacacataatactgttatgattcctgatgttataagtgctgccttgtctgcaaatattaacatgaagcaatacacaacaattgtaaatatacatccaacaactccaagatgtgctttataaggtctcttcatatcaggatacttcttcttaagccccatatatgaaagacagcctatcatataacatatagcaagtgatataagcgatactgatgctatataattaattgaacctgttgcaataagtataaaattgataacaccaaccacaattacagcaacatatggtgtcttgaacttcggatgaatctttccaaggaattttggtaatgcgccatcttctgccattgtataaatgtatcttgcaggtgcggcaattcccggattaatagtagataaatctcctccaaatgcaataccaatacataaaagtataataggaaatccaacaagtccgactgccttaagtccttctgcatatggagcatctgccgctgcgagaattccataaaactccttaggtacaagacctacaagaaaccactggaataatgcgttaagtgcaaataccataaataccgaaatctttaatgctcttggaagtgtatactgtggatacttagtctctgcacccatagatacacatgtctcaaatcctgtatagcaccaccatacaagaccaaatatatacatcatctcattaaatggaggcaatgagttcattgctattccaccaaaatattcaacatgaaccttaggtatcatataaaggaaccagcacactgaacagccccagaagaaaaacataaatgctgtctgtgccttacctgactgctcaatacctctgaaattaagaataaggaaaactgcaacaaggataatagctataattcttgaatcaagcttaacaatgcttattccaagctgttccataagaatcttaaaataattggcaaatgcaagtgtctcacctgcaccaatagctacaacagatactatataatgccatcctgccatattagcccatactctgttaagtcctctcttggcataattatatgttccacctgcacaaggaagtgctgcagacatctctccgtatataagacatggccatatagatataagaagtgcaacaaaggtaaatcctattatccatgagcctacacttcctatctgtgctgaaccacaggtgaaaagtcctacacctacaacggttccaattgtcatactaattgattctttaagccctaaagcacgaaccagctgattattttcattcataaatatcccctctcacagtttattcgttcggtcatatttttgtccatctgcgtgaacagaatggattatagcagataataaactaaattaccagtataaaagtaagcagctataaccttccaggcttagctgctgcttaatcattaattattaatattcttcatctgctgctcatctttaattacagatatctgtggatttacagcgtccccttctattctgaacaccgaataatctctgtttttaagatattcatctgccgggtacataccttttgacacatcccatggtgctacatgatatcttgactgagaaacaccagccatatcaaaaagcgtttttccataattactcttctgtccaagtgctgcctcgccataagtagcatacagattcttaaatgttacagaatctgaattaacctgcattacatcattatgagtatcagccattttcacaaatacagcagggcgttcatacaatccatatccgccgtggtcggctgtaattataactgtgctgttatcatacacacctttatccttcatctgctgcatatattcattaatatatctgaacacaccctgtatctgcttatcaagagaagtctctgtttctcccacatctacacactgttcattcatctcataaggtgcatgtgcccctaccatatgatacagtgtaaatgttttatttccagcatcaactgttataccgccattattcttaaaatcagcatacaactgtgaatcatccagttcatattgaataatattgttattctttggagcctgacatgctgcaaaatcatcaccataaaaccagaaatactgttttataatctgtggaaatgcatagaatgccgacattttatatatattcttaaagaattgaactttgtctgatattctgtatttctgtccacctgcagtattggctactgcctcctgattaactccattaagatactcacttgaagtatacaacttaacatcatatccgttatctgacatgtcctgaataagcgaaccttcttcatatgctttctttctgtaatcagccagtgactgtgtggtatcatactgataacctgtaagcataagtggaactccaagtgctgtaggtgcaccgccgcctatcatattatcaaaataagtaaaatcttttaattcttcacagtatctgtcgataacataattctgtgcatcctcattatccagtgtatccacaatgaataccactacattgccctgcgaagataacgcaaactcatcattcttagtaactacatatgaataatcaacagttctcttagaagccactataagcactacaagtgtaacaatctgtatacttgaaagaaacaggctgccccacttcattatctttgtcattatatctttcttaaagcatacaacaactgcaggaacaactataagtactatccatacaactgtacttattattacatttaccctaaactggctccactgaatctgccttccattaaggacaccaaaatccggattaagaaaattcccctgcacataagcagcaagtgcaccgccaaatatgaccgctgcgtatatgttacatatcttctttggcacaatcagacctatcagtataacaactgctgccgtaattaacgatgctgctataagaagcggtataagtgctgtgaatcctactgcaaattcatcaagattaccaagaaataaagatgatggcatgaatatgcagaatgttacaatcaaaaatataagctgtggactcagcagttttatcttttgtttcattatcttcataaaaataccatcttccttatccatgtgtaattacacttacaaccagctattctttatccagcataaatacagctttcgtaagtgagaaattcttattataatatgggtctcctgcgtcgagctgctttttccacttagcctggaatctgtctacttcgcccttgaatctttccattttttctgctgtatcatccaatcctcttgactttgattcatagtgataccactgtgaaaatgcatcatatacaacaaggtatcctttttctcttaccttcatgcagaaatctacatcattaaatgcaactgcatattcctcagagaaaccacccacttcattataaagttccttagaaatcatcatacatgcagcagtaactgcactataatcacaacttaagaatgcccttgcaaaataacctgggtcacgtttatcaattcctacgcatgcatgtcctgcaactccaccaaatccaagaattactccgccatgctgaactgtatcatcattatagaaaagcttggcaccgacaataccaacttccttacgcatgcagtttgcaagcatatcttctattgattctggattaatgatttctgtatcattattaaggagtaaaatatactcaccattagcaaactttacaccaaaattgttaattgcagagtaattaaattctttctcccatttaacaactctgacattatcatactgtttctgaacagaatcataatactcaaatgtttctttttccgtactattattttctacaacaataaattcaatatttctatatgaactcttctcctgaacagaatctatgcataatttaagatcagcaatatgatccttgttaggtattacaattgaaactaatgggctggattctctttcatactttactctgtatgtacagaatacttcactcattattacctcacccttaacaccaactctgtcaaggtgatcctgtatagccttctgtcctgcaacatgacaataagatttactctgtggattagcagctgttgaattaggatgcattctccaatgataaagaatcttagctacatgtgccacttttcttgatttctcataacatcttaaaataacatcataatcctgtgcgccatcgtatttctctttaaagccacctaccgatgtaataatctcttttttagcacagaagaaatgtgtgatgtagttgtttgatcttaataaatccagattaaaatctggtttaaaatgtgcttcaacatttctccagtcaggtccaagaatcttatcttcatcagtgtatacagcatcaacttccctgtcctggaaacattttacaacttcataaagagcatccggctccaatgtatcatcatggtcaagaagtcctaatacatctccatctgccatgtcaagtgcagcatttgtatttccagcaatacctctgttactctcaagaatctgatattttactctcttatccttatcggcatactccttaagagtcttttcaagtgctttgtttccgccgcttccatctgcaatacataactgccagtgtggatatgactggttcactacagaatcaatcatctctcttaaatatttaattggagtgttgtatgttggcacaacaatgctgataactggctcgtagtcaaacttgtgctttgcctgtttttcaagttcttcttttgttactttatgcttttcaaaccaattctgataaataacctcttgtgattcttcaccattagttatcattctataagcttcttctcttaaatctccgaatccgtgcttaaatccatatccaacaagatgtgcaacattgccaggtgttgcaattgatgtaaactgtcttatgtgtgctctctttcttgctcttgcctgtttcctgatttccgagaatatatcagcatcttttttatatctgcccatactaagatgaataacagcgtcttctttatcagttaaaatctctgtttcgaagcctattttatctttaggatcatctgcatatcctctcatataaaggtcaactctgttaaaatatttgcttgtatgcttaagttcatttccagccttatctgtaaactttactgaaagatctccaccatgtcctacagcccatcctgtaacctttaatcttgcttcttttccttcagagttgataagaattgcctcatcaatattgtattctatagctgtctgggcaactatatttttgatgtttcttttattcatctctaataaaagctcatctttcccagcatttcttacccttagctgcaatgtttctatagtttcatatccatctatgtcactcacgagattaaaacctattcttttaccgctgctcatattgttctggcttgcaatatcaaaacggtctactctctcaaaatgtgattctgcttcacggccatcaacaactacataaaactgatgatcatctatctttccacctgtgtaccagccgacaatatgtgcatgaagcttattattattttcactaaactgaatattatctatatatttacttctattcatctttcactccaacctttttgaaaactatcttatctttgaaatatcccaatcatgtgaaacaagtgcaattcccatatcttccagacttgaaactatctcaaactttgctgcatgcttaagataatcttccggaagtccctctgaatactctatacttatatcgagataatactgtcccttaataagcggcatatccttaaatgtcaggctgacagttccatcctgtttaatttcaaaattcttgaatttgtctattcgtgtatctgtaccatatacatatacaccatcaattctattgatttttaccccgataatagcattctcaaccggattattgacatgataatcaaactgtactgtcatattaccaccacatttgaatattccctgttcgtctccattatcatctaaaagtctgacattagtacaccttacattacctgttccaaaacggttttcatcttcaagaccagactcaattctttgctgtttaactcttgctctttcctcttcatccattctctcattgttcatataatcaagatactcaagatgaacagacttaggatcgccctctttttcaatcctgccatccttaatccatatagacctgtcacatatctgctcaatctgacccaaagaatgggatacgattacaattgttgttccctgtcctttgatttctcttatcttgttaaaacattttgtctggaaattcgcatctccaacagcaagtatttcatccacaagaagaatatctgcatcaacattaatagctaccgaaaatgcaagtctcatgtacatacctgatgaatatgttcttacgggattatcaatatactggcctaattctgaaaaacttataatatcatccagtctggcatcaatttccttctttgtaagtccaaaaatagatgcattggtgtagatattttctcttcctgtcatatctggatgaaaccctgctccaagctcaataagtgaagaaactcttccatgcattgtgattgaaccagaatccggataaataattcttgttaacatcttaagtgttgtacttttaccacaaccattctttcctactaaaccgacagcttcacctcttttgatagtgaagctcacatcatcgagaacaacacggttttcgtatctgtttctcttccagaaaagcattttttcttttaattcttttcccttatcatagtaaaccttaaagctcttagtgacattttttacttcaattgctacctgattttccatggtaatctctctttctttctatatgcatatatctgttaaaattcttctgcaaatcctttttgaagcttcgtaaaaagtaattctccaataactataaatacaattcccataacaagtgataataaaaggtcacttaattccggaacgactttataataaagaatctgcctgtatatcttaataattgatgtcatgggattaaggttaaacattgtaatcagccatttaccaacatgtgcattctcaacaacatcaactccatacattacaggtgtaagatactgcagtgccatgacaataattccaagaatatattgtaaatctctaagatatactgttactgatgctacgataagtccaacaccaagacagagaatatattcaactatcataacaacaggaaggcataataacgcaaccggattaattccccttcctgaaaaaatcaggacaacaaatataacaagaaacgtaagaagcatattcacaaatccacttgttacagttgcaataggcagtacttctcgtggaaaatatatctttttaaccatttctttatctcgtaaaacactggttgagccatcctgtacactcgatgcaaagaacatccatggtacaagtgcaacaaataagaatatgtaatactgctcgtattcctgtttcataataatagaaaatacaagtgtaaatacaacaagctgtaacaaagggtttaaaaacgtccagaaaaatccaagaactgatcccttatatcttcctctcaaatcctttcgaacaagacttattatcatttccctgtattcatatatttctttaatctgattcatactctctccattctactgattaaaatgccgcgtacataaatccactgttatctgttacataactaagtattattattgcagcaaaaaatgcataatatactgcccatcttactggcaatggctttaacgcaagagcctctcttacattaattcccatttctttaattatactgacaattaagacaactatgcaacctattccaattatcacataatctcttgtctccaaaccaattatagcaaatgtctgtgcatttacctgtgcaaagtcaagatttacaataaacatctttaatgtagttattgcgctatgcattccgctgacacttacatcaaatacccatcctatatttataagtataaatgttcttaatatctgaaaaaccttccatatcctgctttcagaattaatatgaaacaccttaaaacctttcttataaacaggggataaaagattacttaatgcaattataacaccattatacaatccatatacaatatatcttgcctctgaaccgtgccatacaccaacaataaagaatataagcagattggcaaaacatattggaagcatttttccaagatgatctcctaaatgcttctttccccatttagcagccttattagaccacttggataaagaaaatggatagaatatgtaatccttcatccatgttcccagtgtaatatgccatctacgccagaattctcctatggatttagaaaaatatggttgtctgaagttttcgtccatacgaacaccaaacatctgtgcagaaccgataactatatcaattccaccagaaaaatccatatataactgtactgaatacataagaagtcctattattcttatcattccatgaaactggttgctatctgcaaatgcagcatttacaaatactccagccctgtctgccataataagtttcttaaaaataccccatcctattctctggattccaaactggatattctgtaatgaatagctgttcccctcaaaaagcgttggcgcaagtctgttatatcttcctattggtccctgcattatctgtggaaaaaatgatacaaacagtgcaaatttaaagaaatttttttcgcatgcatattttccctgatatatatcaattatatatgacattgcctgaaatgtaaaaaaagatattccaattggagcagctattgtaaataatgaaaactgtttctgagttccaacagctcttaatatatgattaactccacttatagcaaatccactatactttattgctgccagcattccaaaattaagcaataatgcaataacaagatatattctttttttatgctttatcttattcttgtaacttttcttttcttctcgtgacagcacctgtttattctgtgccagatacgcatcagctccattctggatacgttcaagcatgattcctaacaaataaaccgttattgtcgtaaataaaataaacactactgccttaagtctatatgacagataataaatataactcataacgagcagaactgtccatctataatttttaggaatcagataataaaatactagtcctattaataaaaacacaaaatatactgttgttgtgaatgacatatctattctcctatactctgatacatcttttcatatgtatcataaaaataatctgaagtatcaagcgtctttttctcatcctcttcaagaacctctgctaatacagctgaatatctataagcaagttcgcctcccatatgtccttctttatcgataaaatctgtatctttagtttctaacacttcttgtaagcataagttaaaatcataatatctgacaccaagttcatcaaataagagtcccagctttctgtaagcctcttctattccaagtctctttttacttgatggtgttataggtgatgtcacacagactaagtcaatattattatctttgcaatatttgacaagttttctaaaatatttttccggataaggattaacatcttgtttttcaatccccatctgacctttgacatattcctctccaactggatttcctgccggaagcggtaatgcaaagaatcccttacctgtatatggaccacctgcatcacttgtatcaagtgaatatatattggcatccttatagtctttcgacattttctgtttcacattagcttttatgtcttctaattcgtatttatatacaaattttttagtaaatgcatttctgaaatccatcatatctgtattttcaatcaggtacttccattttaccggtgaagtccacctatactggttatacagaaacggttcagcaaaacatccttcacctaaatttccataccagtagttataatctatatccagtataactttttccacatcgttagttctgttaagttcctgtataagataatatgaatcttttattgtttctcctggtatagacatatttaatactctgtcatccgaatttttctcaatagcagccggatctatcgcacacctcgcatgtgatgcaccaagaataaatacattctcattattctctttagaatctgcttgtctgattatataattaatatatcccgtttttgcaaaaaagaaatctgataatgccacaataactatcaatcctgctataaatatcagacattttatatacggctttatcttctgctgcatgattactcctccatctatacatctataccattataaaaacataatatcatttactcactatatatatattttctgcctgttgctttcaatgtatctaaatctcccgcatatccttcctgataaaattcctcaagaatttcttcatgttcatactcaaaataaagatatctgcgctttctttcgtctccctctttataatcgaatacttcctcacccgttgccccatcaagaagtcttgaaaaagcttcctgtaaatcatcataagatataggggcttctgacactgtgtaatcatgactttcattctttccttttacgaaaagaactggatgctgtctgtttcttggtccataagatagcccatatccatgatcagccataacaataataacagaattatcatatacaccattttctttaagtttcttaagatatgcatctgtcattgtcatacatgcttctacattctgtgcataagtaccttcttctattctgttcatgtctttgtcaaagacaaatggaacatgtgcaccccatatatgtataaacttaaatgttttgtcattagtcgttgttagttcagaatttttagcttcatcataaaatgtttcgttatcatatgtatatgccttacaatcatcaggattagctctgaaatcctcaaaatcctgagctcctaccatgcagaatctcttaagtacaaatggtgcatacttatatccgcttatctgtatttccctctttaaaaatgtgacatatgaacttattcctgttttattctttataatgttactgaatttatacatttcctcatctgttgtatataattcaggctcataaagagacattttataacctttctgggttaactttgtaagaaatggcgaattagtatatgcatctgccgcatattcctcaaaaggtctctcattttcataccatattcccgataaaataaatggaatcgattgtttggtgaaagtatatccgcatactgtattatcataatatgtaaaatctttcattatctctgcatattcaggatggttttgggcaacctcattatacgttccaccttccattgcatccaacagtaatattataaaattggtgtctgaagacatctcaaattcatccttgtctgtaacaaccatttcataatctttatcaaccaccttagttgtaagaactacagttaccatagtaacagcaatcataaggaacatacatactgatactatacttactgcttttctcataattaccggcttgaattttattgaaaatgctataactactgctgatacaacaacccatacaacaatggtttttatatcttcagatatataatccttccataccggctgtgtaccatctaatcccggaagattcttaacaaggaaatttccctgaatatatgaacttataaatgctataaaatacattgcaagtccaatattataaacctttatatttattaaaaacattatgcctaatataataagactcacaataaataaaagcacaaaaaggcataccacaaccggaatcagctgttttatctcaaaccagaactgatcctgattggaataatatatctctattggtgcaaataccataagcataaaacttgctgctaatgataccaaaacagcaggaataaaatcttttatattctttttttctttctttttatccatttttacatcctcatatatcacacttaatacttactaaaaacatgtattccacattcctgccatgaaaaagtaagacattatacttattgatacaactgtcattacatttttattaatctttgtctgaactccgtcaacacctataaaatatgctgtcgggaacaggataggcaacagatatctcggctgacatcctgcgatatagttggcaccaacctccgtaaatgatacatataaggccgttgctactaaaattatgcatactgcagcactaaagaaataagcacctcttacacatggcatttttatctttttctcatccctgtcaatatacatcaatacagccattaacatcaaagttatagttgttcccattccataacccatgtatgccattgaagtaataaattcttcggcatagtcaagatcaagatattctttaaggaaatttaacagggttcctgtatactcacccggattagatagtatatatttaatctgctctatagaattaacatcttctccccctcttgtgtcaccggttcctgaggaaccaataagcataggaagcaggaatgtcatcataagaaatactgctacacctacaattaatgtataatatatctttctttgctttttatcaacaaatttatcctttggcatgaataaaagaacaaacattaatacaaaatatattgcctttggtgctattcccagcaaaaagcagatattcatcattatcatatttttatattctaattttttatccctgttctgaagttcagaaataaagaatgagtaccccagagttgtaaaccctattacccagtaatcatatgacattgtcgatgccatgaacatcgttgtggatgatagtccaattacagccagaagaatcttaccattctttagctttttaatcgcaaagtacattactaacacataagtgaataatattaccattttagaaagcataaatgtatggaaaaatgacagtcccaacgcccttcccataattatgccagctgccgccggaatatatgcaacaaattcttttcctatttcacttccaaatctgttatctgttaatctcagttcatattcatattcgacattattaagaattgcttcgtattcttcctctgttatttccccctgagaatacagatatgttgctgcctgtgaatcataaaatgagctttctgcattatacttggtattatcaaaggcatctgctattgagacacttcttaaataatgagtttcatcatcccatgttacaagaagatttcttggtgaaaccattatataagtaatccccattataagagctgctgctgcaaatattacctccacacgcttatatgcaatctttccacacaacacaattgcaaatataagtattcctgcacccatacagaaatacattctatgatctgaatagctgccagatattctgcttaatataagtttttctgataaaacagctgctataataataaccacaaaaagtgctgtatataacagcacctttttcaagttatcctttaatgcttcaatctgatttatcttattgtttataaacatatcgatataatcagatactgatttaacatatgtaagaaataatggcattccaataacacctgtcaggcttattactgctaccataactttgtttttccatgtactgaattccgtccagtacatagctctgttaaataaaaatactaatatcagcattattataaatgtcactatcagttttttctttttactaatcaccttaacctctgccattatatcctccgatgttattacattctaatcaacatttatttcttcttcaaatggtccgaattctaatatttctgataagtgattctttctttcgctttcaggtggaatcaccatataatcaccaaacatacgctttaaatacacatcattattctttggtatcttaacaacaatatcctcaaaaggaccttctgcaagtggaaataaatcatcatatcttatggcctgctttaacggatgcatctctccaaagaaacatgatacccactctgtcttctgtccattatattttgttgcactctttaaatatcttttgttaataaaatttcttgaaaaatgagtccacttaagaattctgttagctattatacagattgcacttacaagttttctcttccatccctttagaaaaagcaccggtctgtcaaactcacgtaaaattcgaagtttactccagaaaaatactgacatagtctgtctttttcgtgcccctttatcatcaggaacattatcaaacggataaattgccacatctattcccataggaacattagcatctctaaaaacaaatggtatattctttgttccttttcttgcaatttcagcattataaaacggaaatgttttgtaagaatctatgtctaatacattatatttgtcactatatttttctcttattatcttaattatcttgtcataatcttcccttagcattcctatatcaatatcatcatcccatggaataaacccctgatgtcgttctacaccaatagcgcatccggcaaataagaaatactgtagattgttttcttcacatatttttataaaatccttaaaaactgacaattctgacagctgtaattttctaagtattttaggatcatactgtttattactattcattttttgtattcctcctggtctgaataatgatatacactaacaataatgctgccagcaatgatacaagtatcagatatcctaatgatgctcccgtaagtcccatttttactgtcatagtatccattattaaaaatgataccagacatactatgatatacagaattgtcatatatttttgcttacgcataattgcaagaacgtaataaaaaataatattaattgcattaattccaccacacaataataataatagcagtgtaagtttatattctttaagattaactccgtacagccatgataaaaccggaattcctaacacatatgctccaacctcacatacgaatgtaaatcctgttattattaaaatcattttgcttataatatgccagaaatttttatatttcttttcataataattaactgccatggcagtctgcatcggtttaaatattattccactaaaaagattaatcaccatatttggcataaaaactgcagtgtaatacaattgtgcttcatcaccaagaaccctgtcaactgacagctttgatgaattaataatataagtactaagaaatgtgctgactgctagtggaatacacatttttacaagtttccataatcttttcatgtcccctgtcattcttacacttacacgtttaacagcaatgctgatatcaaggagtacaatcattccatatgcaactacattcataataataagtgacaatataagatttttgcttactgcaacagctataacaagaaccagtatgctgaaaaacactctgtaaaattcagactttcctgaaatatctattctgtcttccttctgaaattctccttcaaatgtatctgctatagaatccgatatcttatataagcagacaagcaatataataatcactttctgtatatcataattattaaatacaacataaacaatactagccagaaatgttattatacacattaaaattcttaatgtcagataatacttaaaagaatattcatttcttacatctgtaacctgaaatgttcttatttcaaaataagcaattgtaacaagccactgtgcaattgataaacccactgaaaacattccagcctgtgtttctcctagtaaacggcttattacgattgtcattaccagtgttgctaaagcaaaacaggctgttcccatagtgaaccagatatatttatatttatcatccggttttttgtcaacacccattattttgtatataaaattcattcaaacctcttaatcattgaattcaagtttatatggataatgattttttctcttttccactggtggaagttccatatagttaccatacatttttctcaactttttatcttcgcatgctggcaaaggcatcttgacatcctcaaaatcatatatctgtaaaggaaatgcctcttctttaaccattatgtgccaatatggattagtatcaaacaaaaatgccattctctttgtttctttatcattatacatattggctatctcaagacattttcctgcaatccatttatgagatattctgaacacaaccattcctgcatggataagccccgtaactgcatgtgtaagctttgccttaaagcctttatacggaagcaccggaaatgcaacatgtcttaatataagtactttgctccagaaccatgcacgttttgcctgtttctttaattcctcatcactgtccggaatattatcatatggatatatgtcaaggaatattcctaattcgcatttcagatttttcaatggctcttcaacaaatttagttccctttaacataagtcttgtcgtcatcaacggataattttccatagtctcaacattagctatagaatatttatcactataatctcttttaaagacttctatcatcttgttaaaatcttttcttggcaggacaacatcaatatcatcatcccatggaataaatcctttatgtcttaatgctccaattcctgaacctgcatcgccaaaccatgtaagattattctcatcacataccttaataaaatccttaagtattcccaattcggtctgctgtacttttttcaaagttgcttcatcgtattccttcattgttaattattcccttttacttgatattatttgacttttcactgctgctatataacttagtcaatatacgtgctataccagatggccagaacttacgatacattgcataatcttcttctgatcttttactgtcatgtattatcttagatgtttctgaatcttcatgtatcctgtgatatgtcagaatcttgttacagaatatgaattctccatctaattgtgatattctttcctctgcctcccagtcttcgttagatctgaacccatttaagaacaccggttccataagatttggtttatagtatgttatagatggacagcatattggagatcccatagaaagaactcttcttcttgcaaatctgcttccccacattgacttaggcctcaatatgaataacatgattctcttaattctcaataatttgttagattcaacaatctttccatcacgaatttctgcataatctgtaaagaaaattaatggttttttcgcattttttgtatatgccataagattttccacatatgaaggattctacttatcatcctggtgtgcaatagtcacataatctgtttcagctttagaatacgcaaaattccaatcctgtgtaattccatgttccccatgattgacatatacctttagattatattttgctgcaatatcatcaatatacttacttggtgttgctgtagctatcaatatatcagacttaacagtctgattcataagagattgtatacactcttcaaggtatggactctctttatacgcacatattgcaaatgtgtgattagtatttatgtccttattcataactatttccttccttagcttactttttctctgacatattatttctgacagctatttcttctgtaagatttcttaatttgtcttcaagaactgatatcttaatagacataacgaaaacccttaatatcaacagaaaaataacaacaacaaatacgaaattaacatctgcctgaaatcctaaaacatctgctccccagcttgcaattcccggaaatacacttaataacacaagcacaattgcaaaaaatatccagaaaacagtgtcattaatattcatctgtgattttcttaactttcttgcaatataaaagcatgtaagtatcgaaataactattaaaacaacttttaaacttaatgtcatacttacagccctctctttctaaaccactgtacaaaaagtatagatgtggtcatattaaacatatacttcatactgtttattggattaagataactttctccagcaattctgtcattcatctcaacctgatattcgccaaccttagccccacagcgtgtaagatatgccacagtatctggttctggtccaaaattcatgcttgtagcaagtttgtgaatcattcttctgttaaacattctcattcctgatgttggatcttttattctcttatggcatgtaacaagtatacagaattcaataagcctgcttcccagcattcttgcggtaaatggcttcttctctgatgcgaatcttgatcctatgacaatatcaagattgtccttttcagccatctgctccataccttctatgaactgtggattatgctgaccgtccccgtcaaactggattgcatagtcataatcattagccagtgcatatttcataccagcctgaaatgcacctgccagtccaagattaaccggaagatctaccagattatatccatgttccctgcataatttagcagtgttatctcttgagccatcattgataacaacataatccagctgcccatagttattgataagattatcaaccactctgacaatattctcttcctcattataagctggaataataaccagtactcttttatccataaaattcctctttctaattaaagatactcattctttccttcttcacgaagctttgcaagtacctgcttgatttctcctgcattctctttagttgtaataagagttgcatctttagtatcaacaactacgatatctcttaaaccaactgtggcaataagtttttcgccaccttctattacacagcccctagtattaactgcaactacattgccgttaattacattgctgttatcatcattcttcttgattcttcctactgcaagccatgaacctacatcatcccaaccgaagttgcctggaagtgtgtagatagaatctgccttctccataataccgtagtcaactgactgtgactcaagattagggaattctgcctcaagcactgcattttcatctgctgttccaactgctgccttaatctttaataagccttcatatgtatccggcatgaacttcttaaagcagtctaatattgtagataccttccatacgaacattccactgttccacagatatgttccgtcagcaaggtatgatttagctgtctcaaggtctggcttctcaacgaacttttcaactgaataagcattattcttcttgtcatcctgattatacttaatataaccatagcctgtctctgggtaattcggagtaatacctaccgttacaaggttagccccctcttctgcaatctgaactgcttctttaaatgtatctgcaaacacttcattattcttaataaggtggtctgatggaagtacaatcataactgcatcatcatatttgcttgcaacatgaactgctccaagacctacacatggtgctgtatttcttccaacaggctcacataagatattctcctccggaatacctggaagctgctgctttacaagttctctgtagttcttgttagtagcaacataaacatctttaatatcaaccaatgggctgattcgctctaccgtgagctgtatcatagtctttccgtcatctgtaagagaaaggaactgctttggcatattaacacggctctttggccagaatcgctctcccttaccacctgccataataagtgctgtagttttcatatcgtcctccttattgtgcaataccatcatcatcattaatcacgatacatgtctgtgcatcataatatctgccattagctctgatagcacatctatatgttccgctttccatatctgttgtatctattccacaaaaaaacggtgcataattaatgttcttatccacaccttttcttaaatgaaatactctgtcacatactgactgtgccttaatcctataacaattctgttcattccacagaaaaattacgggattataatacactttatttccgttatatgcaaatcccctaagctgcatatcatcatgatatcctgtttctgtcaccttaactgtaggtgatacttccatatatcctgcagccggctttaatctgtcagctttctgaggttttctgtatattacagaatatatctcatctccgaatctgtagttattctccgtctgcgtaagaagcggactatagaaagggtcatatttctcaagcttgggatgtttttcatatgtcatatcccttgcatgcatattacgtctgttcttttcttcatcaatctcatcatcacctcttgagaatgattcatgatgaaaaagaaccacatcatttcttaagacattgtaatatccctgttcatacagagtcaggcatatatcaacatcattatgtgttacttcaaatgcttcatcaaatccaccagctttatcgaatttagccttctcaatcataaagcatgctcctgtaacacacaggcagtcataatcggcgtaattcctgtgagccttgatattctcatcatcaactgcctttgcatacagatgtgcaaaacagcttgattcataattaattacacccacatgctggatatatgatgagtccggatacaaaagctttgcaccaaccgcgccggtactttcctgctttgcctgtccggcaagtactgaaagccagtctgtatcttcataatcctgtccgattatttcaatatcatcattaagaaataataacatgtttccagtcgctttctttgaacctatattacacattttagaaaaattgaaatcaaatctttcgtatgtgtacgaagcattttctccaaattcagctatcagctttttatattcatttctgttgtcttcattactcccattatcaataacaacaatttcatatttcgtgtatttcgtgtatttttttatactttcaaaacaaaccttaagaatttccgggttatctttggacggaataatgatgctgacacaatcattctcagaaagaggataatgtatatgctgtacatttttattatgtttatcagtaaccacacatacatttttgttctttaattcaggcagcaaacatttatactcagaaatatctgattcttctttataattcgcctttttatgagcaagaatctgatgaatgtgtccaacattctctgctgaattatctgataacaggaacaatgatgtcttgtaactgtcaaacttactatcagaaccaaaattatctacaaactcattcattctatgaagaaaaaactgtctttttacagcaaacacattgccaatataattaaatgaaagcagtgtgttccatgaataatcgggtttacaatctggattttcccgttttccattgtcattaatagtatctgaatcactataaatgtattttagatttctgccagcttttttctgaatcaatatataatgagacacttttttctcataatcctcacacaattcgtaatcagaactacacaatacaacatattctgtagatactttttctaccgcttccatcacttgctttacagtattattttctttaacagacactacctgaacacattgattttctgatatgacgttctgtcttggttctacattctttatatataactgataaatcttttcatcagtcatattctcacgcattttctgccctaacgcatacctgaatgtaagaacaccctctttattgattatctcaaatgctcttgttaaaaacatcaattctctccatgaattttcttcaacctctcgctgactatatccgcagaacgcttatacgccagatgttccctggcatatttctgaccgctatcagcaattctttcgtagaagtccttatcctcataaagccttctcatatagtctgctgcctcatcaacatgtgcatcagcccatacattgcccttcttgaacggctcataatccttatcaagctctatcatgtcgtaaccgaccatgcatgctgtatcactgttcataaactctgtattgcctgaccagtcagttgcaataacaggtgtaccaacatacattgactcagccataacaagtccgaagccttctgaacggtgaagtgaaacatacacatccacatctgcaagaagtgtattaacctcacatcttcccatatgaccgcacatataataaatgttatcgcaatcctctattacagaactaataatcttttcatcttctgcagataactctgcctcacttatcttgataacaagtccgacatccttgtatttttctttcatctgttcatctttgcagaacgcttctttaaatgctttaatagcggcaagcggattctttctttccataacgcttccactgttatacattacaaggaataagaacttatcttctggaagattaaaatgctttctatcaaacttcacagtatccgtctcaggtgcaacacagtgtggaactgttattacaggcttgtctgtgtatttcttcaaagtattcgtaacgaaatccgacggtgtccagacttcatcaacaagcttgaatgccggaagccactcttctggaaatgtctccagctcccatgcccagtatcctatgttatatctgtaatcccatacttcttttccaaggcttaaatatgccaccatgaattcacttgcattaacatgaataatattcacatcaaaaggaagctcctctgtaagtctgtcagcataagtatcattactccttgaacctcctggtggaacaaagaaatctcttataacatgaggttctttattctcatcaagcagcctgcacatgattcttgcgctctgtccaagtccgttatcgcccttaatattacctattatattggcaccacatttgtatcttcctgcctcatatttctcaatagagtctgccgacagcttgtctgtggcattattaattattcctgctttcatcttacttaatagcttcataggaataatcttggtcagcactggtctcaatgcttctcccgtattaagaaaaaattttgataaacccatataaacctcaacattctatctgttattcatctggctgttaataaagtctctcaccataccaccaagtctttccggggtatacttgtccaacgcatgtctgtatgcattctcatcaacaagtccagaattaatcttcttatctatattcttcattccatttgcaagacttataaccttatcatcatcatcacctgcaagactgaatctttcaacacagtcacctactacctcgtcaaatattttaagattacttgcaagtattggcttgttatgcttcataacctctaatataggcattccgaagccttctgccatagaaggaaacacaaagcatgaacagttgttatacaggtcatatcttgtagtgtgtgacacatatccaagataggtaagaccttcaacctctgtaagtgcagtctcaagaagctgctcaatatcatcctcctgcatcttaccggcaagaataagaggtcttgttccgccttcttccctgtatcttctgtacgctttaataaggatatcaacgcccttacgcttctccatattacctatatacaagaaataattctcatccttaggcggtacatatcttgtaagcggattagatataatgtaggcattgcagcttggaatcttcttagcctttggaaaatacacctctgtatcatccttagtctgctccgaattatacagaatcatatctgtatgtcttaaagtcacaccaagattaaacttaaaataatagctgtatatttttccaaagtatcttacatactgaataggaaacatatcgtgtattgtgataagtgtcttaaagcttccaccgagattaataggaataatcgaattaacctcccagaatatatccggcctcacctgctttaattctttcttaataaatgcaaaatatgcatacacacccgcacttctatatacaggctttccccattcaataaccttgattcctctagcctcaaatctcttaatatattcactctctttaacatctgtaaacagaatccattcaaattcatcatatgttatgagctgttctaagaaatcattaagatacatgcccacaccgcttggtctgctgcctaaagttcttgcatcaacagcaatctttaatttcttcataactgtattctctgcccccaataaataatctttcattctatcagagtatttccataatatgcatgttcaaactacccctgtaacaaaacatgtttcttttgattttaccatattatagatataattgctatacattattttctacacacaaatacaccagcctctttggttattgtcataggtttcacaagctttttctctacatattttttaaaatctgtatacttatccacaaggtactctttctgattgccatgacatgatagtatataatctaccagcggttctgcttcatcaacaacaagcgcatctttataatctcttctctcaacatctgaaaaatgtttttttaatatcttatctccattatcaagtccgaatttttcaaaaagcttatctgcttcaagtgcaattctcttatcgtatcccgacacaaggcggcttatctcctgcatatgcctgctgccatatgtactgcacacaagcactcctccaggctttaacaccctcacaatttcatcaagtgccttattgacatttttacaataaaacagcacatgattagcaatcaccagatcatacgattcatcttttgcccctgtcttttcgcatgaaaccactctgaacctgaatgacacatcaatatctctttccttccagctctctgttgctttttttatatttcttctcgcatcacttatcatgccttctgatatatctgtaagctctatatatatgttttttttcttccctgaaaattcatttctctttcctgtcatggcaagctgacctatattgtcaacccacaatgttccatcaccacacccaatctcaagaattctcatccccttaacaataccacactgctcatatacccacggaaaccatccctgtttattaactgaaaacctgttatgaagattaattcttgcagatatatttccagcattaatgtactgattcttcatgctgtcttccatattagtaagatggataatctccagcatattactccagtcaactccttttccctctttaatagagtcttctgtttcttcaatagctttacatacaagctgcatctgtgcaatcttgtcctgtatcattcgcttttgaagttcaagtgaattctttagcacatgataatctgaatcaccaattgtcatatttcttatatcgtccagtgtaaatccaagatatttaagcaataatatctgctgtaaccttgtaaaatctgaatccgtataaaatctcactccctcatcagtaagaagtgacggctttaatatgttctgctggtcataatatcttatagtccttactgaaacatttgatttcttcgcaaattcgcctgaagaataatacccgtctttatgcatatattactccttgtaaaaatttttcaaaaaacacttgaaggtgacgttacgttatcttttattatatacttgacttaaaaaatgtctacttgaaaattaacataacattttaacaaacaaggaggaacttcaattatgaagggtattattttagctggtggttctggcacacgcctttacccactcacaatggtaactagtaaacagcttcttccaatctatgataagccaatgatttattatccactctcagttcttatgagtgctggtatcagagatattcttatcatctctacaccacaggatactcctagattcaaagagcttttaaaggacggaagccagttcggtgtaaacctttcttacgctgtacagccaagcccggacggacttgcacaggcatttattatcggtgaggaattcatcggtgatgacactgttgccatggttcttggtgataatatatttgcaggtcacggtcttaagaaaagacttaaggcagctgttgagaatgctgaatcaggaaagggtgcaacagtatttggctactatgttgatgatcctgaaagatttggtattgttgaatttaataatgaaggaaaggctgtctctatcgaagaaaagccagcgcagcctaagagcaactactgtgtaacaggtctttacttctacgacaacaaggttgttgaatacgctaagaacttaaagccatctgcaagaggcgagcttgagattactgatcttaaccgtatctacttagagaagggtactttaaatgtagagcttctcggtcagggatttacatggcttgatacaggaacacatgaaagtcttgtagaagctactaactttgttaagactgttgagactcatcagcacagaaagattgcatgtcttgaagaaatcgcttacttaaacggctggattaacaaagatgacgtcctcaaggtatatgaagtattaaagaagaaccagtatggtcagtacttaaaggatgtcttagacggcaaatatgtcgacaagcttcatgaataattaagtacatttagttaaaacatttttcatataagaacacattttaaatattaaggagattaattatgacaattattgttaccggtggagccggatttatcggaagtaactttatatttcacatgttaaacaaatacccagactacagaatcatctgtcttgactgcctcacatatgcaggtaatctttcaactcttgagcctgttatgtctaaccctaacttcagattcgttaaggaaagcatcacagaccgcgaagctgtttacaagcttttcgaagaagagcatccagatatggttgtaaacttcgctgctgaatcacacgttgaccgttctatcgagaacccggaagttttccttacaactaatattcttggtacacaggttcttatggatgcctgcagaaagtacggtattcagagataccatcaggtatctactgatgaagtatacggcgatcttccacttgacagacctgaccttttcttcacagaagagacaccaatccatacatcaagcccatacagctcatcaaaggctggcgcagacttacttgttcttgcttaccacagaacttatggacttcctgttactatttcaagatgctctaataactatggaccataccacttcccagagaagcttatccctcttatgattgctaatgctcttaacgataagccacttccagtttatggcgaaggtcttaacgttcgtgactggctctatgttgaggatcactgcaaggctatcgaccttatcatccacaatggacgtgttggtgaagtatacaacgttggtggacacaacgagaagagaaatattgatatcgttaagcttatctgcaaggagcttggcaagcctgaatcacttatcgttcatgtaggtgacagaaagggacatgatatgcgttacgctatcgacccaactaagattcacaatgaattaggatggcttccagaaactaagtttgaagatggtatcaagaagacaattcagtggtatcttgataataaggaatggtgggagacaatcatttctggcgaatatcagaactactatgagaaaatgtatagcaaccgctaattaacacatttattctgtaaggagatttgacatgaagatattagttaccggcgttggaggtcagcttggccacgacgttatgaatgaactgataggcagaggtcatacaggcgttggcagcgacatcgcacctgaatattcaggagttgctgatggaagcgctgtcacaacagccgaatatgtacctatggatataactgatgctgcccaggtttctgaagttatcactaaggtttcacctgatgttgtaattcactgcgcagcatggacagccgttgacgctgctgaagataatgataagaaagccaaggttaaggctatcaatgcggatggtactcagaatattgccaatgtctgcaaacagcttgactgcaagatggtatacatcagtactgattatgtatttgatggtcagggtgaaacaccttgggaaccagactgcaaggactacaagcctcttaatgtatatggagagactaagcttgccggagaacttgctgtttctaacactcttgataaatactttatcgtgcgtattgcatgggtatttggtgttaatggaaagaactttattaagactatgcttaatgtaggaaagactcatgacgaggttcgtgttgtcaacgaccagattggtacaccaacttacacattagatcttgcaagacttcttgttgatatggttgaaactgacaaatacggttattaccatgcaactaatgaaggtggatacatttcatggtatgactttactaaggaaatctatgcacaggcaggtctttctactaaggttacacctgtaactactgctgaatacggcatttctaaagctgcaagaccttttaacagccgtttagataagagcaagcttgttgccaatggattcactccactgccaacatggcaggatgcccttcacagattcttgaaggaaatcggagaaatctaatttttatacaagaaatctaattttatataaggagattttatcatgggacagattacaattgaaaagaatgtcgcaggtatcgaaggactttgtgtcatcactcctgctgttcacggcgataaccgtggatattttatggaaacatacagccagcgtgatatggaagaagctggtatcaatattaactttgttcaggacaaccagtctatgagtactaagggtgttcttcgtggtcttcacttccagaagcatttcccacagacaaagcttgtaagagctatcaagggagccgtttttgatgtagctgttgatcttcgtacagactctgaaacttatggaaagtggtacggaatccttctaacagaagagaataagaagcagttccttatccctaaaggatttgcacatggattcctcgttcttactgatacagcagaattctgctacaagtgcgatgacttctatcatcctaacgacgagggtggtctcgcatggaatgacccggcaatcggtattgaatggccagagcttacaggtacttacaacggctcagcttcaggtgaaggctacgctttaaacgatggaacaaagcttaacttaagtgataaggaccagctttgggatacacttgagaacacatttaagtttgactaatttcgagatattatatttctagattttatcttgcttttaatgtatttgtcttactttcaaggtatttatctgattctggatatttttacccggttatgaatatttttatccggttttcaagggagattagctggtttctaaaggaaattggccggtttccagaggagattagctggtttttcgcactactatgccgaaagacctactaatctcctcttttttatttaattagtgagtcaagtccaaatttgtgtgtaaattcatctttcagttatgtggttttatc

SEQ ID NO: 484 - DNA, 7441 bp, unidentified
  source 1..7441: mol_type = unassigned DNA
  misc_difference 4747: note = a, c, g, or t
  misc_difference 4748: note = a, c, g, or t
  misc_difference 4749: note = a, c, g, or t
  misc_difference 4750: note = a, c, g, or t
  misc_difference 4751: note = a, c, g, or t
  misc_difference 4752: note = a, c, g, or t
  misc_difference 4753: note = a, c, g, or t
  misc_difference 4754: note = a, c, g, or t
  misc_difference 4755: note = a, c, g, or t
  misc_difference 4756: note = a, c, g, or t
  misc_difference 6452: note = a, c, g, or t
  misc_difference 6453: note = a, c, g, or t
  misc_difference 6454: note = a, c, g, or t
  misc_difference 6455: note = a, c, g, or t
  misc_difference 6456: note = a, c, g, or t
  misc_difference 6457: note = a, c, g, or t
  misc_difference 6458: note = a, c, g, or t
  misc_difference 6459: note = a, c, g, or t
  misc_difference 6460: note = a, c, g, or t
  misc_difference 6461: note = a, c, g, or t
ttacttgctcgccttcgcggccttgaaggcctcgatcagcatcggggtgaccttgaacaggtcgccgcagatgccgtagtcggcgatctcgaagatcggcgcggtgtcgttcttgttgaccgcgatgatgcactcggactcgctcataccggccttgtgctggatggagccggagataccaagagcaacgtagaccttcgggtggacggtcttaccggtctgaccgacctgatggtcggcagtgagccagccggagtcgatggcaacacgggagccgccaacaacgccgccgagcacatcggcgagctcgtgagcgagcttgatgccgccctcgacgtccttggagataccacggccgacggagacgatgtagtcagcgccgatcaggtcgacgagcttcttggcagccttgacgacctcgacgacctcggtctggagatcggcggcgtcgagcttgacgtcgtacttggtgaccttaacggccttggccttcgcctcgtcgtaagcagccttcttcataacgccgggacggaccgtcgccatggagggacggaagcgcgggcagatgatggtagccatcaggttgccgccgaacgcgggacgggtcatcttcaggtcgcgagagacatcgtggtccttacccatgaccttcgcggtggccatgccgtcgatcttggcctcgggcagcgtggaagcgccgcgcaggaagtccttgtagatgggcatgtcaacgtcgaggtgggtgcagtcggcgcagagaccggtgtgcagacgggctgcgcagcgggggccgaggtcacggccgatgttggtcgcgccgatgaggaaggcctcgggcttcatctcggagatgacgtcgcagatgaccttggcataggcgtcggtggtgtagttcttcagcagggggtggtcgcagacgatgacctcatcagcgccgtagccgccaatgctctcggcgagatcgccgacattgtcgccgaccagcagaccgcagagcttcacgcccagctcgtccgccagcttgcggccttcggagatcagctcataggaggtggacatcatctggccctgacgctgttcgcagaagacccatacgttcttgaactcttcgatcttggaggagtcatagttgggattagcaagtttcacttcgttacgcatcgtattgatctcctttccttaaatgatgtgtttttcgagcaggatgccggcgagcttctcgcaggtagccatgtcgttgccctcgagcatctgaccggcgcccttctgggggggcgtgaaggaggtcaggatgttggtcggggagcccttgaggccgatggtcgtggcgtcgatcagttcatgatccttcagcgcctcgtaatcgaggaccttcatgggcttggaatagcactcaaacacaccggagacgctcatataacgcggggtattgagctccttgatgcaggtgatcaggcacggagtctgagccttgatggtcatgtagccgtcctcgagcatgcgcttgacggtcagggtgttgccttccttcttcacatcggcggcgtaggtgatctggggcaggtgcagcttctcagcgatctgaggaccgacctgagcggtatcaccatcgatagcctgacggccgcagaagacgatgtcgtcgtcatcgagaccgatggtgtcgagagcggcggcaaggatctgggaggtggcgtaagtatcggaaccgccgaactcacgggcggaaacgagatagccgtcatcagcgcccatggccatcagctcgcgcagcataccttctgccggcgggggacccatggtgacgacggtgaccttgcagcccagctcatccttgagcttgagagcggcctcaacggcgttcatatcatcggggttgatgatggtctgcatggaagcgcggttcagggtaccatcgggattgacggcaaccttaccggaggtatcggggacctgcttaacgcaaacaagaatcttcattatatctttacctccttttttagttcacaccaagatacttggcaacgaccatacgctggacctcgctggtaccctcgtagatctcggtgatcttggcgtcgcgcatcatgcgctccacgggatactcacgggtgtagccatagccgccgaagagctgaacagcgcggcgggtgacgtcggaagcggtctcggccgcgaagagcttggccatggcagcgtccatggagtaatcctcgtgattctgcttcttcatagcggcagcgtaaacgaggtactgggcagcctgagtgcgggtgtgcatgtcggccagctggaactgggtgttctggaactggctcaggcggcgaccaaactggatacgctccttggtgtacttgacagcctcgttgatggcgccttcggcaagaccgagagcctgggaggcgataccgatacggccgccgtcgagggtcttcatggcgatcttgaagccttcgccttccttaccgagcaggttctccttggggacgacgcagtcttcgaagacgaggtcgcaggtagagctgccgcggatacccatcttcttctcgtgcttaccggtggagaagccggggaagtccttctcaacgatgaaggcggtgataccgtggttgcccttgctcttgtcggtcatggcgaacacgacgaaagtggaggcaacgttaccgttggtgatgaagcacttgctgccgttgaggacgtagtcgccgttctcgttcttgacagcggtggtctgctggccggaggcgtcggtaccggcgccgggctcggtcagaccgaacgcgccgatcttgcggccggacagaaggtcaggcagatacttcatcttctgctcctcggtgccgttctcgaaaatgggagcgcagcagagggaggtgtgggcggaaacgataacagcggtggtgccgcaaaccttagcgagctcctccacgcacatggcataactgagaacatcgccgccggcgccgccgtactgcttcgggaagtaaatacccatcatgccgagcttggccatcttttcgacggtctccatggggaagcgctcttcctcatcgagttcctcagctaaaggcttgacttcattttctgcaaattcgcgatacattttgcggaccagcagatgttctttggacagatggaaatccatagtcttttgctccttcactataaaaataattggattgtctaattattcacaaatcagttccatgactctcattatatcctgtgcgtttcattttcgcaaggggaactatcattcctttttggaattcgtgctttttgccgaattcattaaagtctttttgacatttccgttccttttatgacagttttctgtcattttcaggaatcctttccattccaaaagagaaaaggggaggcagtttttgtaaactgcctcccctttttatccttttagggacggattacttcttgctgtaatcgtagaagcccttgccggacttcttgccgagctggccgccgcggaccatcttcttgagcagcagagcgggacgatacttcggatcgccggtctcgctgtagaggacgttcataatggcgaggcacacgtcaaggccgatgaagtcgcccagggcgagggggcccatggggtggttcgcgccgagcatcatggccttgtcgatatcctcgacagaggcaacgccggtctcgaccaggccgatagcctcgttgatcatcgggatcaggatcttgttgacgacgaagcccggagcctcagcgacctcgacaggctccttgccgatctccttggagaggttgtagatgaagtcgaaggtctcctgcgtggtgttggcgccgcggatgacctcaacgagcttcatgctgggcacggggttgaagaagtgcatgccgatgacggcgtgcttcaggccgagacccatctcggtgacagacagagaagaggtgttggtcgcgaagacggcgctctccttgcacatctcgtcgagctcgccgaggagctgacgcttggtgtccatgttctccgccacgcactcgatgacgaggtcggcgtccgccgcggcagacttctcctcgacgaggatgttgttcaggatggcgtccttggcctcttcggtcatcttgcccttctcgacacgcttctgcagggaagcggcgagcttatccttgtggcgctgagcggaagcgacgctggaagcgtacatcagagcggtgtggcccttggccgcgaagacctgagcgatgccgctgcccatggtgccggcgccgaaaactgcaactttcattgtgtgtatcctcctacaatataaatagataattctatggaatcacttgttgataaagggctcgtgcttgcgcttttcgaggaaggcgcccatgccctcctgctggtcggcgctctggaagcaggagccgaaggccttctcctcgatcacgacggcgcggtcaatatcgacctgaagaccgtcgttgatggcctgcttggacgcgcgcaccgcgatgggcgcgttgccagcgatctggccggcgagcttttccgccgcggcgtagaggtcagaaagcggatagaccgcgttgacaaggccgatgcggtaggcctcgtccgccttgatgttgcgggcggtgtagatcatctgcttggccatgccggggccgacgaggcgggcaaggcgctgtgtgccgccaaagcccggcgtgatgccaaggcctgtctcgggctggccgaagacggcgttatcggagcagatgcggatatcgcagctcatgnnnnnnnnnngacgccaggcgaatatcgcatgccatcgaaagctcgcagccgccgccgagggcatagccgcccaccgccgcgatcgtcgggatggggaacgcttcgagcttgcgcatgacgtcgttgccctgcttgccgaaggcctcggcctcctccttgctgagctccttcatctgcgcgatgtccgcgccggcgacaaaggacttctcgcccgcgccgcggacgatcaggcagcggatctcgcttaagtccaccgcgtcgagcgcggcatcgagatcggcgagcacctgagaattgagcgcgttgagcgccttttcgcggtcaatgatgagataggcaatgttgcccttgggttcatatttgacaaaagacatcgtgtgtctcctcctgtcttcttcaactgccccctattatatgggcggcaaggcatatttgcaagagaaaaatcacttttttcaaaaaagtttcacacttttccggtgtcattgcaagaaacgttgcatttttaatgatcttttctcccaatgcagcaactcttgtataaaatttttaaaatgacttgtctcttgcaccaattttcgatatgataggctttaattataggaaaacgaggttcattctatgcgaatgcgcaaaaagaaaaacctgcttccccgcatggagcggtgcggggcgtatcagatcaaggacccctacgagcgcaagggccgctggcacgacttgatgcccgaggcgaaggagatccgcgtggagctcggctgcggcaagggccgcttcaccgtcgagacggccgcggcggagcccgacgtgctgctcatcgcggtcgaaaaggtgcccgacgcgatggtcgtcgcgatggagcgcgcggcgaaggcagagctgcacaacgtcttcttcatcgacatcgacgccaaccagctccctgagatttttgatcagggcgaggtcgaccgcatctatgtcaacttctgcgacccgtggcctcccaagcggcaggccaagcgccggctgacgcacggcaatttcttgaagctctaccgcaaggtgctcaaggacaacggccaaattcatttcaagactgacaacgacccgctgtttgagtggtcaatcgaggagatcccgcagtttggcttcgaactctctgaggtcacacgcgatctgcacgcgaacggacagcgcggcgtgatgaccgactacgaggccaaattctatgccgagggcaagaacatcaaccgctgcgtcgccacgatgcagccgtgggaagagcccgaggaagaggatacgcccgaagaggcggacgaaacggctgaataagataaaaggaaggttgactttgtcagccttcctttttgctttcttccagatacggcgaatacatcatcaccgcgtcgttcacggcgacaggcgtctccgcgagcagattgccctgcaaatccaacgtctgccggtagagctcattgtggcggatgtagccgccccagtactgcgcgcgcatctcatggctgcgctcgacgaccgcatagcgctcggtcggctcggcgctcacgcgccactcgccctcaaggtctgttttgccgacgcggacgcgcatctgataggtgtcctgtgtgtcgttgcggatcatcaggtcaagataggggtaaaagcaggtcgcaccgctgccgaacggctgcgtgcgggtcgcgtcgggaaagacgtcgtagcnnnnnnnnnnggcggtggcgctcgacgaccgtgagcggcgtgtgcagcgtcatccagtagatgaggtttgagagctggcagagcccgccgcccgtcgcggccagatacccgccgttgcgcaggatcataccgggcagataccccttccccgccgtcggctttccgatgagataccagtagctcatcgtttcaccggggcgcagcaaaagcccgtcgagccgcgcacaggcgaggcggagattcgtcaccttgttgcgctggagctgcatgtcgacgtccttgagctttcgcatgagcggcgtatggtgggaaaacgccggatatgctaagtcttccccgctgcgctcgcgcgcaaaatgcttccgcatcgaaagccatctgagttttcgctgcgcgctgaaatacgcgccgccgagcttcagccgcaaattagagcgttttttcggttcgcggacggtcatatgcttccctcccctgtttttctgcttttatagacgcaaaacggcgggaaaaagttccaacattttcttatttcaggctcatcacgtagatttgacacgggttccactcgtcccagagcgtcgggaatacctcaaactcgccaaaaccgagggcgagatagaagcggttcgtcgcgtcgtactcagggtacttccccatctgcacggtcttgacctgcaaaaacgagtagccaagctccttcgcccgctgcttcgctgcggcaaagagcatcttgccgacgccgcggcggtggtattctttcagcacgcccatgacatagagttccgccgtatccctccccgtttcggcaaggtaaaggaagccgacggcgttctcgccgtcgaacgcggcgaaaaacggctgcttaacactcttttcgatgtattcctcgcgcgcctctggaatgccaaaccagtcgggcagcgattctaaaatcaagcgcgtaatgcgccgcttttcatcgggagtcgtaatttctctgatctccat

SEQ ID NO: 485 - DNA, 12288 bp, unidentified
  source 1..12288: mol_type = unassigned DNA
tcagcggaacaatgcctccccgttcaccggttccccgttgtgggtcagagcaaagtatacgttgcttccttcggtgctgtagtatttcgtgggcgctgccacactgccgatggtgtcgccgggattcacataggaattctctttcactgtgatctccgtcagctgtccataagtggcctcatagccgtcacccagatccagggtcaccgccttgccgatctcctcattttcgaagattgaagtcacttttccctgtgcacaagcggtcactgccgtaccttcttccgcggaaaaaatggtggcgggattgtatttatactgatccagtgtagcaaaataagtgctcttgtccatagagtaatgcatcagaatatcactctgcaccggttgctgtaatccgtcgctttctgcaaagtgcagtgtcttctcaacgaccacatccccgcctgctgtctgctttctctcttccttttgtcggtcggcatcggaattctgctgctctttctgtgcggcctccagcagggtctcctgatccgtcagccccggaatctctacgttgccggagcctacctcctggggcatataatccagatcatcctcggtgacaggagctcccgcgatctcatttcccgctgtattatttgccgtcagtccggggatgttctcgtcctccttcagaagatgttcgtcgctattctccgtgatctcctgtaatttgtcatccgcattgttgggaagcgcagtgaagtccaaggtataaccatcatccctggactccacattctgccccttcatatagacccctgtcatggtcaatgctgccagtacaaaggctgaagaggctaacattataatacgttctttgttaataccgctctttttatttcttctcatatcctatccgcatccttcctgttccctgagtcaactgcctgctatacaatcgtttcaaccactttccctggtttatcctatagtcttgcccgattcatgggttttattcagaatgtcttcgatatgaaatttgcatttatttggaactattcagagccatgtaaatagcgtcgaatgtttgcattcgtaagaacatttgatgctatttatagggcgaagtaactgaatagttatatttattctatgcctgtgcggcataggcagccatatccacgtgctgtaccgtacccacatttccgttttcgtataagaaaataccggtcttgcggaccacagcattggtcgcattggcattggtagtgccgtcctgagccttacggtctccctgcagggtaaaatccgtagaagcgttttgcagacagatagcaccgacacccttgtcagaaagtttgtacagtacgtcgttgccgttttcatccttgcaccagatttttaattttgaccagatggaatcgttctcatcgatccagccattgccatcctcatcatactgcgccagatctgcaaagccatccccattccgggtgccgaacagctcactgccgtcgttgatagtgccgtcaccgttcttgtccagtgccagatagccgctgccattcagcacggagatctcttcttccttgccatcggcatccagatcaaaataaaaggtctgatccgacacttctgccacatcagtatccaggttgatcaccagcggatcatggagcgtgaattctgctacattgagttgctctttgtagtattcctcgcatctgcggctcatatttacatttacattaaaattgatctctctgccatccttggtccgtacgcttcccacggtggaaaaactggtatcctcctgttctatgttccaggtctcgctcacatagttcaaaattttcacacgggacgtgaccagattgaacacgtctgacgcaggtgttgcggttccctgtgtgctgccggaattcgtctgggtattatttacgctattccctgtattccagctgtttccggtctgattaccgctgctccatccgttttcctgcatccagtcccgcaaagtgctgttcctggacgggaataataaatcaaaaatataacgcaccgtatattcccggatggtagacaatgtctgttcactggcactgcttcgcatatcccatctggcagaagataccagcaaacgactctgccagtctttggctgtcatcgtggtgttctctgcagtgttctcctgttcctccgtgttctgtgtggtatcctcaccattcggtgtcttctgtcccttagtggatacatctgtcagacctgcctgataatccgttatctcaaatcgtctgacgcttgtcttagaagcgtgatagcttctggcggaatccattcctatgcttgcggaatcaattctcaaatctgtaattttctcctttccccgacctcaccacgaaccaacagggcgcgcttcctgtaacgcttaacagttcaccgtcgcatgtattcataaaagcgcctgctccgcagtcgacgccgctaagcggctcatcttttatttcatacatgcggcgctccgctcatgcaatatcatatgttctgctttgtgtgccagcacccacgcagaacatatgatattgcatggctgaactgttaaactaaaaaaaatggtaaagaaacagaatacatataatatgcctctgtctggttaccatccgtggtgtcattatcaaactgtaaaaaataagtagcaggaagtgactggccatgtcacctctctgctacttatatcgtccgctatggacattttatttagtgttaatttactgctgtttgggctgagtgggagcgccaggggttccgggtgcgggaggcaccggtctgccggctgctttcagctttgctgcgatcatgctggctaccatttctctggtcaccacgatgttgccaccgaagggattgatcacgaatcccagcgccgggctgatattgccctgtgcatctttgcgcagcagcattcctgcataatcgtcaaagttcatggcgaaagtctgctgattctcctcatctctccactttttcagctctgtccagtcagtgaacgccatgaagaacttccgaccgtcctcggtggacagcatcgggaactgtactttggcatctcttgcgatggtcacccggccgttttcatcgggcacaggcaccggatcgatcacgaccggagacaggaactttgctttctgcagttcatccaggaacatctgtctgtgttccggggtgtcctctgcttttaataattcaatggatcccaccatcatggggttggataccggtttgttaaattccatattttttctccttacttctcattgtaactattcagcctctcttcgcaaaacgcatctgcgctggttagtcacatgtctctgaatagttacactcggttatagttgatcaggcatcccttcaggatgatctgacgttcttcgtcggtcagctctcccagcttcagggtgaattccttcatgccttctccgattgttaccacatatgccttaatttcctcggccttgtcttccacggctttcttaataccaggaatgaacaggtaatccagattcttgaaaggcaggtctccgggctggatcaggaaaggaagcatgccccagttgatcaggttggaacgataacgcttggtggcatactcgttggcaatatttgcccagccgcctaataccttctggcaggaagcagcctgctcacgggcagaaccgtctccgggcttcactgcgaaaatagtggaaccgaatccggtgttctcacgacttgcatcgggatactgtttctttacttcacccataacatccttcagtaccggaactgcctgacagggatgtccgccgttcatacgctctttctctgccttctggatctccttggcacgtcctacatactgcggatccttacggcttaaagtgaactctgccagtcccagaggattggagcggtaggaagaggtctcaccggatggaatcagctcatcggtagtagttacgggatcgtggatctcggatactacctgcagtaccagattctcaggcagggcacccatagcgggccagtccttgatattgggaccgaactggatctctacgctctcgtctgccacaccgtgggaatcgaagacacggttcttgtaaatattgctatcgaaatgatatttgtattttccgaaatctccatcgaagtccgttgcggaagtcagcacacccttgttggctgcggtggctgcgatggaacgggcatccatcagagctacggaagcgatctggccgttctgcagcttggagccttcacggttcgggaaatttctggtagagtgacggatactgaatgcgttattggcaggtgtgtcaccggcaccgaagcagggaccacagaacgcagtcttcatcactgcaccggtctctaagatggtagccgcacagccgttgcggatcagctccatgtatacgggcatggatgcgggatatacgcttaaagtaaactcatccgcaccgatgtatctgcccttcaggatgtcggcagccgcacagatattctcgaatccgccgccggcacagcctgcgatgataccctgatctacaatgaacttgccgttctttactttattcttcaaagtaaagtctacggcaccgtccagacttactttcgcacgcttctccgtctcatccagaatatccatcaggttcgcattcagctcttcgatggtgtaagtattgctgggatggaacggcatggcgatcataggacggatcttgtccagatccacctcgatcagtccgtcgtagtatgctacctggccgggattcagttccttatagtcttcggtacgtccgtggatctcatagaactcacggatctggtcatcggtcttccagatggaggacagacaggtggtctctgtggtcattacatcaatgccgatacggaaatcagcactcagggaagccacaccgggacctacgaactccattactttatttttcacatagccgttcttgaatactgcgccaatgatagcaagtgcaacgtcctgaggacctacacccttcacgggagcaccctttaagtatacggctaccacgccgggcatgttgatatcataggtctggttcaacagctgttttaccagctcgggaccaccctcgcccatagccatggtacccagtgcaccgtaacgggtatgggaatcggaacccaggatcatcttgccaccgccggctaacatctctctggcaaactgatggataactgcctgatgagggggtacatagactccgccgtattttttcgcacaggtcagaccaaacatgtggtcatcctcgttgatggtaccgcctacggcacacagggagttatgacagttggtcagtacatagggcatggggaacttctgcagtccggatgctctcgcggtctggataatacctacaaaggtaatatcatggctggtaagcttgtcgaaacggatcttcagcttgtccatattgccggaggtattatgctcctgcagaataccatatgccatggtgtttttcgctgcttcttctttggagatcgtaatgccggtcttcgcctgtatctgactggctgcttccggggtatccgctacgatgtccgtaccgtttaccaggtaagcgccgccctgtgttaactgaatcatgctcgtcctcctgttattccacttcttatgcatagatagagtgcatcttgtgtgcacttctttcattatactggattgttttctcagatgcaatgatcttataggatgtttttgccactgtaccacgctaaattttatttttctccgggaaccattcctcttttgttccggtgttgctataatatcctcagaaattatgccattttccgaaaatctatacgaaaacgacagttgtcggccgaattccggcggcagcggaaaggaaccttatgaatgtagtaatagctatcgattccttcaagggaagtatgacctccatgcaggcgggtttgagcgccgccacggggatcaaacgtgtttataaagatgcacatattaccgtccgtcctctggcggacggcggggagggcaccgtcgatgctctggtaaacggctgtgacggccgtatgacacaggtgcaggtcacaggcccttccggtcaccccgttgtctgtccttacggcatcgtcgacgagacccataccgcaatcattgaaatgtccggtgccgccgggattacccaggtcagcggagaggaaaagaatcctctgaacaccaccacttacggtgtaggcgaagtcatcaaagatgcaatccagaacggctgccggcattttattgtcggtatcggtggcagtgccaccaatgacggcggtgtcggaatgctgcaggcacttggctttggctttctggataaaaacggaaatcagatccgcttcggagccaaaggactggaggatctggaatccatcactacggatcatgtgcttcccgaactcaaggaatgtactttccgcatagcctgcgatgtctccaacccgctctgcggagagcagggatgttccgccatctacggaccgcaaaagggcgctacttccactatgatcctgcagatggacaaatggctggcttattatgccgctctggccagagaacagtttcctcatgccgatgccaaatatcccggtgccggtgctgccggcggtatggggtttgcttttcttaccttctgcaatgccacactggaatccggtattaagatcattctggaagaaacccatctggaaaaatatatccgggatgcagatgtcgtgatcaccggggaaggccgccttgacggtcagacggttatgggaaaagctcccatcggtattgccaagattgccaaaaaatatgaaaaaccggtacttgctttttccggctgcgtggccaaagaggccgttgcctgcaacgcagagggcattgatgcctttttcccgattctgcggaacgtggtatccctggatgaggctatgcataccgacaatgccatgaccaatatgtcggataccgtagagcaggtattccgggcgcttcagatttttcaccgttaagaatcacaaaaggacatgacccaccggccatgtccctttgtatgtttcaatattgttttattattcttcatatccattcggattgttcttctgccatctccaggagtcttcgcacatctctttgatgccgttctcagccttccagccaagttccttctctgccagagaagcatcggaatagcaggtggcgatatcgcctgcacggcggggtttgatcacgtaaggaatcttcacgccggtagctgcttcgaagttcttcacgatgtccagaacactgtagcccacaccagttcccagattgtagatcttcagtcctgcattctcctcaatcttcttcagagcctttacgtggccctttgccagatcaacgacatggatgtagtcacgtacaccggttccgtcgggggtatcgtaatcatcaccgaagacacccagctctttcagcttgccgactgctacctgtgtgatataaggcatcaggttgttggggataccgttgggattctcgccaatggtaccgctcttgtgagctccgatagggttgaagtaacgaagcaggatcacattccattcgggatctgccttctggatatccgtcaggatctgctccagcatagatttcgtccagccgtaagggttggtgcactgtcccttggggcattcctctgtgatgggaacaaatgcgggattaccgtatacggtagcgctggaagagaagatgatgctcttcacaccatgttttctcatgacatctaccagagtcagggtaccggcaatattgttctcataatattcccagggcttctgtacggactcaccgactgccttcagtcctgcaaaatgaatgactgcgtcaatctgttccttgctgaagatctcttccagagcttcacggtccagaatgtctgccttatagaaaggaaccttcttgcctgtgatggcttctactctggggatcactttctcacttgcattgcagagattatccaatacaacaacatcatagcctgcctgctgtaattccactacggtatgactgccgatgaatccggcaccacctgttaccaaaattctcatacactctctcctatccgccgtgcataggacaatactatttgttcactatggcggctgcacaatctctcatctgtcagagccggatgaaattttttcttcgtttcttacagtatcagattactgtaattctatcgattcctcaataaccttatgttgtgaaaatctgtcgaaatgtttacagcaccacaccattctcggtgagcagttctctggcactttccacagagtccacaccggtcttgttcttgatcggcgcaaattcttttcttctgactacctcgaagggcaggcagctgtccatctgatggatcatatccagcaccagactctcgaatttataaccattgggagtatccggctttaccaactctcctgcagcatccagataagggatcttcttctctacgatatgcagcggcatcttctctgccatgatcttttccagatcctgtaccttgaacagataattcaggatcacaccataattatacgcgggttctcccttctcatccttagcattcatcagttcatcagtcagctcgtagtactccacgatggaaggtctgccgtcctccaagcacataactcctactttttcatccggtgcattcttacggaccaccttggagcctacgacacagcctctctggatcgtagcaccaataaagcagggatcagcgatccgctgcagtacattgtctaccgcaaacacattcagccactcaatgccttcgttatgtacgatatccagcatgccgttatttttcatggaaatgaaccagccgccgttaccgttgggagaggtggacagcttgcccttctcctccagataaatcttgccttcataatcggttgccgcagccatctcctgtttgaagaagtggacataatccgcgttgtatccgaagaaatcatgctcttttaaaaatgcgatcgttgcgtcattgttcttatcgctggtcatcacaaacaggtggatccagctgtctgcctgatgcacgacttccatcaggttattgatcaggcattcaaagatgtacagttcacgggtcagacccacattgtacatgcccttgggattatcggaacccagtctggtacccatgcctccggcaagaagaacagctgctaccttgccctgtttaattgcgtcaatacccgtccttgtaaagctgtcacgatttgcctcgatctcgtctaactgcattgcagccaacggtgtgatcactcctttttttgccagatcttctttatgcttgcaagcttccagaatgctcatatccgtagtttcgatctgattcagaatcccctgcttctcttcctcgttgagctccccgtaatacttcagaacatgttcctgaccatactttgcaagcttctccttagcctgttccagtgtcatactcatattcctacctccgttttattttctccgactattccaccccgggtaacagtcaattttctctattatacttgatatttcctgtgattgcaaaccttactcccgggatcgttcccgcccgtaagtcctgccgttaagattctgtaaacgtgttgcaaagattttgtaaatatcccgacaaaatggtgttaagggtcgctcaaaactattcacccgggggtatctgtttactataatacggtatgtgaagtttttaaggacttcatcgaatgttgtacagaatgacagaaagttgaggaattcattatgaatattggaattttaatcattgcaatcgtaggcggtgttaccggacttttatccacagcatatctggcagtcagtttccctgctgtgctcctgtggaagctctatcgcagagtagttcacagaattcctgtcacccaatagtaatcagtcagctacaaacactttccctctaaaaaggacccggaagcttttgcccgggtcccttgtcgtattcactattctgttttactcctgcaccggttcccaattttcatccaccaaggtcgcagttactgtaattccctccggtgcattttctgcgcagatcacaagatagaacattccttcttccgaatccacggcatattctgacggatcctccggcaaaaagacagaaaatccctccgggtactgctgcatctccagaaatcccttttccagcagtgcagttttgtaggcttcttttactgcatcccggtccccacaggagtacacctttattgaagtaaaagttccatcttcgctgtctgtctccgtacaatctgaaatcacagcatcgggatagataatatcctgctgcaccgctttcagatattccgttgacatccggacactctgtaagatctcaaaagtatcttttccatcctcggaatgcgccatgagtaccagactcaaaagcaaaatgagcagataacttcccagtgctcccgccagtattttcgcaaaaggattctctggctgccccagatttgtataagaagtgatgatccagccaaaatttcggtagtccactgcggtattacagtattcgcagactccgccgcccaaaatgtccacactgcctccgcagttggggcatttgtattcccggagtgccctgctgtgctgcgttaccacatcctgtctgccttccagttccagccggatctcctcataacggttccagatcttctttcctgtatccagtgtcaatcgggtcctcacttccacgctgattctgtaagactctccccgtgtctccgcctccagaaaacgcacaccgcaaatgcaacagtccaccacattctgataccgtaccaccaccgtatccagatcacaggatgcgaaaaagcgtacctgctctgccgtatccgccagatggatcattcgcagctggtattccagattctgaagaaaattacccgtggagaattccgggattgcggcctttactttcgattcgtcttgaattctcggctttctgcgagtctccatcacgatcaacattacaataaatataatgagcatgtaaaacaacgaccggaaaaataccggagccagaccaattcccagcatcatggctgcggctgcctttaccgcattgtatccgttcctgcccaacgccaacagcaaaaacataatgccgcccgcacagatggccagtaccgcaagagaaatcgctgtaattcccaccacagcaccggctttcataaagttggaaatacttttctgtcttgcgtcctcctccagagaaaatccggatacctttgtttcaaaatcactgacgagaaactttgccccgcaggcatcgcagccatcgatatagctggtcagttttccctcatgtccacagttagggcagataaccatatctccctgcacatccgctttcaaaaagctcgccactgcaatctccggtgtctttaggaacgcaatcttttttccattgcggtaataagtccgtctcatttttaccggctgggtacggcggcagctataatcataaccatccttccagggaccatcatagtccgccagtcgtgccggctcctgcatctccatatccaccgtcagttcccgctgctgcagtctttttctgctcaggcgcagactttgccagaaaggctgggttgtctgctccatcaggttctgttccgcttccccgttgccctgatagaatgcttttaattccccgtagaagtcttctgtccgtctctcgatctctttccgtgcatcattcagaaactctgttgccatttcgtttttctctcctcataagtgattctgccgcgcaaaggtcctgatatcttttgtatcttatgtcccaactgctttgtcccatatagctatgtatccattatataagttggtacccggtatttcaagacactttcccgtatagaatgatttgtctcatcgaatatctagtgctggtgcagatacttctctctggtagccagtccgccgcggatatgacgctcggatttattcacatccaataccttccgcgcctgctttgccaacgccggattcacctgggccagccgctccgtcacgtccttatgtaccgtgcttttgctgatgccgaaggccttggcagtctgccgcaccgtggcgttgtggtcgatgatatagcctgctatccctatagctcgttcttcaatatagtctttcaaaggaaaacccctcag

SEQ ID NO: 486 - DNA, 69110 bp, unidentified
  source 1..69110: mol_type = unassigned DNA
  misc_difference 43846: note = a, c, g, or t
  misc_difference 43847: note = a, c, g, or t
  misc_difference 43848: note = a, c, g, or t
  misc_difference 43849: note = a, c, g, or t
  misc_difference 43850: note = a, c, g, or t
  misc_difference 43851: note = a, c, g, or t
  misc_difference 43852: note = a, c, g, or t
  misc_difference 43853: note = a, c, g, or t
  misc_difference 43854: note = a, c, g, or t
  misc_difference 43855: note = a, c, g, or t
  misc_difference 43856: note = a, c, g, or t
  misc_difference 43857: note = a, c, g, or t
  misc_difference 43858: note = a, c, g, or t
  misc_difference 43859: note = a, c, g, or t
  misc_difference 43860: note = a, c, g, or t
  misc_difference 43861: note = a, c, g, or t
  misc_difference 43862: note = a, c, g, or t
  misc_difference 43863: note = a, c, g, or t
  misc_difference 43864: note = a, c, g, or t
  misc_difference 43865: note = a, c, g, or t
  misc_difference 43866: note = a, c, g, or t
  misc_difference 43867: note = a, c, g, or t
  misc_difference 43868: note = a, c, g, or t
  misc_difference 43869: note = a, c, g, or t
  misc_difference 43870: note = a, c, g, or t
  misc_difference 43871: note = a, c, g, or t
  misc_difference 43872: note = a, c, g, or t
  misc_difference 43873: note = a, c, g, or t
  misc_difference 43874: note = a, c, g, or t
  misc_difference 43875: note = a, c, g, or t
  misc_difference 43876: note = a, c, g, or t
  misc_difference 43877: note = a, c, g, or t
  misc_difference 43878: note = a, c, g, or t
  misc_difference 43879: note = a, c, g, or t
  misc_difference 43880: note = a, c, g, or t
  misc_difference 43881: note = a, c, g, or t
  misc_difference 43882: note = a, c, g, or t
  misc_difference 43883: note = a, c, g, or t
  misc_difference 43884: note = a, c, g, or t
  misc_difference 43885: note = a, c, g, or t
  misc_difference 43886: note = a, c, g, or t
  misc_difference 43887: note = a, c, g, or t
  misc_difference 43888: note = a, c, g, or t
  misc_difference 43889: note = a, c, g, or t
  misc_difference 43890: note = a, c, g, or t
  misc_difference 43891: note = a, c, g, or t
  misc_difference 43892: note = a, c, g, or t
  misc_difference 43893: note = a, c, g, or t
  misc_difference 43894: note = a, c, g, or t
  misc_difference 43895: note = a, c, g, or t
  misc_difference 43896: note = a, c, g, or t
  misc_difference 43897: note = a, c, g, or t
  misc_difference 43898: note = a, c, g, or t
  misc_difference 43899: note = a, c, g, or t
  misc_difference 43900: note = a, c, g, or t
  misc_difference 43901: note = a, c, g, or t
  misc_difference 43902: note = a, c, g, or t
  misc_difference 43903: note = a, c, g, or t
  misc_difference 43904: note = a, c, g, or t
  misc_difference 43905: note = a, c, g, or t
  misc_difference 43906: note = a, c, g, or t
  misc_difference 43907: note = a, c, g, or t
  misc_difference 43908: note = a, c, g, or t
  misc_difference 43909: note = a, c, g, or t
  misc_difference 43910: note = a, c, g, or t
  misc_difference 43911: note = a, c, g, or t
  misc_difference 43912: note = a, c, g, or t
  misc_difference 43913: note = a, c, g, or t
  misc_difference 43914: note = a, c, g, or t
  misc_difference 43915: note = a, c, g, or t
  misc_difference 43916: note = a, c, g, or t
  misc_difference 43917: note = a, c, g, or t
  misc_difference 43918: note = a, c, g, or t
  misc_difference 43919: note = a, c, g, or t
  misc_difference 43920: note = a, c, g, or t
  misc_difference 43921: note = a, c, g, or t
  misc_difference 43922: note = a, c, g, or t
  misc_difference 43923: note = a, c, g, or t
  misc_difference 43924: note = a, c, g, or t
  misc_difference 43925: note = a, c, g, or t
  misc_difference 43926: note = a, c, g, or t
  misc_difference 43927: note = a, c, g, or t
  misc_difference 43928: note = a, c, g, or t
  misc_difference 43929: note = a, c, g, or t
  misc_difference 43930: note = a, c, g, or t
  misc_difference 43931: note = a, c, g, or t
  misc_difference 43932: note = a, c, g, or t
  misc_difference 43933: note = a, c, g, or t
  misc_difference 43934: note = a, c, g, or t
  misc_difference 43935: note = a, c, g, or t
  misc_difference 43936: note = a, c, g, or t
  misc_difference 43937: note = a, c, g, or t
  misc_difference 43938: note = a, c, g, or t
  misc_difference 43939: note = a, c, g, or t
  misc_difference 43940: note = a, c, g, or t
  misc_difference 43941: note = a, c, g, or t
  misc_difference 43942: note = a, c, g, or t
  misc_difference 43943: note = a, c, g, or t
  misc_difference 43944: note = a, c, g, or t
  misc_difference 43945: note = a, c, g, or t
aaagtacctgcattcagatatagatacacttgagagagcggagataatacgtgacctgcgtcttgacgtatttgacgtgctcgtcggcatcaatctgctcagggaggggcttgatatcccggagattacacttgttgccatactcgatgcggataaggaaggcttccttcgctcagagacctcacttatacagacgataggacgtgccgcacgtaacagtgagggccatgttatcatgtacgctgacaagattacagactccatgcgtgtcgcaattgacgagacaaagcgtcgtagaaaggtacaggaagagtacaatgaggctcacggcatcacaccacagactatacagaaatccgtgcgtgatctcatagctatctcaaagaaggtagcggccgatgagaatgctcttgacaaagatccggagtcaatgagcaaaaaagagcttgagaagcatattgcagatatagagaaaaagatgaaaaaagcagcggcagagctcaatttcgaggctgctgcagagtacagggataagcttattatgcttaaaaacacattgagagacgtaaaataaaagcttataacatccggaagcaatttggaggaacacaaattatggcaaaaaaagaaagaaaatacatcaaaatacgaggtgccagcgaacacaatctaaagtgcgtcagtctcgacatcccgagagatgagtttgttgtttttacagggctttcaggctccggcaagtcatcactggcatttgataccatatatgctgaggggcagcgcaggtacatggagtcactttcatcgtatgcacgtcagtttttaggacagatggagaagccgaatgtggagtctatagagggacttccgcctgccatttccattgaccagaaatccaccaacaagaacccacgttcaactgtcggaacggtcacagagatatatgattacttcagactgctttatgccagaattggaataccacactgtccgaagtgcgggcgtgccattacaaagcagactatagatcagatggtggatactgttatggcactgcctgagcgcacccgtatccagcttcttgcaccggtggtcagaggccgcaagggtgagcaccagaagctgttcgagagagccaaaaagagcggatacgtgcgtgtgattgtagatggcagcatgtatgagctctctgaggatatcccgatggagaaaaatataaagcacaatattgatattgttgtagaccgtctggttgtaaagccaggcatagagaagaggcttactgattcacttgaaaatgtatttgaactgacagagggcaatgccatagttgatattgtggatggcgaacagatgaccttttcccagaattttgcgtgccctgactgtggcataagcatagatgaggttgagccgagaagcttctccttcaataatccgttcggagcatgtccgacctgctacggactcggctacaagatggagtttgacccgcagcttatggtgccagactcatcgctttccatatctgagggcgccatacaggtgatgggctggcagtcatgtacagacccaaagagctatacctatgcgacacttcgtgcgctgcatgagggctatgggcttcctctcgacacaccgattgatgatttatctgcagatatgaaaaagctgctgttttacggtggagacggcagagtgctcaaggtcagatacaaggggcagagaggcgaaggagtctatgaccttgtatggaaaggccttgtggacaatgttgagcgccgatacaaggagaccttttctgatacggcaaaggcagagtatgagcagtttatgcgcattactccgtgtacgagctgtaaggggcagaggcttaagccatcgtcacttgccgttacggttgcggacaagaacatatatgagatgacctccatgtctgtgaaggagcttgtgaagttccttgctgatatagagcttacagagcagcagcactatataggagaccagatactaaaggaaatccgtgcgagagttggctttttgcagcaggtcggccttgattacctcacccttacccgtggcacggcgagcctttcaggcggggaagcccagcgaatcaggcttgccacgcagattggctcaggacttgtaggtgtggcatatatacttgatgagccaagtatcggactgcatcagagggataacgacaagctgcttggtgcacttatgaatcttaagaatctgggaaatacgctcatagttgtggaacatgatgaggataccatgcgtgcagcggattatatcgtggatgtaggaccgggagccggctcgcacggtggggagatagtggcagcaggatcgttaaaggacattataaagtgcaaaaaatcactcacaggagcatatctgagcggcaaaataaagataccggtgccacaggagaggcgcaagccaagcggatatatcacgataagaggagccagggagaataacctgaaaaatattgatgtgcagatacctcttggtataatgacctgtgttacaggcgtgtcgggctcgggaaagagctcattgaccaatgagatactctacaagcatctggccaaatccttaaacagagccaggtgtatcgcaggtgaccacgatggtatagatggtcttgaacagcttgataaggtcatagacatcgaccagtcaccgataggccgtacaccccgctctaatcctgccacatatacaggtgtgtttgacatgataagagacctgtttgcatcaacacccgatgccaaggcaaagggctataaaaagggccgtttcagtttcaatgtaaagggcggtcggtgtgaggcctgcggcggcgatggaatccttaagatagagatgcatttcctgcctgatgtatatgtgccgtgtgaggtctgtggaggcaaacgatataacagggagacgctcgatgtaaagtacaagggcaagagtatatacgatgttcttgatatgacagtggaggaggcacttgagtttttcaaaaatgtgccaaagatccagaacaaaatccaatcgctctatgatgtcggactatcatacgtgaagctgggacagccgtccacagagctttcgggcggtgaggcgcagcgtatcaagcttgccacagagcttagcagaaagagtaccggaaagaccatatatatacttgatgagcctaccacggggctgcactttgcagatgtacacaagcttgtggagatactgcgcaggctctcggacggaggcaatacggtggttgttatcgagcacaacctcgacgtgataaagacagctgactatatcatagatatgggacctgagggcggagacggcggcggaaccgtcatagcgcagggcacacctgaggagatatgcgaggtaaaacagtcatatacaggccgttttttgaaacaatatctggaaaaagacaaggataaactttaaaattttattaaatatgacctttttcaaaaaaaaagtttgaaaaatgggatttattgtatataataagagagtgtatgtgtaaatttaaagatatggcaggaaaggggctattaaaatggtcggatcagatatcggaatcgatttaggaacagcaagtatacttgtttatataaaaggaaagggtgttgtgttaaaggagccttcagtagtagcctttgacagggacaccaacaagattaaggcaatcggagaggaagcacgcctcatgctcggaaggacaccgggtaatatcgttgcagtcagaccgctgcgtcagggtgttatctcagattatacagttacagagaagatgatcaagcacttcatccagaaggcgcttggtaagaagagcttcagaaagccgctcgtgagcgtatgtgtgccaagtggtgttacagaggttgagaagaaagccgttgaggatgctacatttgcagcaggagccagagatgttaagattatcgaggagccaatcgcagctgcaatcggtgcaggtattgatatttcaaagccgtgcggaaatatgatagtagatatcggaggcggtacatcagatatagcagttatctcactaggtggttcggtagtcagcacatctatcaagatagccggagatgattttgatgaggcaattgtcagatacatgagaaagaagcataaccttctcatcggagagagaacagctgaggatatcaaaatcaagattggtacatgctaccctctcccacagccggagacaattgaggtaagaggaagaaaccttgtaacaggacttccaaggactattacagtcagctcagaggagacagaggaagcacttcgtgaggcaactcttcagatagttgaggcagtgcactcagtgcttgaaaagactccaccggagcttgcagccgatgtcgcagacagaggaatcgtgcttacaggaggcggttcactgctcagaggtcttgaggagcttatcgaggaaaagacaggcatcaatacaatgactgcagagcagcctatgacatgtgttgctatcggtacaggaaagtatgtagagttccttgcaggcaagagagatgaagaattctagaatatacgttttataacaggcagccgtgagggcgatgatatgtccctgcattgcaggaatgtattgtcgcttttttgttaatattgttacaaatgggaatattacagtcagggggattagtgaacaaaataaaggatattgggagaggtgtaatcaatctggtatttccaccgcgctgtccggtatgtgatggtataattggtccggttgagagatatatacacagcagatgctgtgaaaagctctttccggttgagcagccacagtgtatgcgttgcgggaagccggttttgtctgagcgaagagagtattgtgacgactgcgcacgggcactcgagcatcacaggcagatgcgggaggatgacagctacaggcagggcaaggcgctttttgcatacaagggcagcataaagcagaccatgtacaggttcaagtattcaaacagacgtgagtatgcggcttattttgcacagacagcagtggaaagatattcggactggatactaagctgtgggatagatgttattattccggtgccgatgcaccgtaaaaaaatgcgccagagaggctacaatcaggcagagtgttttgcaagggcattgtctgaaaaaacaggcataaggatggcaaaagggcttgtgcgcagagtgaaaaataccagtccactcaagacaatggggtatgttgaacgcagaaattgtctcgagggggcttttcaagtggcggatagtattgtacaatatgaccaaatactaatagtagatgatatatatactacaggcagtacggcagagtcgattgggcatgagatagcaaagaaatgtcctggccgtgtatatgtgctgtgtatttgcataggacagggaagttaggagggttttatcagatgagaatatctaattgtaagggctgtggcagaatatttaatgtactgtcagatgagcagtactgcccgaactgccagaaaaaaatggatgagaaatttgatatagtaaagagatttgttgaggataatccaaatgtgccggttgagacagtggccaaggagaccgatacatccatgaagcagataaataggtggatacgtgaggaaaggctttcgttttcaccggattcatcatatggtataccatgcgagaactgtggcaggatgatacgtacaggtagattttgtgatgagtgcaagactaagctcacaaacgcactacgcagtgcccttgacacaccaaagagccaggataggcagctgtggcagcaggatgacaaaaaccgtatgagatatatcaagtaacaggtaagaggatgatttatgataaacgaagaaaaagtaagggaactgtttaatattgctctatgtgacagcaaaagcgatgacagccgtgtgcagaagcagtccgcaagctattacggatgggactatatatggaaagagggcttaaaaagcttctttacaggtacattcgcatttgcagggcttgttgtgatgtgggttgctgtcaatgcagcagagcttttggacagaatcaataagcttgattttaaggcaatgggtgtcacaataggcatactgtatattgcgtttatggcggtttacatttttgtcacaattgtggtgtatactgcaagatataaggccggcagaagagaagtgcgcaaatacgcaaatcacctgaaggcagtgggcagaatatattcccgtgaggaaaagattaagcgttagggaggctttatgaacaagttactggaaattaaggataaggcagtcaaattttgcggtgagtatgagcactttatacttccggttgtgagatttgccgttgcatttatcgcatttataacaatagatttgaatatcggctatatggcgaaaataagctcgatgcttgtggcactgcttttagcgcttgtgtgtgcactgcttccggtgaatgcaatactctggattgcttcgattatgatacttttagatatgtatgcgctgtccatagaggtttttgctatcacatttgtactttttttagtactgtattttgtctattttcgttttgcaccgaaggatggcatgcttgtgatacttacacctatatgctttcagcttcacataccatctgttgtgccggttgcagcaggtcttttaagaagagcttattcggttgttgcaataatatgtggcacactgctgtactatttccttgacggaatcagacagaatgcatcagcgcttgcagaggtggtagataaaaaggggcagagcactacaaaactcaatgtgacaatgggacagcttcttgacaacaaagagatgtttatagttatggcaatctttgttatcaccacactggtggtgtatcaggtcagacgattgaaaatcaacaattcatggactgttgctaccatagcaggaggactcgtacagttggttgcacttgttgttgcttatctggtgctcggactgccggagaagataatctggcttgtgctcagcactgtagcagctatttttgcaggtgttgtcatacagtttatatttatgaatcttgactatgcacgtacagaaaatgtacagtttgaggatgatgaatattattattacgtcaaggcagttccaaagaagatgattgccaaggaggaaaaggttgtaaagcactttggcaatacaggaagccttggaaagaagattcagagacataatcaggaaaatatcagcaaagaggctattgcaaaagatctcgaaatagacgaaaatatatttgaggatgacaaatagttacatagtataagagaaaggagggcgctatggataatgtgagtggtgtattgatacgcttcaaggatcagttccttacattcacaaatgtgccgggcatcaaaatcggtgtgatagacattatagagatacttattatttcagtgctcttctatcatatacttttgtggataaagaccacgagggcatggaatctgttcaagggccttattatcatactgttgtttgtgcttgttgcagcattgttccagatggatacaatactgtggcttgctgagaaactctttaatataggtctcgtggcacttgttgttatttttcagcctgagcttcgaaatgccttggagaatattggtggaaagacctttttgggtgatttcttcaataccggcaggggcgagattgagaaattctccgacaagacaattgatgagctggtgcgtgcatgctttgcgatgggcagagtaaagacaggagcgctaatagtcatggaggatgagataaatctgggagagtatatcagaacaggaatagatgtggatgccatacttacaagtcagctcctcatcaatatttttgagaaaaatacaccgcttcatgacggagcggttatcgtgcgtggcaaccgtgtggtgtcagctacatgttaccttccgctatcagacagcctgtcactctcgaaggatttgggaaccagacaccgtgcagcggtcggagtcagcgaggtaagtgattcgcttactatcatagtttcagaggagacaggatcagtttctacagcatacaaggggcagattgagcacgatatagatgccgatcatctacgcacacagcttaagcttctgcagaacagacatagggagccgggtaaatttgaattaattaaaaggaggtttaagaatgggaaagaagcttctaaaaaccttcacaaataatataggctttaaaatacttgcgatagcatttgcatttatactctggcttgtggtctacaatctcaatgacccggtcaagacaaagacatttaccacaacagtcaccgtcacaggccgtgattcggttgttgacaaggggctatggcctaccatcaaggattcggaaaagaccatcagcttttcggtatcaggcaagagaagctatctgaacgagcttgatgattctgatttttacgcaaatgtcgaccttgcaaatatcatagtagataaggatgatacgaataaggcaagcgtaaaggtagatattggatgcaccaagtacagacattcgattaccttcaacggtggagaccatatgctcccgctttcggttgaaaaatatatgcagaagcagtttgaggtaaaggtatcattggatggaagtctctcaggtgcgaaagcactgggaaacaagccacaggcaaatccaaaggtagtaaagatcggaggtcctgagtccattgtttcaactatagcatcggccaatgtaaatataaaggtcgatgacaataccataatatcagataatcagataactgatcgcggtgatctcactctgattgatgataatggcgatgagatagatatatcaaagcttgatgtggacagccaatatcagtctatagcagtgaccgttgatgtcctaagtaccaaggaggtgcctatcaagtgtactacgacaggctcaccggcaggaggaaagagcgtgctcggagtagaactatcagaggagtctgtaatgctcaaaggtaatgcagaagcattgaacaatatcacatctatagatgtgggcccaatcgatatatcgggcgcaacagacgatataagtacatctgttgacctgacaggatatctgccggatggagtttttatagtgaactcatccaaggcaaagctcagtatagatataaagattgaaacaaatgcgacttcaaccatgacgctgaacagttccaatatcacatatgacggactggaagagggatatacgcttacatttgtaacagataagagcagtgtcatagtaagcggcacccagtctgatatagatacactttcgggaactacactgaaggggaaaattgatgtgacaggccttggtacaggtacacatacagtgacggtaaagccaaatctggatgagaccaagtacacatggggcgagataaaggttcagatagttatcggaagggaaggtgacggaggcggcacaacgggaactgatggtacaggaacagcctcgggctcaacaacaggcgataccggcacaggcggttcatcgtcatcgggcagcacatcgtcaggaaacaccggaaataacggctctgacagttcatcacattgatagatatataaccgaaaagaggtaataaaagtggtagcacaaaaaataataatcaagaatcctaccggattacatttacgtccggccggcaatctctgcaaagaggcaatgaaatttaaatcaaaggtaacatttatatatgacgagaaaaatgtagctaatgcaaagagtgtactttcagtgcttggagcatgcataaagtcaggcgatgagatagagcttatctgcaatggcgaggatgagagtgaggcgcttgaacatcttatacagtacatcaaggatggactcggagagtagtacacaaggaaacaggtatacatggagaaacatatatggagaagcttttaaccatagtcgttccggcttacaatgttgaaaagtatataaagaactgtcttgactcgtttatagatttgtctgtgctcagaagtctggagatactcatagtggatgatggttccacagattctacagccagcctggcacatacctacgagcagaaatatccatacagcttcaaggtgctctctaaggagaacggaggccatggatctaccatcaactatgcgataccgcgtgcaacaggaaagtatttcaaggtggtggatggtgatgactggctggacaagagccttttgccacaatttgtacagcttttgaagcacacgcactcggatgtcatatccaatgacttcaacctggtggatgataagacaaagaaggtcacaaagcgcagaaaggcagtgtccaactcttatcactacaacagggagtggggctttgctgaggcagtcatggacccgctgatcactatacattccatgaccatccgtactgatgtattgcagaagaatgatattcgtgtggatgagcactgcttctacgaggaccaggagtatatactctaccctataccatactgcacaagcatcacgttttcaccactgccgctgtatcagtacagacttggaaggagtggccagagcgtggacataaagatgatgatcaagcgtcatgaccagcaccttaaggtgcttgatgcactgtttgagtacaacaacgtgcacggcaatctgcagacctacaagaagcagtaccttgagcgcggcatagccgaggcagtcgatgatgagtaccagatatttctggcaaagggcaatgatacaaggaacgttgagcagatgaagaagtttgacgagatgctgcgtgaggagcacccgggagtgtaccaggcgtgcaacaggaagagcgtctggatgcttagaaaaacagggtttaagatatttccgatggcagcatgggtctatagcagactgcgtggtaattaatttcatgaataggcgttaatgagtatgcaatactctttttaataatagtaatcaggacggatagaacagttaatgagtaaaatattatcaatcataataccaacatataatgcagaaaagtttctgaataaggggctgtcgtcatttctggtatgcagggatacagatgcacagacagcacagcacaactgtaaaatggcaacggagggccgctttgaggaaatagatattgacaaggctatactcgataagcttgaggtgatagtcgtaaatgacggcacacctgacaaaagtgttgaagtggcgcagaaatttgtggactggtatccggatacctttgtcatagtaaataaaacaaatggtggacacggttctgcaatcaacacaggcgtggagcatgtgagaggaaagtatttaaaggtggtcgatgcagatgactgggtagatacgcttgcgctaaagcacctggttgaatatctcgagcatgtagattcggatgcggtgatacaaagcttcaggtattatgacatatcaaaggatgagtacagaccggcagatgtgagtgtgcctgattttacaggagagtacaatttaaaggatatagtaaatatgtgggatgatgtatatgatggtctatcatttcacggagtgatatataacacatggttctataaagcacttggatataagcttacagagcatgtattttacgaagaccaggagtatgcaactgttccgttttcgtatgcaaaaactgtcagatttattcaggaagagttgtatgtatacagagttggagatgtaaatcaaagtgtttcagcagcaagtcaggtgaagcgtcttccagatttggagcaggttatatttaatgtacttgaggcagagaagagctttgcaaaaatgccacagggtggaaaggaacactttatcagaaagacgtcgggcataatcacaagctattatcaaatagctttgataaaaaataccgacagacaatccggcagagcgatagtagagcagtttaacatgaagcttgctcaaaaaagtgcacttatgtatgaggcagtacagcgtaaatataaagtattttggctgtttaataagctgcatgtgagcaacagcttttacgagaatcaatttgcaaagctgcttgagtttgccaaaagggttggcagagcagacagactatacagaaaataatactgactaccattgtcaaatatggtgacagacagcgatataagtggaaattaacatatagaaacaggaattagataggatatggaaacagaaaataaaaagatactatcaataataataccgacatataatgcggcaaagtttttggataaagggttatcatcatttattattgatgataactctcttttaaatatgctggacattgttgttgtaaatgacggctctaccgataatagtgtagaaatcgcgcaaaaatatgtaaataaatatcctgacgtgtaccagatactgaataaagaaaatggtggtcatggctcggcaattaatgaaggagtaaaaataataaaaggaagctattttaaggtagtagacgctgatgactgggtaaacactgatgtgttgaaagaaactatttgttatcttaaagataatgaaaataaacatgagaatttcgcagatgcagtgctgatgagctatagatcatatgtgctgcagagagaaaatactgatgagtatccgtacgacgataagtatataacaaaaaatggtggaccatataatgcaggatatgtggatgagcatctgtatgatttctggtgggggctgagtctgcatggggtgatatataatacgcagttttatagaaatacaggactgacactttctgagggggtattttacgaggatcaggagttttcaataatcccaatggcatatgcagaaagtatctactcatatgataaggcactttatgagtatagagtcggtgacgtaaatcagagcgtttcgatagaaagctcactgaagaggcttgaccattatgagaaggttatcatgaggctgattgaggcaggccgggatgcggagcactttagtataggcggaaagcagctgtggtttgataaaacaagcaaatttatcaacgattatttgcagctttgcctgattagaaacactgataaaaaacagcttagaaaaaggatgaagctgtttgtcagtcaaatcgaaaaaaagaatacagatatgtataaatgtgtaaataagaattataaagtattttgtatgttgaataaaatgcatatgagcgataaggtttatcagaactattttatacgcctgttacatattgtgcgtcattaggaagctttttgttatcataatgatgaataatatgtttaaataatcggaaaatatgtgacaaatctcacttgaggcatatataagaaagtgataaaatatggtgctgtgagaataatataaaattaagataaagaggacaaagatgaagaagaaaagtataaaactcctggtagttttggcctgtgtgcttatggcattgggcatggcaagctgtggaaagaaagcatacaagacattccctgaaaagtacaagcttgcatcagttgatgtaggtggaatgactgctgacgaggcaaagaaagccataaagaccgctgtaggcaagtataagatatcagtgaagcttgacgatgcatcatttgatatgacagctgaggatttgggactcaagtacaatgacaaagcagatcttcaggaactgataaatgcggcgaataaggataaggaaccggaaaagcaggtgaagctttttaaaatggacaagtctgatgagctggagacggctcttgtagactcttatatcactgcaaaaacgcagtcacagtctgatgctgcggctcagagtgatacggatacagatgcaaatgatgacgaacaaaagaaggctgcgacagacacacagacctttgatataagatcaattgtgccatatcgtgctacaatagcctacaatgcagatgcaggacaatttgagggtgttgacggtgtatcgggagatgcacctgtatatgacaatgcagctacaaatctgacaagcgctgtaaaggagctgaaggataaggtagagcttacatctgcaacaggatatgttgatggagaaaaggctgcggacagcgagcaggtaaagaatgcattaaaagaagccaatgcatatcttgatgtgacggtgacatgtaatttcacaccggcaacaggtgaagctgctacagaggctgtaggaaaggatcagatagcccagtggcttatagtggacaatgacggattgtcagtttcgcttgatggcgagaatatggctacatattgtacagagctagccaaaaagcatgatgtgtcaaagaagaaaacaggacagtttaagacaacaggcggaagtataataaatgtgcctgtagcatcatcaggacagactgtagatggaaacaagctgtatgaggcgattgctgaggcaataaacaataaaaagtctgcaacagtggaagcagtttacagtgaggcaaaggaagaagaaacaggtgaatatgtcacatatggtggcaattactgtgaagtggatcttaccaaccagatggtatatgtatacaagaatggtgtacaggtagtatcaagtcaatgtgttacaggctgtatttcaaaggggcacggaaccccaacaggcgtatattctatcttttcgagggataaggacagatacttaaggggtgacggatacaagtcatgggttaatttctttattccgtttaatggcggaatcggattccatgatgcttcgtggagaagtaccttcggtggaaatatttatctgtacagtggcagccatggctgcataaatatgccttattcagctgcaaagaggctatatgagaatgttacattaggcgaaaaagttattgtatatggtggtgttgacaaggtggccggcaaagcacagagtcttggcggagctggctcttataatgtgacagagggcgacggagcattcaatctcggtgtgacagcagaggataatgcaaagctcacatactcaagtgataatgagggtgtagtgagagtggatgagaacggtaatgtgacgatagcaggtgtcggaactgcaacaatcactgtcaagtctgaggctactacaagctataaggccggcagcaagacgattacaatcactgtaaatgcaaagccacagccaaaccagaccccatccgtgacaataggatgcggtgataaaactgtaacagagggagatgcaccattttctctaggagcaagtgcttcaaacggagcagcgctttcttaccagtcaagtgatccttcgattgcgtcagtagatggcgccggaaatgtgaccatttacagggctggtagcgtacagattacagctatagcaggtgaaatggcaggctggaatagcgcaagcagttcaataaccgttacagtaaattcaaaaccacaaccacagccggtggcaccgactgaaccatcagaacagccacagcagaactagaacagcaacaatagaacaggaacaaataaaatatagcaaatgaaaatacaacaaagaaaagtgccggaaacggcacttttctattatattgcataattatttacaaaatatgacatattcttaatactttttttgtaacttctaaaaatagacaaaagaaatgaagtgtagtaatataacataggattaaaccgaaaaataatgttacaatttgtaaagggtaggaaaatggaaaacaacgaaccaataagagatcaggaaattgaaatcgatttagtagcgctgtttcacgaattagtgaagcactggaaggcacttgtggcatcaatggtgcttcttgcagcagtatttggattatactccaagattacttttgtaccggagtatgaggcatctgcagagatgtatgtactgactaagtcaacatctatcaccagtcttgctgatattcaggtaggctcgagtctgacaaacgactatgagtacgttatcacaggcaggacagttttatcacaggtaattgacaatctggatatggacgagacatacgagcagcttagcaagagggtttcaatagagaatccgacagatacacgtgtgctcaagattgtagttacagacactgatttggaagcttcaaagacagtggcagatgagatcgcaaaagtttcatcacagtatatcgctgacaatatggatcagtcacagccaaagattatccagacagcatatgcttcaaagacaccggtgaataataatatccttaagaatacagttataggagctgtactcggactgtttcttgctgccggcatagttgtacttggatacatgcttgacgatacaatttccaatgcagatgatatggagaccagaacaggcctcaaggtgcttgcatcacttcctgttgatgagacagagtatgatggagccaagacaaagagaagaaaaaagaagaaaactcaatcatctaaatcagacgatagcaagagtaagaagagggcagtttaatggaaacaatagttattaatcagataaaagaccagagctatacaatgaaggagtctcttcgagctcttaaaacaagcatcagctttagtggaaagggcgtgaagtccatcctctttaccagcagcgtgccaaatgagggaaagacaaccgtagttatggatctggctcgttcgatggcggactctaagaagtcagtccttgtagtagataccgatatgcgtaagtcagtccttgtaggacgacttagagcgaaagtggagagcggtggaaagatatacggactctcacattatctctcaggccaggtatctttggacaaagtgatatatgcgacaaatatcaagggtgtgttcattctttttgcaggacatgaggtaccaaatcctacagagcttcttgagacagaggagtttaaagagcttatcgagtttggagagaagaactttgactatgtgcttgtcgatactcctcctacaggagctgcgattgatgcggccgtagttggaaagaatgtagacggagcagtaatagttgctgcccagaatgttacaagcagccgtgcaatcattaatacaaagcgtacacttgaggactcgggagtcaagattcttggagctgtgctcaataagtgcaggtttgaggagtctaagtatggtcattactatggaaactattatggtaattactatggcaattattatggcagagatgaggacgaaaagtaacaggcacagacacatatgaatgacggagaatagtgcagatgaagaaaaagaaaaatataatcattacggcagtaatgattgtacttattgctattatagcgataatacttgtaaagattaacagcagtaatgttaagaataaagaagctaaaggcataaagccgggtacagaggcagttaagacaaaagctgatactcaggctgaggatgacaacactacagacaaatcaggcatagaggaatttgcactatttggtgttgacagccgctcagatcagcttgataaaggaacacgttccgattccattatggtagtcagggttgatcatgatgctaagaaaatccgcatggtatctattttcagagactgtatgatgaatattgatggtcatggataccagaaggtgacacatgcacatgcgtttggcggaccggagcttgcagtggatacacttaacaaaaatctggacttagacataaagaattatgttacagtcaatttcaatacagtcggtgaaattatagatgaggtaggaggcattgtacaggatattgatgcttctgaggcaaaggtgataaacggatatattgatgaggtcaataaggttcgtggaacaagctcatcccatattgattcagccggcacatatactcttgatggaactcaggcagttgcgtattccagaatacgttatacagcaggaggagactataagcgtgctgaaagacagagaacagtgctgttcaaggtttttgaatcagctaagcagatgaatacagcggcaaagattaagatggtatcagacctgattggacatgtcaatactaactataatactgatgagattctttcagtatttaaaaatcttgcagactatacagtagaggattctacagcatatccacaggtgttctatggtggaaaggttgatggcgcatgggttgaggtgcctactacacttgcagacatggctacaggagtgcatcagttccttgaaggtgagacaggctatactcctagtgcaactgtaaacgaatacagcagtgcattatcaggaaaagtaagcggacctaataacgatttaacaaatacaaattttggggattaaatatgaacttcagacaaaatggagataagtacctcatcacaatagaagtaattgcattgatagttgtgctggtatttggagcagtgcattttgtgatgccggggaataatgcgaataagaaaataacagaaagccagcaggagacacagaatcctactcaggagacggatggaactcagcaggtacaagctgatggacagcaggcagcaccggcatttactccgtcagattctgtcaagacaaagctgtcttctatgacaacagaggaaaaggtagcccagctattcattacgagacctgaggagattacaggtgtatcacagttcactcaggccggtaacaagacaaaggcagctattggtacttatcctcttggtggttttgttttcagacaggagaatttctcaggagaggccgcagttacaaagatgatgagcagtctgcagtcattttcgcaggagcgactgggcgtgaatctgtttcttgcaattgatgaagaaggtggagaaagacttcctcttgcttcagctaatggatatgaggcacagcaggcaccatcacagcttggagatgctgacgcagcgggcagcagtgcaggaaagataggctcatatatggctaccaatggccttaatatgaattttggaccgacagcggatatagcatatggtgataatgcagataacgatacatatgcatttggcagcgagtcagcgactgtaggtgactgtgttgcagcacaggtaagcagctataatggtgcaggaatcaattctgtagcaaagagctttcccggaaaaggaaaggctactacagattcggcgacaggaatgctctggatgacagataagctggaggatcttgaggcatctgattttgtgccatatcagaaggcaattgaagcaggtgttccggcagtcatgatgggaaatgtgatttgtcagagtgtgacaggagaggaaaccacgccatgctctacatcagcaggtgccgtaaactatatgagaactaccatgggttttaatggccttttgattacagatgatttatcagacgcatctcttaataaggtatgtacacaggatgaggcggctgtggcagctgttaaggcaggaatgagcatgctttatgtttcaacaggctttgagagcagttataatgcagtgttgtctgcagttaacagtggcgagataccggcagaaaaattagatgatgcagttggaagaattctaacaacaaaaggaatttaatatatgcaaataaaagtaaatccgttatactatagagtatagcggatttctgttatatattttgtatatttaaaggagaattgttgatatgtcaaattgtttcaatccggcaaatattcttttgccaaacgatggtatagatatggaaaaatggtcagttatcgcctgtgaccagttcacaagtcaggctgattattgggaggctgtggaaaagcatgtggctgatgcaccgtcaacgcttaatgtggtgtttcccgaaatatatctgggaacaattgagaatcaggagaatgattgcaattcgtcaggggctggtgtcaaaaatgacaaagaaaccggcaggaaaacaaaatatgcttcaatgacagatgatgagagaatcaaatatattaataccactatggatacatatctcacagatggaaccttaaagcaagcggtggcagatggctatgtgcttgttgagcgtactacggagtcaggggtgcgtcttggaatagtaggacttattgatctggatgactatgatttcgacccgaaaaagaagactctcatcagagcaacagagggaacagtaatctcacgtatacctccgagagtgaaaataagagagaatgcagctattgagctgccacatgttatgctgcttgttgatgatcctatagacagacaaaagattgatggatgccagggtgctacacaggaagatgcagtaaatatagcagctgtaaagcatggaataatcgagtatgtgtatgccatcagggacactcttcgtaagctttacgatacagagcttatgcagggaggcggacatatccgcggctatgctgtcgagggtgaggcagcaaagcaggtgacagaggcatttgcagcaaaacagaatagctgtggaggctttttgtttgcagtaggtgatggaaaccattcgcttgcaacagcgaagacctgttgggaaaatatcaaaaaatcaggaaaattcacagaggagcagttgaaaactcatcctgcaaggcatgctcttgtggaaatctgtaatctgcacagtgaggcgcttgagtttaagcctattcacagactgcttacaaatattgatgtaaaggacatgctgtcgtttttcgaagctgaaatcacaaaacaaggacttgagagcactgagggtgatgagatagtatttgagtatgttgaatcaggcgctacctcaataaagaattccagaattaatatcacaaatagaggtgaccgcctcccggttgagatactccagggtattttagataagtatcttgagatacatgacaatgtggaaatagactatatccatggtgatgaggcacttcacggactggttaaggagactaagggatgtggaatctttcttcagtcgatagacaagagcacattgttccctgcaataaatgcgggcggggtgcttcccagaaagacattctcaatcggagaagcgaatgagaagagatactatatggagtgccataagatatctatgtagctttggtttatatacatatgttggttttatcatatttataaacaattgattttatgaagtagaataatttaacaaataagcttattttactacacaaacatatttattaagtgtataatataagaaaaatttattcacaaggggacgacaatgggaaaatactttggaacagacggcttccgtggagaggctaatgtcaatttaacagcagagcacgcatatcagattggtagatttttaggctggtattatggagagcttaagaagcagaagcagctcgacgagccggcgaagatagtaataggaaaggatacaagacgttcaagctacatgtttgagtactcccttgtatcaggacttacagcatcgggagcagatgcatatctattacacgttaccacaactccatcagtggcatatgtagccagaaccgatgattttgactgtggtatcatgatttcggcaagccataatccatactatgacaatggaatcaagcttatcaacagcaatggagagaagatggatgaggagacaattctccttgtcgaggactatatagacggcaagctacgcctgtttggtcaggagtggaaggagttgccttatgcacataaggatgcaatcggatgtacagtggattatgtggcaggccgtaaccgttacatgggatacctcatatcgcttggtgtctactcattcaagggcatgaaggtaggtcttgactgtgccaacggaagctcatggaacatggcaaagtctatttttgaggcactcggagcaaagtgctatgtcatcaacaatgagccaaacggtctaaacatcaacaataatgcaggctctacacatatcgagggcttacagaagtacgtggtggacaatggtcttgatgtaggcttcgcatacgatggagatgcagacagatgtctctgcgtagatgagcttggaaatgtaatcacaggggaccatatcctctacatctatggaaagtacatgaaagagagaggaaagctcgataacaatacggttgtcacaacagttatgtccaactttggactctataaggctcttgatgagcttggaatcggctacgcaaagactgcagtaggtgataaatatgtatacgagtacatgcagcagaacggttgccgcatcggcggagagcagtcaggacatatcattttctctaagtatgcatcaacaggcgacggtatccttaccagccttaagatgatggaggtcatgatggctaggaaacagaaaatgagccagctatgtgaggggcttaatatctatccacaggtgcttcaaaatgtgcgcgtagctgacaaggctgaggcacttgccaatcctgaggttcaggcggctgtcgaccaggttactgcagagctaggtgatacgggacgtatacttgtgcgtgagtcaggtacagagcctgttatccgtgtcatggttgaggctgagagcgaggaaatctgtcagaaatatgtggatatggttgttgcaaaattaaaataaaggttaatgccaaagataatacatgtaatatacaaaagctgtgtgagaatatcatgcagcttttgctgttatcagggttaataaatgagagaattaagatgaattaagtggatataatttaatctgtagagagaatagtaattaaattctgccggaggaaatagtctatgcctgaaatcttaattatttttatattatgtgccggtattattgtaattggcataatattgtgtataattattaaagtgagtcatatgtctgatgacgaacagaaaaaggacgatgaacgacagctggagttcattcgtgcctacaaggagcataaaaaaggacattgagtttaaaggattatataataagagacatacaggaaaagttcaaataccttccgtcagcggtatatttggctttaatctgcattgcgatgtatatttttgtgtgtctgctaagatatctttttacaatgagagaggtatcacaggcagatgagagaagaaaaaagatagtgggcaaaatctggcatatgctgttctgcggcacctttgtggcatatatatatacgcttataatgatagtgtattattcaagggagccgggaagcagaaccggcgtcgccgatatggtgctgtggagcaattggggcatgacacttcagatgcacgcttattttatagaaaatatagtattgtttataccatttgggcttttatttccactggtttttaaaaattggatgagatggtttacaatacctgttggtgctcttataagcgcagcaattgagtacacgcagctggttaccggcaggggatattgtcagcttgatgattttgtgacaaatacggcaggagcagcaatcggattttttatttatttgatattatatgcagggtggctggtatggaaaaaaataagataagcattgtggtaccatgctttaatgagaaagaggctctgcctcttttttataataaaataactcaggtgtttaatcagatgagtcaagagagtgagacagcgggattgtcctatgaactgattatagtggatgacggctctgtggacgggacactcgatgtcgcaaaggagcttgccgtaaatgattccggtgtgaaatacatatcattttcgcgtaattttggcaaggaggcagccatgtatgcaggcttgcagcatgcggtgggggaatatgttgcaataatggatgcagatcttcaggatcccccggaaatgcttccgaagatgtatcaggtccttaataaagagggttatgatgctgtcggtacaaggcgagtgacacgcaaaggtgaaccagcgattagatctttttttgccagaaagttctataggctgatgagtaagatttcaaaggcaaatatggttgatggggcacgtgactacaggctgatgaataggaaatatgtggatgctcttttatcgctaaaagagtacaataggttttcaaagggattgtttggctgggtaggctttaaggtgaagtggcttgagtttgagaatgtaaacagggtggcaggtgagacaaagtggtcattctggcagctctttttgtatagccttgacggaatagtggcattttccaacgctccgctatacatggcttcaatagccggagtgttcagctttattgtcgcaataattgcaatgctctttatcattatcaggagacttgtattcggagatccggtagccggctgggcttcgaccgttgttatcatactttttataggtgggatacaactgcttagcataggcattttgggactttatctgtcgaagctatatctcgaggcaaaggacagaccgatatatttaataggagaatcaaatatagaaaaacatacagaaaaatattaagtctttcttaagaattcttaattcgatagcacatgacatttttttcggatgttatgtgctataatttttttcggcaacgtttattaatgcatgaaagaggactaagatgaaaaacgtactggagtggcttgaggccacagtagaaaaataccctgacaagcctgcattttcggatactgaatgcagcattacgtttgcgcaggtgtatgatatagcaagaaatacaggagcatatctgatagaacagcttggagtggacagaacccctgttgcagtatttgccggaaggaaaatggtaacaccggcatacttcctgggagtggtatatgcaggcagaccgtatgcgccgattgatgcatcgcttcctgacaagagaattgaaaaaatacttgaaaatctgtgtccaagggctattgtggctgacagggaaagccttgagcatgtggagagcatagtggatgagctggcaaaggcagaaggtttcgatagaccgcagatatttattgctgaggatatatcgtgcttcgagcaggtggcgtgcgctgatagtaattgcaaaatcagtgaatcagcaggagaccatgtgacggatagtgagaacgatacagatggtggtgttgtggcaggctgtgcaggaaaaacagatgacagctcactggagaagctcgcaacagtccgcaggcagatgtccatgacagacccgctgtatattatctacacgtcaggctccaccggcaatccaaagggagtcatgacatcgcatctgtcacttatgacgtacatcaatgcttactgtgatgtgatgcatatagaggaaagtgatgtgctgggcaatcagtcaccgcttgattatattgcggcaatcagggacatttatctgccgctaaagaccggctgcagcacagcgattattccaaaagagtattttatggagccaaatgccctgtttgattacatgaatgataagaaggtcagcagtgtcggctggagtgtttcggcatttaccattctcacttcgcttggagcatttgaggaagtagggcttaagagtcttagaaaaatctgcttctcaggctcagtgatgccgtgcagggtgctcagaaaatggcaggaaaatctgcctgaagcacattttgtgaaccagtatggaccgacagaggccacagcatcatgcacatattatagcgtggatcatacagtggaagatgacgaggtgcttcctataggaaaagcctatgacaattacagggttttcctgatagatgagcatggaaatgagccggctgtcggaaaacagggagagatatgcgtatgtggaccaatcctggcgctgggttattataatgatccggagaggacagctgcggcatttacactcaatccactcaacagggcttatcctgagcggatgtaccgcacaggggattacggaaggctcgatgaggacggcatacttcatttctgtggacgtatggaccgccagataaagcatatgggacaccgtgtggagcttgacgaggtggagcatgccgccaatgtggtcgagggagtcgcagaaagctgcgttatatataataaagcaaaagaggtgctgatacttttctacacaggtgactgtgacaggagaagccttgcgctggcactgagagacgagcttccgggctttatggtgccaaggaaaatcaagaaactggagcagcttcctaagcttccaaacggaaaatatgatatgaaaaaactggaggaaatgtaaaatgagagacacaattttagagattttagaggaattaagaccggatgtggattttgagaaggagacaaagctcatcgatgacaaaattcttgagtcatttgatatagtttcactcgtatcggagctgactgatgagtttgacatcacaatcagaccaaaggatctggttcctgagaattttaactcagttgatgcaatcgagaagcttgtgaaagagcttgtggaggaataaagcatatgagacagacaccgtactatgtatttgatacggacgagtttgcaaaaagagcagccatgataagggctgctcttgattgtaaaggaggacgtaggataccgctttgcttttcgataaaggcaaatccgtttctgcttcacaggctgccggcgggcttagaccatgtggaggtgtgcagcccgggagagcttgagatatgtatagcacttggcgtgaagccggaatgcatcatctattcaggagtgatgaaggaaaaatgcgatatagagcgagccgtttcgtatggcgccggcatactgacctgtgaaagcataagacatgcgacgcttatatcagaggtgatgcttgaatgtatgtctgaaggcgcgcaggaagccggattggtcgaaaagaaggcacaggtcatactgcgcctgacaagtggcaaccagtttggcatgtcgcttgaggatattgaatatatcatttcgcatccggatgagtttaagggcattgcggtaatgggcatccactactattccggcacacagaagagtcttcgcaaaataaataaggacttggaaaaaataaagtctgcactgaccatgttaaaggacaaatacagctttgagccacagcttgtagagtatggcccgggactttgcgtggagtatttcgaggatgaatggcaggaaaaggaaaaacattcacttgatgaggcggcagaggtgcttagagaatttgccgaggaatatccgcttggcattgagatgggacgtttccttgcagcctcatgcggtaaatactacacacaggtaaaggaccttaaatcgacaggcgatgccaattatgcgattctggatggaggaatcaaccacctgaattatttcgggcagaggatggcaatgcaggtgccaccgattaaggtatatggtggtgaagtatcagaaaatgaagaaaaacccggtgtggaattaacacaaatgccggacgcagattatacactctgcggaagcctctgtacagtagcagatgtgctggtacgcgaggtgaagcttaagaaacttgagattggtgacattcttgagttcgcacactgtggcgcatactccgtgacagaagcaccggcgctctttttgtcaagacagcttccggctatatatgcatattcgaagggatgtgggtatgagtgcctgagggagcatattcctgcagctgaaataaatctggccggaaaaaattgtaatttgtaactaaaaaagcgcccatggcaatttgtcacgggcgcttttgatatgaaataaacaaagccttttgtgggaatcctaattatcagcctagctccttttcacatatatcaagtacagaggcgatggtagtatccatatcatagtacttgtactcgccgagacgaccaccgaatataacaccggtctccttgtcggcaagctccttgtacttggcatagagctgtccgtttttctcatcgtttacagggtagtaaggctcatcgccggccttccactcagaagagtactcacggctgataatagtctttggcagatcattgccattctcatccttgccgaactcgaaccacttgtgctcgatgatacgtgtccatggagtctcacggtcagtatagttgacagcggcattgccctggaagttaggaatatcgagggtctcattctcaaagcgcactgagcggtattccaaagtacctagcttaaagccaaagtatgcgtcaatcggacctgtgtataccaccttgtcagcaagagcatcaagctcagccttgtgctcaaggtagtcggtattcaatctgacctcaatgccgtcgagcagattttcaaccatctttgtgtatccaccgattggaataccctggtaaagagcgttgaaataattgttgtcaaaggtaagtctcacaggaagacgcttgatgatgaaagccggaagctccttacagtcacggccccactgcttttcagtgtagccctttacgagcttctcatagatatcacggccaacgagtgagatagcctgttcctcgagattttttggctcgccggtgatttcctttttctgctcctcaatcttggcagcagcctcgtcaggtgtcaccacaccccacatcttgttgaaggtgtacatattgaaaggcattgagtacagctcacctttgtagtttgctacagggctgtttgtgaagcggttgaactcagcaaactgtgtgatgtagttccagaccctcttgtcattggtgtggaatatgtgggctccgtacatgtgtacatttatgccctcctgcttttcggtgtaaacatttcctgctatgttaggacgcttgtccacaacaagcactgatttgcccttggactttgcctcatgggcgaagatggctccgtagagaccggaacctactactaaataatcgtatttcattgtattctccaaattaatttagatagatttttaaaagagtgattgatttatcaaccactctattgtataatctactcaaaggtaatcggatgttattccgatttgccctcagtgattgattagtataaagattagcaccctcactttaggcggttggggtgctatttctttttgtggttgtctatatacgacaatgctgcaaaaactactagtaacaatgtaagtacttcaattgtattcatagtaacatcatcccccttctgtaaaactagagggatttatcagaattaacacccgagcttttttcgactacccaatgattatatcatagagtatatgggctatcaaggaggcaattagagaatatgaaactacccggctactactcctcaggagaatttgcaaaaaaagcgcatattacaaaaaagaccgtcaggtactatgacgagcacaatattttaaaaccatcctacgtaaacgaaaacggagccagattctataatgatgacgactttgcgcgtctacagcagatactgttcctcaaatatctgggattttccctggatgatatcaaggagatgacactcagaaacacggacagtaatgtcatgtctgagtcgcttcacatgcagcttggcctcgtggaggagaggatagagcagatgaagcttatgaaatcggcattgcaggaggcttcagaggtaatagacgaggggcgaagcgtggactggagccatatgctggagctggtcaatataaacgagatggagcaaaagctaaaacagcagtacagggatgcttcaaatatatcagccagaatcaatctgcacagggatttctcaatgaatccggtgagctggtttagctgggtatttgatgagtgtagcttttttgagggggaaaaggtgctcgaggtgggctgcggtgatgcctctctctggacacagaacatagacaggataccggcagatatgcagataaccctgactgatatatcgtatggcatggtaagggatgcgacgagaaatgtaggcgcagatgacaagcgcttcacatatgaggtgatggatgcccacaggctgtataagccggatgcatcgtatgactgcgtgatagcagaccatgtactgttctattgtgacaatctggatgccgtgtgcagtgaaatcctaagggtgctaaagcccggtggcgtgttcgtgtgcagtacatacagctcacggcatatgaaggaaataaacgacctggtgcagcagtttgatgaccgtatagagctgtcagcggaaaggctgtatgagcaattcggtaaagaaaatggtgaggcaatacttggaaaatactttggtgaggtaagctggcatggatacgaggatgagcttgtggtagaaaaagcagagcctgtgatagagtatgtgctttcgtgccacggcaaccagaacaggtatattgtggaccgctataaggaatttgcggcatttgtcagaaagaagacagagagagggttccatatcacaaaggatgcaggtgtatttattgcacgaaaatgattcaaaaacaggatattataagcatatattttgtgaaaaatgctaaaaatataaaaaagtacttgaaggtgcccttggggcaccttttataatgcaagtaaatgatgaatcaggtcagtgtattctacagaccgaaagcatcaagtgcagcacgtagtttcagtttgaaggagaacaacatgaaaggtattatattagcgggaggttcaggcacacgtctttacccactcacaatggtaacatcaaagcagttacttccaatttatgacaagccaatgatctactatcctatgtcagtgcttatgaatgcaggcatcagagatattctgatcatttcaacaccacaggatacaccaagattcaaggagctcttaggagacggacatcagtttggtgtcaacctcacctacgaggtacagccaagccctgacggacttgcacaggcatttgttatcggtgagaaattcatcggtgatgatacagtagccatggttctcggagacaacatcttcgcaggacacggtctcaacaagagactcaaggctgcagttgaaaacgcagagagtggtaagggtgccacagtattcggatactatgtagatgaccctgagagattcggtatcgtagagttcgataaagagggaaaggctatttcaatcgaggaaaagccggagcatccaaagagcaattactgtgtcacaggtctttacttctacgacaacaatgtagtagagtacgcaaagaaccttaagccatcagcaagaggagagcttgagataacagaccttaacagaatctatcttgagaaaaaagccctcaatgtagagcttttaggacagggcttcacatggcttgatacaggaacacatgagagccttgtagatgccacaaactttgtcaagacagtagagacacatcagcaccgtaagatagcatgtcttgaggaaatcgcttacttaaacggctggattacaaaggatgaagtattaaagacatatgagctcgtaaagaagaaccagtacggacagtacttaaaggacgtacttgatggaaaataccgcgagcaactgtactaattatagtaaaatcgtagttagctggtagattaagttaatagaaataatttaaatctcgcttgcaaaaagcgggaatcaggaggaaatcaaaatgacaattatcgtaacaggtggagcaggatttatcggaagcaacttcgtatttcacatgcttaacaaatatccggattatcgtatcgtatgcttagactgtctcacatatgcaggaaatctctcaacacttgagcctgtaatggacaatccaaacttccgttttgtaaaggagagcatcacagaccgtgacgccgtatataaattatttgaggaagagcatcctgatatggttgtaaacttcgcagccgagtcacacgttgaccgttcaatcgaaaatccacaggtattccttgatacaaatatcatcggaacatcagtacttatggacgcatgccgcaagtatggtattaaaagatatcatcaggtatcaacagatgaggtatacggagatctgccacttgaccgccctgaccttttcttccatgaggatacaccaatccatacatcaagcccatattcatcatcaaaggcagcagcagacttactcgtgcttgcttaccaccgcacatatggacttcctgtaacaatcagccgttgctcaaacaactacggaccataccatttcccggagaagcttatccctcttatgatagcaaatgcacttaatgataagccactcccggtatacggaacaggcgagaacgtgcgtgactggctctatgtagaggatcactgcaaggcaattgaccttatcatccacaacggacgtgtaggagaggtttacaacgtaggtggacacaatgagaagacaaaccttgaaatcgtaaagattatctgtaaggagctcaacaagcctgagagccttatcacattcgtaggagaccgtaagggccatgatatgcgttacgcaatcgacccaacaaagatccacaatgagctcggatggcttcctgagaccaagtttgaggacggaatcaagaagacaatcaaatggtaccttgacaatcgtgagtggtgggagacaatcatcagtggagagtaccagaactactatgagaagatgtacgcgaatagatagttattatcgtttgtctggtggttttgcgcatatatggtgatgttagtcacgataataattaagcataaaggagacccgaaatgaaagtatttgttacaggagttgcaggtcagctcggacacgacgtaatgaacgaccttgcagcacgcggttacgaaggaatcggaacagatatagcaccacagtacagcggagcagacgatggcacagcagttacaaagatgccatatgtctcactcgacatcacagaccgtgatgcagtggaaaaaacaatcacagagcttaagcctgacgtggtagtacactgtgcagcatggacagcagtagatctggccgaggatgatgataaaaaagcaaaggtgcatgcaatcaacgcagacggcactcagaatatcgctgatgcctgcaagaagatagatgccaagatggtatatatcagcacagactatgtatttgacggacagggcaccacaccatggcagcctgactgcaaggactatgcaccgctcaacgtatacggacagacaaagctcgatggagagcttgcagtggcaaatactcttgagaagtactttatcgtgcgtatagcatgggtatttggagtgaacggcaagaacttcatcaagacaatgctaaatgtcggcaagacacatgacaagctcacagtagtaagtgaccagattggtacaccgacatacacactcgacctttcaagactgctcgtagatatgatagagactgataaatacggttactatcacgctacaaacgagggcggatatatcagctggtatgatttcacaaaggaaatctttaagcaggcagtggcgcttggccatacagagtattctgaggacagactcacagtcgcacctgttacaacagcagagtatggtgtgtcaaaggcagcacgtccgtttaacagcagactggacaagagcaagctcgtggagaatggatttaagccactccctacatggcaggatgcgctgcacagatatttgcaggagattaacttttagaaaggacatagaaatcatgggacagattaaagtacagaaaaacgtaggtggaatcgaaggactttgcatcatcgagcctacagtacacggagacaaccgtggatactttatggagacatacaattcaaaggacatgcaggaggcaggcattgacagagtatttgtacaggataatcagtcttgctccacaaagggagtgctccgcggactccatttccagaaggaatatccacaggcaaagcttgtgcgtgcagtaaaaggctcagtatttgatgtggctgtagacttaagaagcgattcaaagacatatggtaagtggttcggagtagagctcacagaagagaacaagaagcagttccttatcccggagggctttgcacacggatttttagtactctcagatgtagcagagttttgttacaaggttacagatttctggcatcttggagatgagggcggtcttgcatggaatgatcctgcaatcggcatcgagtggccacagcttgtcggagagtatccgggaagcgccgacggaagcggatacacacttgaggatggcacaccaatcaatttaagtgataaggatcagaagtgggagacactggagaatacatttaagttttaattgatatgatatatcataatattatagctttcgacattaattgtcggaagctatttacgttataaaagtcttgaccttaatcactaatagttgtaaactaaacaaaaaattaattgaggaaaatatatgaagttaaagcaaagtaaagtatttaaggctggcataggatatactataggaaatgtcatggttaaaggtataaattttttggctattcctatatttagtagattgttaactacggaagagatggggttgtatacggtttttgccgcatatgaagcagtcttgttcgtttttattggaatggctctgcatagctcaataagaagcgcaaaatatgagtttgagggtaaaattgatgattttacatcatcaattatgggaatatattggataaatttaatagttgccttgtttatttctattgtttttaataaaatattgacaaaattattggatcttgatttagttacattggttatgcttgtgatatacagttttggaattgcggtagttactttatataatgcaagaattagcttggattatgagtataaaaaatacattaaggtttctttagcaagcacaattggaaatgtaggtctttctttaatattaattaagactatttttaattcatcaagaggatttggaagggtacttggaattacaatttccactgtacttgttacagtatatattatatatgatttatataaacgtgctcgacctacatttagaaaaaaatattggaagtttggaataaaatacagcttgcctattattccacatggaatatcacaggtgttgcttgcccaatttgacagaataatgattaataaaatgataggaaagtctgaggctggcatatatggacttgttggtaatatcaaattgattttagctattatatcagattcaatttctgaagtgtggatgacatggttttatgaaaagatgaaaaataaagaaatagaagctgtcagaagtagagcaagacaattgtgttattttttcctcattattgctattggagtaatgtcaatttcaccagaattggttcttataataggcggacaaaaatatgcagttggaaaatatgttgcaatccctatgattttagatgcttttgtattatttatatataatgtaatagttccatctgaatattttaagcaaaaaacaagttttatcatgtggggaacaatgagtgcggcggtaattaatatcattacgaattatatatttatacagaaatatggctttattgcggcggcatatactacgctgtttgcatatatttgttatatgatattacatcttgttatttcttatagattaatgagattttctattattccagttagctgtattgcattatgtttacttagtattgtgataattgcaatagtagatcttatatttattgataatatatttgtaagatatttggtatgttttgctgtggtcatgtttattggaattaaggtgctgccggagtttgttaaagagaacagaagaaaagcagagtaaaagtacaaagttcttgactatgtaatatgttggatgtaaactaaaaaggttattgtaaatatcgagaatgtagaaaggcagattttagatgaatagggaactgagtttggaagaggtgcataaagaaaccttaaatgttttaaaaaaaatagatgagatatgtgagcacaatgatattaagtattcaattatgtatggaacattaataggatatatgagacataatgggtttataccttgggatgatgatatggatgtttgcatgttaagacctgaatatgataagtttgtagcatattgtaatgaacatgaagaagaactatatccatttaagttgatgtcaaaatatacagccgatgattatccttttaatttacaaagattttgtgatactagatttaagatggttaaaacggatggactatctgatgcggggatgggattatttatagacatttatcctttagatgcattaggaaatgttaagaatggtgctaaaaaacaaatagaaaaaaagaaaacattttggatgcagtgtgttggttgtgcacagagtaagaatataatgggaacaaataagagttttgttaaacgattattaagatttccggtttacttgtattcgcatgtgaagggaactaagtattttttggataagtttgatgtgcttacaaatagctattcatatgagaatagcaaatatgtcggggatttgatatgggataactgtgttacatattatgagaaggaatggttcgaagatgttgaggacattatatttgaaggtgtaaaaaccaaaattcccgttcaggctaaaaaggtattggaagaagaatatggagactatatgactccaccacctgaagaggagagagttccatatcatgaatatataatatatagaaaataatggtgataattgatgctattgattggtaattataaaacttttattgaaaaatataataaagaagtcttctctattgtatatatttttctacttatacatttcttttggggaacaacaatgatacaaattcatttgccacgttgttatacatggatttgtttggtagtgcttctgggatatattataggtaaaatattagttgaaccaaatagaaaatatctgattattatggcaacaattgttgcaccatttattataagtgggcttttaagtggctatcatgaattaatgtatgtgggtttattgatagcagcagcaaaagatattccaattgatagaattttaaaagactacctaatggtatgtataccgtttttattaattacgatactaggaagtcaaatagggattgttgagaacctaatatatccaagtctatacaggggaaataggattgcatatggatttttatcacctacggatttttgtgctcatgttttattcattattttagtattgttttctgtgataaaaaagaagaattattggaaaatggctttaatatctgttctgattgcagcttttctttattttagatgtgatggtagaacaactgttgccagtctgcttattttcttgacaggaatagctatatgctatattataaaaaaatgggttggattaaataagcgtattgaatggctacttgtagatatctgcgagagttttattgtgatagcttcgtttgtattgggatggttatatcagcttaataataaatatattattggattaaatgatgtgctgtcggatagattaaagtatattgcccagactatgtcgacatataatatcaaattatgggggcagtatattgaggaacacggaaatggtgggtctattattgctaaagataattatttttttatagacaattcatttgtaagatgcatgtatgagtatggagctattgtttttgcgttggttatagtgcttatatttatggctcaaaaaaagatgctggataatgagaaatatattatgtgtttagcattttttatcgtgactatagcgtcatttgctgaacaccatctccttgaaattgcatataatccgtttattttttctgtttttgcttgtatgagcaataatgataaagttattatggaagaaaagaggatttgttaaatatgatttcggtttgtgttgctgcttttaacggcgaaaaatacattgaggaacagattttatctgtattaagaaatcttgattctcaagatgaaataattatttcagatgatggttcttctgatagaaccagaagaattgttgatgatttggctgaaaaggatagaagaattagaattatagatggtcctcgaaaaggactgattaagaattttgaaaatgcaatagtacattcaaaaggcgatattatttttttatgcgatcaggatgatgtatggaaagataataaagttaaaacagtactagatatttttggaaatacggattgtactttggtaatgcatgatgcatgcattgttgattctaatttaagaatttccggttgctctttttttgaatttaaaaaatgcaaaaaagggtattggagaaacttgataaaaaattcatatataggttgctgtatggcttttaaacgaagcatactggattatgcaattccttttccggataatattccaatgcatgatcagtggattggattgttgtcggaaagagttggaaaagttgagttctgtaacgaacagcttcttttatatagaagacattcaaataatgcatcagaaatgactcatttacctttgggtgagatggttaagaatagagcgattatgctgaaatgtataaataaaagaatcagggagaagaaatgatattagcaggtataacattattcaatccagacgttgcaagactagaagagaatatatcatcaatttatggacaagttgatagggtaatatgtgtggataatggttcggataatataaagagcattgaggattgtgtattaaagaactggaaaaatataacaattattaagaatggaaaaaatgaaggcattgctaaagctttgaatcagatgtttgaatttgccattgaacaacaatacgaatatgttttgactttagatcaagactcagtatgcccggataatataattgaagaatataataagtatttagatgaacataaattgggttcactatgtccacagtgtgttgatagaaatttcaaaagtgaattgaataatgaagatgttatagaggtggataagtgcataacatcagcttcattggtgccggtttcagcttggaatgatgtgggcggatttaatgaagagctttttatagactttgttgatcatgatttttgtgctaagcttaaggaacatgggtatagaatacttcagattggtagtgttaagcttagccatgaattgggaaaaggaaaaaattatagtattttaggtgttaaatttactgcacttaatcattcagcaatgagaaaatattatatggttagaaattggatttattatatgaatgaacataaagatataataaatctaaaggcagaaaagaaatcatatagattattttttttaaaaacactaatattcgaagatgataagctgaaaaaaatgaaacaaatgctaaaaggtagaagagacggcattgaattaataaggagaattcatgaaatcaagtaaaacaatcaaaagagcaatggagatgataacatatattagtttagttttgtatatgtttgatgttgtattattaggaacaggggaactgacaaagaactttggaattccaagtagaatgatttttttcggaatatcggttttagcggcagttgtccttatattattggatttgaaaaaatatttgaataataagtatttaataagtgtacttgttttcatggttgttatatttatagctgctattagaggctttgttggaaaacaaaacacaacaatacttttgtctgatttcaaaggttttttgaattttttgatagtttttccaatgatggcagttatgtataaaaaaaatagagtgatttcatttttgaaaatgttatgtctgtcgcttggagttgtatctgtgttaggtattattctggcattttatctgcagatgcctttagagataagacactgggcatatgatttttttgatggatataatatatgcatgattacagaattgacaggaaaggtgactcgcattttttttaattctggaagcagacttttttttgcgggttttgctttaagcattgtattttcgttaatagaaaataaacgtaaaattatttggatatttattgcatcgttagatatttttggtgtgtttatttcatatacacgatcaggctacttggcatttgttattggaatatttgcatttgtagtattaatattattattttatagagacttttttaaaacattggctataagggcatgctttgttggtggaatagttgttgtattaattggtatggttagtgtcgctgaaaaagtaaatttggttgatgtggccataaatagatgtttatttgccggagcagaaatagaagatactaatacaaatgttgaaaaaccttctgataataaaaatgataaaaataataaaaatgataaaagtgaactaacaaacaaaaaagctgaaattcagaatttggccattagagagcaaagaaagacgttagcattagaaaatataaagaaacatccattatttggcggaggattgggagtatccaatgatataaatgatggttttattgagtatttttatttagatattttaagtaaaataggttttataggctttataatttttattattccttttttattttctgtttttgacactattattttacgtgatgtattttgcaaagaacaaagattattagctttagcagcacagttaggctgtttgtttgtttttgtgatatcatattttaatccttgcttaaactcaagtgttggattatttatgtattcattggctcttgttttatctatgccgtgggaaaataagaaaccaaagactgcttattttataagttctactaaccattataatgtgagaacaggaaagtttgttaatgattatgttaaaaaaggttatgatgtaatttatgtaacctctgattttgatcatatgaccaaaaagaggtattgtttcaatgagtataaaaatagtaagcaactgcatgtaatctcttacaaaaaaaatttatcaataagcaggatattgagtcatctgatgttcagttacaaaacgttttacatgttattggcttgtaaaccagaattggtgtatgtagaagtgccaaataattcattagtaaaaagttcggcaaaatataaaaagattaataatgctgagattattgtggacgtttttgatatgtggccggaatctatgccggttaagacaaagaatatgattgtaaactggggattcgatatttggagaaatttcagaaataagaatttaaaatttgcagatcaaatatggattgagtgtgattattatagggagttattgtcggcacaaaagattaaccttccaatggaaaccaaatatttgaaattgaaaaatgcagaaacaagtatagaaatgaaagtatcagaagaagaaattgatttatgctatttaggtagtataaataatatcattgatatatcattaattgaaaaaattgtttcagagtttgcgaaaaataaaagaacaagaatccatataattggtgatggtgaaagaaaagatgaatttcttgatattctgaaaaaaaatagtatagaaatcattgatcatggtaaagtatatgagatagataaattgcaagagatttttgatcagtgttggtttggaattaatgtcttacgagaagatttagcgattggaattacaatgaagtctatttcgtattttaggggcggtcttccgattatcaatactgttcagggtgatacaagtagatttgtagaagaatgtaacattggaataaatgttgaccgacatgatgtcaaatcttgtgttttaagaattcttaatataacaaaagatgatttggcttgtatgaagaataataccagaaacttgtttgaacaaaaatttgcagaataggataaaaaacatgaaaaaatattttaaaaaaacaatgcaatctattatttttatattgaaagtcttgttatatttatcattactgttcagttttctctttctgttttcgagaaataattttgcagttttaaatatttcaagaacaatggcaactacaatttttacgtatgtatttgttgggcttttaatgacagcgatatatggcagatatgatataggtagaagaaagagtaagccgataatttattcattggtattagcaacattatttacagattttgttgcatatatccagttaatgataatgaacacgataacaccaaatgtttctgccttcaagttttctgatataggtactttggcacttgtaattgtagtccatgtggttattattattgtttttgttcatattggtaatggcatatttttcgcaataaatgatcctgagagctgttgtgtaattactacacaggaatcagacctgtcaaagctttcttcttctgtaaaacgttacaaaaagcagtattgcattaaaagggtagtagattatagaagaaaagatctttatgatatcataaaagatatggatacagtgtttatatatgatattccttctgataagaaaccggatataattaatttctgttatgagcgaatgataaatatatatataaatcctgatgtatgcgatttggttgaaaatgtatcagaacattatttgctggatgatgtatcatttcttaatcacaatatcagcaatatgacttttgagcagagagtgataaaacgaatatttgatattatattctctttgatatttgtggtgattagttcaccaatctggattgtaagttctattgcaataaaattgggagatggcggaaccgtattttttaaacagaagcgtgcaacacaatatggaagagtgttttatgtttataaatttagaacaatgaaagaacatgttgaaaaccgatctgcaacatcggatgatgacagaataacaaaggtgggaaaggtacttagaaagacaagacttgacgaggtacctcagctgttcaatatattgaagggggatatgagctttgttggaccaagacctgagatgcttgaaaatgtgaaaagctatacaagcgaattgccggagtttaaatatagactgagagcaaaggcgggattaaccggatatgctcagattgccggaaaatataatacatcaccaaaggataagcttatacttgatatgatgtatattgaaaactatagttttagaacagatatcaaattattgttccagacggctattgtacttctcaagaaggatagtactgagggattccaaaaggtgtcagattgcttagagtgtgaaaagacaccagagaatttaattgattaagacattttataaaaatgggtaatacttgtaagaaattgttgcaagttttacccatataatattttactaaaattgaagagaaaatattttgtaatattttgtaatttttcaaagaaattacttgcaatatcataacataaatactagtattatatatataaaataaaaaaaggaggtactgtgtttatgaaaaacaaattcataatgacagcagcaattgttacagcaatgacgatggtaacaccatcacttgcaagtgcagcagagattcagcctatagcttctgagacagaggcacctgcagagacagaggcaccttcagagacagaggcacctgcagaaacagaggcacctgcagagacagaggcacctgcagagacagaggcacctgcagaaacagaggcacctgcagaaacagaggcacctgcagagacagaggcaccttcagagacagaggcacctgcagaaannnnnnnnnnnnnnnnnnnnnnnnnnnnnnnnnnnnnnnnnnnnnnnnnnnnnnnnnnnnnnnnnnnnnnnnnnnnnnnnnnnnnnnnnnnnnnnnnnnncagaggtacctgcagaagttgagactccaacagagagtgaaacacaggcagtagttgctacagagacagattccgatgaggagcttgcacaggctacttcagatgatggagcaacaaatgttgaaagaactggatggtatggaccagaggatggatatcctgattattgctataaatttaatgatggctcttgggcatagagtcagtttgtttctacagagactggaaaattctactttgatgctaatggctatatggtaagaggctggcagaaaattaattcttcatggtattattttgatgctaatggttatatgcagaaagattggcaggaaatcggtggcaaatggtattatttcagcccttatgatggctttatgtatcgtagcagagtaagtgagattaatggtacaatgcgtgcttttgctccttctggtcagatgattcagggctggacttgggatgtatatactgataatgatggtgatgttacaggagattggttttatgcaaacccaaatggtactgcatatgaagatggctggttggcacaagatggtggctggtattatattaacacatatagcggcaggatgtattcaaagggaatgtatactattaatgacaaacgctacagatttaaaaaagatggtaagctcatcattggatggtatcagacaggaatatatttagatgactggtactatacaaatgcagatggatcagcgtattcaggatggctgccatatggcggaagctggtattattttgatgattggggagatatgtatggcgatcaatgggtagaccataaatactatattggatgcgatggtagaatggtctcaggctggtatgattgtagtcaaaaatcagcaaattattcatcgactaattggatgtattttaatgctgatggtactaaatatgtaggctggttaccatataatggaaattggtattatattagtgataatggttatatggtagcagatactattgattattgtgtaagtcaggatgcatttagagatgaaaatggaaatactaattggacagagtataataaggctcgtaaggcttcaccacgatacgtatttgatgcaaatggtgttatggttacaggatggtatcatgacattcaaactacaggtggtcagattacatacgatgaatggtattattcagactctgatggaaagtgtcatgacggatggcttttatacaacggagcttggtattatttccgtaaaggcgaaatgctgagaaatacatatactcctgatggaaactgggtagggcttgatggtgtttgggcttaactcatagttttatatattaattgcataaaatatttttgagaggtctatgtggataacatagacctcatttaatatataatcattagaattttgtatttatttgagtgcaatactggatactggggtattatttgaatcaagatggtactctaagctcatatgtgctataatgttttaaaagtataggaagactaactattaaaagtcaagccttaaaatgatattttttgaataaagtacagaaatgtattttagatatatttggaactcagttagaggtccttgaaccttgaaaactgtatgacaaaaagagcatcgtgataggtgctcaaaaaaggagtattgaattagaaagatttaagctgcttttatgtattgctgctttgttttttcaagatgataaatcactcgaaccaatttttttacagcgtgtgatatggcaacattgtaatgtttaccttccgctcgttttttagcaagataggctgcaaatgttggatcccagtggcagacatatttggtggcattatacaaagcgtatcgcaggtatctggagccacgtttttccatatgtgcgtaggcaccatccagttgtccggattgatatgttgatggcgaaaagccggcataagctaagatcttatcaggagaatcaaaacgattgaaatcaccgatctcggcaataatcatagctcccatgcgatagttgattccaggaatgctaagaattggagagttgatttcatccatgatgattttaatctcattttcgatttcatcaatctctgaatcaagttcctgaataagtttgatggtgtgcttcaattcaagagatttggctggcatatttgagccgatagaagctcttgcagaatctctgaaagtaatagcagtatctttaccatatcgacctttggaagattcggaaagaagatttgtaagtctggtaaggtgtgcagtagctacatgtttagcactgggaaattcagaaagcaatgcataaacagatgccatatgaagtgttggtacaagtttttctaattcagggaataagatacagaccagtcttgaaacggaagtttttagcttggcacgttcttttactttatcaaaacgataacgagttaatgactttaactcttcgttgtggtaagatgtgtctgagtaggactttaagttcacatcagacatgagcatggaagcaatcgtgcgggcatctactttatccgttttcgtctgtctaaggcttagactttttctgtacagatttgtatgtaacggattgataacataggtgggcagacctttatcaatgagatatccaaggagattgtaactatagtgtccagtggcttccagtcctacttttacttttgtcacatcatccataacggattcaatcttttgataaagatcattaaaaccatctaagttgttgaagatggtaaatgctttaaacaacacttcgctatcagagttggtgataaagcaatcatgcttatcctttgcaacatcaattcctatgtaaatcataataaatctcctttgaaatgtattaatgctgttttagaaccacagggtgctccttgcgattgtaacctcgttctaaataaaccgtcatgcggtatctaactgattaacaaatgaacaaagagactgtggttggagccttcctaaaaccatcaagtggtaggaaaaataaaaccaatccacagcatcttatatatcatagtcgaacctacagaagaggtaaagaatggactatgacctaatagttgtaaagaccttggagagggtctataaaaactactactatataatacgaggaaataaaacagtgagaaaaaaagtaacaaataaaactaagaagattttgggagcatttgccgttgcaggtatgcttgcaatgagtgttaattctgtacaggcagcacaggaggaatatacagccggatcatcaatgggaaaggaatatgatgaactggaacaggcatattcagatgatgaggtcttagcaacagcatccaatcaggggcattgggaagtgaatgatgcaggctggtggtatcagtattcagatggaacatatccacgtagttcctgggtaaatattagcaataaatggtattattttgatgaaaatggatatatggttaccggatcacgcaatattaataatgcctggtattattttgatggaagtggagagatgcttacaggctggcagtattatttaggtgcttggtggtaccataagccatccggggcatgggtacagtctaactatgctaatgggacattagtcggaattgatgtatcatattatcaaaaagatattgactggactactgtgaaaaatagtggtataaactatgcaatgttgagagtttcaagaagctactattctgattcatatcatcattttacagataaaagatttaatgaatacgcttcaaatgcaaataaagctggtatgcctattggtgcatatatatatagtcaagcgagaaacgttagtgatgctgtttcggatgcaagatacgttgtaagtgagttaaagggatatacaatctcatatcctgtagctattgatttggaggattcttcgcagacggatttgtctaaggcgcagcttggtgctattgcaaaagcattttgtgatgaaatcaggagatatggttacactcctatggtttattgcaatgagaactggtataagaactacatagatgtaagccaaattgcaggagaggaattgtggattgcaagatataattcgcattatgatacaaatattaaaagaggtatatggcagtgtagctctacaaccagaattccgggtatatcgggaaatgtggatttggattttgcatacaagaattatgagaatccgattacaagcgtcataggatattggagcctatatggtaatgattggtattttattgatgcaaatggtcagtatgtaacaggctggcagtttataaacggaaactggtattattttgcgggaaatacagttatgacaacaggctggcaatatgtaaacggtaattggtactacatggatgcaagtggagctatgaagacaggttggcagtacataaatggtaaatggtatttcttggaaaagagtggaaccatgactatgggctggcagtatattagtggacactggtattatatggactggaccggaatgatgacaacaggttggcagtatataggtggatattggtactatatggactggaccggaataatgacaacaggttggcaatatataggcggacattggtattatatgaatgcagatggaataatggtaactggcagacattatattaataaaagatggtattattttaatgcaaatggtgtatggaattagagacgaagggagctgttatatttatgaagaaaaaaataatagttttattaacgattgcaattctgagcttgtgtaataccagtgttttcgctgaagagtcaggttacatatggacacaaggtgaaagtggtttgtggtattatgtggatacagaaggtaattgtaagacaggttggcagtacataaatggatgttggtactatatggatgtcaatggtattatgacaacaggttggcagtacataaataatcactggtattatatggatgctaatggggctatgaccatgggctggcaatatataaatggctactggtattacatggatgctaatggggctatgacaacaggctggcagtacataaatggtcagtggtattatatggatgtcaatggtattatgacaacgggctggcagtatataggtggtcagtggtattatatagctccaagtggaattatggttacaggctggcagtatataggtggtcagtggtattatatagcttcaagtggagtgatgacaacgggttggcagtatataaatggcaactggtatctcatgaatggaaatggagcgatgacaacaggctggcagtatatatctaatttttggtattatatgaatggaaatggggttatgcagaccggttggcaatctattaatggcacatggtattattttaatgcgagtggagattgggttgatttttcaagcatgaattcgtatgcacagggatattcaagttcaacaaaatatttaataatggtggacagaaaagcttgtgttgtaggcatttattacggaagtagaggtaattggactcagcaatatgcatggccgtgtgcacctggaaaagcatcaactccgactgttggaggcgaatttaatgttggcggtaagggatactattttgattccggcaattcaagatgttattattatacacagtttaagggaaattatctgttccatagtgtgttgtataacaaaaatggtacacttcaggatggcagagtcggaattccgctgtctcatggatgtgtaaggcttgaaatagggaacgctaaatggatatatgataacattccgaggggaacacatgtagttgtttattaaagagaatatttataaaatttctattagacaaaataaaaatgatgaattatatttatttttataaatttgagggcataacatgcaaaccaacaccacacgagataaaacaattgatttcataaagggcatccttattttatttgtgattttaggtcacactacattgggtctgacagacatgtactcatttgatgatacaatgaatggtattgcaaatgtaatatacagctttcacatgccttgctttatcgcagtttcaggcttcttatacagtgaatatgtaggggatgcttcacaaggcatttttagccggataggtcataaagcatttaatatcctgctgccgtacgtgatgatttcagttatttactggattattaaatttgccctttcaaatttgataagggagccggttgccgttagcagcctgataagcataccgtggaagccgatagagtttttatggtatttatacgcgctatttctcatatattgtgtggcgtatatggctgattatgtgtttgcgaggcttctgccacattttaattataaaatggagcttttatttgtgctgtttttaataattgctttcacatgctatggcagctttcactatgagggctttaactacatagccggctttcagatgtacttttatctgggatgcctgattaagaagtggcttgataaactggataatagatatgctgtgctgagccttgccgttatgagtgtgcttgtagaggcgtccggcatagtattacaggatgacatgagcagcaatccccttttcagcagtctgtttgagcggtttaccgcctgtatagtgacagtatttatatttgcagtaagctattttttatcaaggtattgtgatttccctaaatggttacagactatcggccgggatagcatgccgttttatgcgatgaatgtgatatttgtaggtggaatcaggattatattgaacagggctggtataaccaatatggcgctgcagtgtatatgtggatttgcaggaagcactgctatatgctggatattgtatgagtgtatcataaagaaaatcaggcttatcgattttatattctacccgggtaaacagctcgatgtcagaaaatgacaaatagaaatcagggtgttgttttttaatactaatccgatatactatatagtgtttactgaaaaaatatcaaaataaagcgtttcaatagaaaaggaaacaccatgaaatttattaaaattcctgcatttgcaatagtcctccttttgctcatgcaaatagtatcaaaggcatttattgccattgacagcagcgatatcgaaaatatatatggcttttactcagaaccaaagaacagtcttgatatggtcatgattggaccaagtgaggtatacacgggctatgcaccggcgttggcgtgggaggagtatggccttaagtcgtgcaatctttcaataggagctgtgccatgcaatatgtacaagtccatcgtcacggagattgtgaagagacagaagccgaagcttcttttaatcaatgcttctgcatttagttattgcaatagtaatctgactgatgaggtttatctgagaaagtggattgataatatgcctatgtcacagaacaagcttgacacggtaaagactattcccaaaaatatcaataatgatgatgaaaaggtgaaggataatatatcggataccctttattttccattggagaagtatcatggcaactggaaggcccctgaggcagtgtatacctcatttgtcactcgtgcctatatgaggctcagtggtggaggctatctgaagggcttttattcaaaaacaggcatcaccggaggccgtgacaatctggcaaatatcggacagcctactaaagaagcctatgtgctgactgatgaatgcagagcatatcttaaggagctgctttcgtactgcaataagcttggcatagagcatgtgctgttgctgcagccacctcatgagacacaggctgctgataagtcagggcttgagcagattgaaagtataacgagcgagtatggatacgattttcttgatctgagtactgattatgagagcattgcagggatagatgattcacatgatttcgcagattttgagcatctgaatgcatatggagcccaaaagctttcgtcatatattggcaatctggtagtaaaccaatatgggataaagtctgatacgacaggttcagagctttcaagatgggaaaagtccgtgaagaggactaaaaaagctctgaaaatggcaagagaatatactgacagaggagaggcacaggtggttggagagtatgaggcagccaaataagtgaagctgccggggaattaagcgttgcagaatggtattatttagtggtatttgattctggctttgatgagccttatgccttcacataccatctcgtcacgcatcagtaaaagcagcaccatatagattataaatccggtcacaatcataatcattgtgtgcatgaagctgactgacagctttgcatccatgagcagcagtacgataagcatacagactgctgatacaagatatttccacgataaagaaaatatttttggtatacttagctcatttcgtatgaagtaaagctgcacggcagttattattacctccgagatgacagatgctatggctgcaccgtatgaatagagctgaggtatgagaatcatattcatgacaaaattggctacggctccgatacatactgagcgtgtcagcagaccttcacgcttggtagttaccagatactgtataccgattacattgcttaaacctataatcggcaacagtgtagccattatcatgatgaggtatggcaccttttcatatccaggcccgaaaaaccatggcgagaaattgcgcgcgatgcctatcaggccaaagcacagggcaagacctataaaccagacgaattgaaagctcttataaaggagggcttttacttcgtcttttttattttcactgaaggctcttcctattcttggaagcatcacagtaccgagtgatgttacgagcatgagcaccattttggatatcttgttggcctgctcatagtagccgttttctgtcatgctgccggttatgttgttgagcatggttttgtcaagcgctgtgtatatggttgtcgctatagttggtacaaatagtgtgagagtagcccttagatgagagaatggcttaagctccttaagctttggtctgtcaacatattgaggcaggtaaaaccagatggatatattggcaaaaagctctaatagacatactcctgccacatatatgagcaaatcactctctgagcgcacggcgatgaagataaaagcaatgtttatgattttaaaaatcacgtttcgaccgactattttgccaaattcctcaagtccctgaaacagccaggagatatcagaagcaactgatatcaggtacacggcttcaatcaatagcaggtgctttttgagtggtgagtgcccaaatgcaagtgtgaataccatatatgcgcaaagacacacaatcacactgatgacggatagaagctctatctcccagaaggtttttgtgcgtttcgctctgtcctcctgcaggtatgatatttccctgtttccgtagtttacagtgcccagtgcggcaaacatgataaagtatgataccagtgagtaggtatagctgtatgcacctattccgtctgccttaagcaccctcgagaggtacggcgctgtgataagcggtgtaatcagtgtgagtatctggtagctcacattatatatgtagtttagttttatactcttgtttttttgtgttttctttttcatgcagatatcatatcacatattgacttattttggctatgcagttattatataaaaatcgcaaattaacattactatcaacttacacgtataaattacgacaggggctaaagcctgtcacataggtggagaaatggataatattataatacgaaacaggaaagaggagtttaaggagcttgttttatacacgttttttggcaatatgacctttgtgatcagcataggctcatatgccatttttaatgtattctttggtatcaatgagctgattgcgaacgcactggcatggttgtttgctgttcttttttcatatgttaccaacaagaagtgggtgtttaaggctgcaacgcccaccaagacggcatttttagtacagatgtttgcttttttcagtggcagattcatcacgcttgttattgaagagactattatctttatttttatcacgcttctggactatcctagcatgtgggtgaagctggcagcgcaggtggttgtggtggtgctcaactatgtgataagcaagctgtttgttttcaaaaatcgctaaatgtggtatatttaataaaataataagaactataatagtgtgtatatggtataataaaacgtaaatttaaacgcagtttatgagaagttgatttacatatggatatagaagctgctttttgcagtgtgggacagaaggagaaaatcctatatgagtaatagacttgacatgaaaaaagatacaaataatcgaaaagacaaaacaaaatacgatggtccggagaagccggacgcatacatgggcaatgacaagcaatgggttttcagggcattggttcttgcttttgttgatatgtgtattattgcaatctcattctttttcgctttgatgatcaggtttgagttttcatattcacatattccgctctcgtttttggagggttatctgcacattgtgccattgtttatggtgatttcacttgtggtgttttatattttcagactttaccacagtatatggcgttttgcgagcatcaatgaatttatgcatattattggtgcctttctggtgcttgcggttgtgagcgttactattcatgaggtgtatgagattaagatgccgtatgccttctggattatcggactgatgctcagctttgcactgtgcacagcgtgtcgttttgcgtacagatttttcaggacaggtcagaagatgcttgagcagagaggctctgcaaacggtgatgagaaggtcatgattataggagccggaaatgcgggcaggatgcttatcagggagcttatcatgagctcacatctgcacacaaaggcctgctgcatcatagatgacaatccggcgaagctggggcgctttatagacggcgtgcctattgtcggcaacagaaatgacattccggagatggttgagaagtatgatatcacgaaaattgtgtatgctgtaccttctacatccggtaaggacaggaaggatatactcaatatttgtaaggataccggctgtgatgtgtctgtggttccgggaatctatcagatggtggacggaagagtgtcggtttccaatctacgtccggtaagcattgaggatttgctgggcagagatccggttgttgtggataatgacggtattcattcatttttacagggcaaggtggtcatggttacaggtggcggtggctcaatcggtagtgagctttgccgtcagatagccagggaggatccgaagcttcttatcatttttgatatttacgagaataatgcatacgatatacagcaggagctgaagcgcaaatatccttatgtaagggtggagacgctgattggctcggtgcgcaatactaacaggctgcactatgtattccagacatatcatccggagattatttatcatgcggcagcacataagcatgtaccgctgatggaggaaagcccgaatgaggcaataaagaacaatgtgcttggcacattaaagctctcaaggattgcagcagagtaccatgtgaagaagttcgtgcttatctctacggataaggcggttaatccaaccaatatcatgggtgcatcaaagcgtctgtgtgagatggttatacagatgatgaacaggcagactgagactgattttgtcgctgtgcgttttggaaacgtgcttggcagcaatggtagtgttatcccgctctttaagaagcagatagaggatggcggtcctgttactgtgacggacaagcgtattatcaggtattttatgacaattccggaggctgtggcgcttgtgctgcaggcagggctctatgctcacggaggcgaaattttcgtgctcgacatgggcgagccggtcaagattgatgatatggctaggaatcttatcaggctttcaggactggagccggatgtggatattcagattgtatacacaggcctgcgtccgggcgagaagctctacgaggagatgctgatgagcgaggagggtctcaaggagactccgaacaagctgattcatgtgggtgagcctattgagatggatgatgagctctttgagaagcagcttgagatgctcgagaaggcatgcacctcagaagcaaaggatatcaagcagatagtggcctctgtggtaaagacatatcatcctgacctggagaactaaatatcttttgaagctcataatacagactgtaaaagccggatgtttggcatattttatgccggaagcgaggaacataactatggaaaagagacagatttcattttcaccacctgatataacagaggcagaggtgtcagctgttgctgatgcactgcgaagcggttggattacaacaggtccaaggaccaaggagtttgagaagaggattgctaagctatgcggcacggataaggctgtagctcttggctctgctactgcgtgtcttgagtcgatactcagattcttagggataggtgcaggtgatgaggtcatcacaagtgcatacacatatactgcatctgcaagccctgctgtgcatgtaggtgcagcgcttaagtttatagacgtagcacctgattcatttgagatggattacgatgccctggaagctgctattacagaaaagacaaaggttatcgtgccggttgatattgcaggtgtgccttgcgactatgacaggatttttgatattgtggagagaaagaaggctctttttcatccgtcaaatgatgtgcagagggcaatcggacgtgtgattgtggcggctgactcagctcatgcttttggtgcttcttacatgagagcaggtgagcggattatgtgtggcaatgtagctgattttacaagcttttcattccatgcggtcaagaatctgaccacagcagagggaggagcactcacctggagacctatagagggctttgatgacgagtatatctacaagcagtttatgctgctttcactccacggacagacaaaggatgcactccacaagaatggtctgggcaactgggagtatgatattgtggctccttcgtataagtgcaatatgactgatatccaggctgctattggtctggtacagcttgacagatatgaggggcttctcaagaggcgccgtgatattatagagcgctatgacgaggcatttaagccgcttggtctcttgactgtgcctcattttacagacaggcatacatcgagcggacatctgtatctgcttcgtataccgggcatcggcgtggataggcgtaatgagcttatagtgcagatggcggagcgaggtatcgccacaaatgtgcatttcaagccgcttccgatgatgacagcatataagaatatgggctttgatatagctgattttccaaatgcttatcagcagtatgagaatgagattacacttcctcttaacacaaagcttagcgatgaggatgtggagtatataattaataatttattggagattttacatgagtagatggagaacatggggagagattcctacattcatgaaaaatgattttacacttaaatattacaggcatctgagcagaaagaggacaagcatggtatttaaacgcatttttgatgtgattatgtccgctgttcttcttgtgctgctttcgcctgttatactggtccttgctgtctggataaaggtagatagcagaggacctgtttttttcagacaggagcgcatcacccagtatggcagaaagtttcgcatattcaagtttagaactatggtgaatgatgctgacaaaaagggttcactcgtgactgtcggtggcgattcaagaatcacaagagtcggtgctgtcatcagaaagtacaggcttgatgagattccgcagcttataaatgtgctatgtggtgatatgagctttgttggcacaagacctgaggtggagaagtatgtcatggcatatacacctgcgatgatggcgacacttctgatgcctgccggaatcacaagtgaggcaagcatcaggtataaggatgaggacaggcttctggaggctgcagatgatgtggattacacatatatccacaaggtgctgccgggcaagatgaggtataatcttaagtatcttaagagattttcgctgataaatgatatcagactgtgtatagagactgtgcttgcggtaatacattagtttacttgtctgggaggatgatacttatgaataaagtcaaattttcagtcttactgtcaatttattacaaggaaaagcctgagtatttcagggagtgtatggaaagcatatattcgcagactgttttaccggatgagatagtgctggtggaggatggccggctgacagaggagctttatgaggcaatcagagattatgaatgcaggccttcggaaataagttttgttacggtaaagcttgaaaaaaacagcgggctcggtcttgcacttgctgaaggcataaagcattgctctaatgagcttgtggccagaatggatacggatgatatatgtgtgcctgaccggtttgagagacagctgaatgctttttcggaaaatccggggcttgatatcataggcggctacatcagcgagttttccgatgatatgcataatattatatcagaaaggacagtgcctctcggaaattatgtgataaagcagtatcagagaaagcgcgatgcgttcaatcacatgactgtgatgtacaaaaggtctgcggtgcttgctgcgggcaattatcaggactgtctgcttatggaggattctcttctttgggcgaatatgatcagaaatcactgtcgtatggcaaatataggtgagactcttgtgtatgccagaaccggtgatgatatgctgaagaggcgtggcggctttgattatttccttaaatacaaggcaggaagaaagagtattttaaagacagggaccataagtgcggccgattattttgttacggttgcggtacagtttgttgtctgtatgatgccactttgcatgaggagcctggtgtttaaaaaaatattaaggaactaaaacttttcaaatgcatcttaatgtggtaaaatcggtatagttaatattaataggcttatttactagctgacacaggaggttaatataaatggatttcagagcggagtacgagaaatggtgtacagacccatattttgatgaggctacaaaggcagagctcaaggctatcgcaggtgatgataaggagatagaggacagattctatcgtacacttgagtttggtacagcaggtcttcgtggtgtaataggagctggcacaaacaggatgaatatatacacagtccgtcaggctacacagggactggcaaattacatactttcacagggagaggacgcagtaaagagaggtgttgcaatagcacatgactcacgtaatatgcatgatgagttcacagatgccacagcactctgtcttgcagctaacggaatcaagacatatgtattcccacagctcgcacctgttccggagctgtcatacgcagtaaggacactcggtacaatagccggtgttgttatcacagcaagccacaatcctcgtgagtacaatggatacaaggtatactgggaggatggtgcacaggttactccacctcatgatacaagcatcatggctgaggtggcaaaggttacatcatttgaccaggtaaagactatggacaaagctgctgctattgaggctggtctttacaatgtcatctctgatgaggttgaggagggatatttcggagagctccgcaagctttctatccatccggagattatcaaggccatggcaaaggacatcaagatcgtttacacaccactccacggcacaggtcttcgccctgtacagagagtacttaaggatatgggctttgagaatgtatacattgagccaagccaggcagtgcctgacggcaatttccctacatgtccttatccaaatcctgagaatcctgatgcatggaagcttgcacttgagcttgcaaaggaaaaggatgctgatatcgttttagcaactgaccctgatgccgacagactcggtgtatactgcaaggatacaaagacaggtgagtatgtgacatttacaggaaatatgtcagctatgcttatcggtgagtatattttaagccagaagagtgccaatggtactctgcctgagaatcctgcatttgttgagtcaattgtttctacagatatgggtaaggcaattgcggcagcatatggcgtaaagcatatcgaggttttaacaggtttcaagtatatcggagagcagatgctcaaatttgaaaaaaccggctgcaacaattatgtattcggtatggaggagagttacggatgtctgccgggcacatatgcaagggacaaggatgctccagcagcagtttgtatgctgtgtgaggtagctgccttctacaagtcacagggcaagactctctgggatggcatgattgacatgtatgagaagtatggctactacagagagggcatttccacaatgaccttaaagggtattgatggtgccgcacagataaatgagattatgacaaaggcacgtgctgctgagccaaagaaatttggtgattatcaggtgcttgctatccgtgattacaagaatgacacaagaaaagatatgacaacaggaaaggttgagccgacaggtcttccttcttctaatgtactttactacgaacttaacgataacgcttggtgctgtgtacgcccttctggtacagagcctaagattaaattctatttcggagttaaaggagtgtctcttgaagattcacaggctaagcttgatgctttgtcagctgaggttctcggacagtttgaataaggactatgatgaaaatatacatttgcccggattgtggctggatacggatggtttcaagaaggaaagaggttgaatgcttcaagtgtggcaggccgcagatgcgtctgacgaatctggagtttggaaagtatactaatatgtcggagaaggagcgtcaggactacgcagacgcgtggctttacattcataggaaaaaggaaaaataacatggcaaagaagagaagaagaaaaaagagaagaagtggacgtaagaagattatactttttgtatttgaaatcctgttgctgttaattgttctgttagtggtttgggcttataataagacactcggacaggttaaatatgaggatgcgctgacagctagtgaggccggaatcaatgaggatattgatgatgatgctcttgccaatatgcatggatatctcaatgtagcgttgtttggtctggataacagaagtaatggttcatacaatgaggggcattccgattgtatcatgatcgctagtctgaattatgatactaaggaggttcagcttgtttctgtctacagagatacgtatctgcctataggcaatggaaagtttgcaaaggcaaatgcagcatatgctaatggtggggcaaagagagcagtagctatgcttaattcaaatttggatttgaatattacgaagtatgtttgtgttgactggaaggctctcgtagatgctatagatgatatcggaggtcttgatcttgagattactaaggcggagatgaaggaaatcaattatctgattcctgaggttgattatactacaggatataatactccttatcttgagggggatggtatgcagcatcttgatggaactcaggctacatgctatgcacgtatcagaagcacctctggtgatgatttcttaagggcatcccgtcagagaattgtgcttcaggctatgcttgacaaggctaagcagtcagatttaggctcgctcacagagatgtgtaaggatatcatgagtcagataagtacaaactttacagctaccgagatattacagtatgcttcttatgttacaaagtttcagatgaaggagacaacaggcttcccatttgagctgactacaatgaatctttcatctactggggatacagttattccaattgatttagcacagaatgtttccaaacttcatcagtttctgtttaatgagactgattatcagccaactgagacagttcaaagtgtcagtgacaagattgctaaaaaaacaggtgttacgtcaaagacttctgcatttgatctctcacagtacaatgatactgttggttctgatggaaccgaaggggcaaagaaaaagaataaggataagcaggattcattaaagaacagtcagtcggagtctgaaaataattctggaacgaaatcatcatcagatgattcagatgagtaattacctgatggtatttatttagctgttataagcaataagttttataaaacaatatttatatgaacaatatatccggggccaatcaatagattggtcccacataatttaatatgattaataatgtaataacctataactaatgaatagttaatggaaaatcaatgattaaataacaactaaattacaagaacaagggagaatttatgaaaccggaaatcaaagaaaaaatcacggcaacaaaccagaaatacttaaagaaattcttaacagaggaagctccggctaagcttgagagccagcttgagcacatggactggtcataccttgatatgattcacaataaggagcagcagagaggtacattttcaccgcttgctgctatggagctttcagagatagaggcaaataaggacaaataccttgcaacaggttttgatgctgtcaagaatggcaaggttggtgcaattcttcttgccggtggacagggtacacgtcttggctttgacaaggctaagggcatgttcaatatcggaaagacaaaggaactctacatctttgagcagcttgtcgcaaacctcatgaaggttacaaatcagaccggtacatgggtgcctctgtatgttatgacaagcgagataaatgatagcatgacaagagagttctttgaagagcacgactattttggatacaacaaggactatgtgaagtttttcgtgcaggagatggttccggcagttgattttgatggaaatctgctcatgaaatctgaggattcacttgccatgtcaccaaacggaaacggtggatggttcaagtcactcatcaatgccggtcttgacaaggatttgaaggacaagggtgttgagtggctcaatgtatttgctgtggacaatgtgcttcagcagattgcagatcctgtatttgtaggtgctacaatcgagtccggctgtgtcagcggttctaaggtggtcagaaagtgcgatccatacgagagagtcggcgctatgtgtcttgagaatggcaagccttcgattgttgagtattacgagcttactcctgagatggcagaggcaaagaacgagaatggttcattgcagtatggctttggtgttatcttaaactatttattccgcgtggacaagctcatggctatcgcagagaagagccttccacttcatgtggtagagaagaaggtgccttacattgatgagaatggtacagagcataagcctgagactccgaatgcatacaagttcgagacactcatcctcgatatggtatacatgatggacaatagcctgccatttgaggtagacagagagaaggagtttgcacctgtaaagaatgcgacaggtacagattcggttgaaacagcgagagctcttcttgagaagaacggaattgaaatttaatatatgatttatggtaactgttcattagcagggatgtattgatattctgcaatttctatttatcgcagactcataggtgcatctgccgatgagcagttatttttataatcgcatagtggcctgcaatggggaacatagactataaatagttaactgatttatgaaaaaataaataatcccgtcacaaattaaacacagattgacagtatacttctaaatataaacgaaaggagaaattattatggataacaattatggaaatatgaatgacacaaataatacaaataatactaacagtacaaataacaatacaaacaatgtaaatttcacaatgtcgggtaatccttacaatccggatgagtcacagaaggctgcacagactaataatacatcagctgaaagctattcacagagctacaatccatattcgcaggcttctgcagcaggacagccaaatacaaaccagtcatatgcaaatcagtcatatgcaaaccagccttattctaatcagtcgtataattcaggcacaaataataatgcatatggcgacgcatcagccggttcgacagacaactcatatagccggatgaatatgaatggtcaggcataccagcagactgcaaagcctaagaaacagagagcacctagaaagcctggtgcatttggaccatttgcagcaaagacagtagcggcagctcttatcttcggactcgtcggaggcggtgttttcacaggagtaagctatattggcacgagagctatttcaaattcttctactgcaagtgcaaagcttaccactacaacatccggtgggactaagcagacatcctcagggaatgcaaaggatctgacagatgtatcatcagttgtcgatgaggtaatgcctagcatcgttgctatcacaaatacaggaacagtcacctacaacagctttttcggaaagcagtcacagcagtctcagagctgcggctcaggtatcattgtgagtgaggatgatgattatctctacattgctacaaacaaccatgttgtggcagattcagaggagctcacagtacagtttgatgatgattcagtggtaaaggcagaaatcagaggaacagatccggatgacgatctagcagttgtacgtgtaaagaaagcagaccttggaaaagatacttactcaaatatcaagattgctacaatcggagattctgaaagtgtagctgttggaagtcctgcaattgctatcggtaatgcacttggatacggacagtctgtcacaacaggtatagtaagtgcgcttaacagaactgttactacacaggattcacagacaggtgagactgttaccaacaacaagcttatccagacagatgcagcaataaaccctggaaacagtggtggagcactcttgaatgaaaatggcgaggttatcggtataaactctgtaaaatattcttcaactgaggttgagggtatcggatatgcaattcctatgtcggttgcaaagcctattattgagagtctcatccaggatggaaagtatacaaacgagaatcaggcataccttggaataaagggtggcgatgtttcatctgagatggtagcctacggcttcccacagggtgtgtatgtttcatctgtttcagctggttcaggtgccgcaaatgccggtttacaggagggagatatcatcactgctgttgacagcacaaagatttcttctatgacagagctgcagtcagcgttaaagagctacaaggccggagataaggttactcttactgttgcccgtcagagtggcagacagtacgaagagagcaaggttgaagtaaccttaagctctgcaaaggatattcagcagtaaataattcatttatatttatgagtacaaaaacgcgccagtgtggcgcgttttttgttatgaaaaatatagttaggggttgattttctaaataaaaaggtgtagtattatgagtgttcataaaaatataaggagaggcgaacgtgaacaaacaagagaaagatatactgaacacgttatatcatcaatcagttaacaatcaaagagagatatcagagttatccggtcattctctgggagttgtaaacaaatcaataaaagaattgatgaatgaaggttatataaatgaaaaatgtgctgttacacctaaggcacttaaagaattcaaagaaaaggctccgaagaatgcagtaattctggcagctggttatggaatgcgaatggtgcctataaataccgagactccaaagggactattagaggtaaatggagaagtacttatagagcggactatcagacagcttcatgaagtgggaatttatgaaatatatgtagttgtcggctttatgaaggagaggtatgagtatcttatcgatgattttggtgtagagctcgttgtcaatgaagagtatacgactaagaataatctatattcagtaaagaaggttctgaatcatttatcaaatacatatatcataccgtgtgatatatggtgcgacaagaatccgtaccatcaccatgaattatattcctggtatatggtcagtgatttgattgatgatgacagcacggtgcgtgttaacagaaaaatggagttggttaccattccgaaggctgccggcggcaatgctatgataggaattagctatctgcttgacgatgatgcacaaattgtcaaaggcagaattgaaaaattgtgtagtaattcggctaatgatggtgccttctgggagactgcactgtatgataaggacagaatgtttattaccgccagggtagtacattcgtgggatgtggttgaaattaacacatatgagcagctcagagagatggacagcgattcaaatcatctgaaaactgatgcaatacaggttatctgcgatgccttatctgtatcagcagacgatattgtagatattacggtattgaaaaagggcatgacaaaccgctcgttcctgttctcatgtaaagggaaaaaatatatcatgagaattccgggagagggaacggatcagctgataaacagacgtaatgaagcaatggtttataatactattgatggcagacatatatgtgatgatatcgcttatataaatccggataatggatataaaatcactgcgtttttagaaaatgcgagagtatgtgatccggaaaataatgatgatgtttgtaaatgcatgaagcgtctcagagaatttcatgatatgaagcttaaagtaaatcatgaatttgatatattcggtcagcttgagttttatgagagcctgtgggatggttcgccttctgcatacagacattacaggcagactaaggaaaatgtcctttcactcagaccgtatatagaagctcatgtaaatgaaaaggttcttacgcatattgatgctgttccggataatttcctttttgttaaggatgaaaatggaaatgaggacatcagacttattgactgggaatatgcaggaatgcaggatccgcacgtagatatagccatgttctgcatatattccatgtatgacagggagcatgtggataagttaattgatgcatatttcacagaagggtgttcagctgaaatccgaataaagatttattgttatattgcagtatgcggacttttatggagtaactggtgtgagtataagagaaatctgggcgttgattttggtgaatattcacttagacagtacagatatgcaaaggattattacaaagtagtacaggatgaaatgcagaaattggaggataattaagaatgcatgaagtaaaacgcgcgattattatggcagcaggactgggaaatcgtatgagaccggtaacgctgaccactccgaagccattggtaagggtgaatggaaagcgtatgatagatacggttattgcaggtttacatgataatggaataacggagatttatattgttgccggatatttaaaggaacagttttatgaattagagaatgaatatccgggagttactataattgaaaatccttattatgaaagctgtaataatatttcatcactatatgttgcaagagatcatattgaggatgcaattattcttgatggggaccagattatatataatccgaaaattctttcaaaagagttcgaacgctcaggttataacagcgtatggactgatgaagaaacagatgagtggcttcagacagtagaagatggaattgtaacatcctgcagcaggagtggcggaagtcgtggatggcagctttatagcatctccagatggacagcagcagatggccgcaaactgaaaaaacatctggaaatagaatttgaaaacaaaaaaaatactcagatatactgggatgatgttgccatgttctgttatccggatgaatatcagcttggtatatatgagatgcaaaaaggtgatattattgaaatcgacaatttgcaggagcttgctgaaatagatagcagctacaagaaatatatggaggattagtattatgaaagagaaaaaaattgattggattatcacacttgtgccattagcaataattgtagcattgtgtattttattttttgcattacctgagcagtcaaatgctatactcagtcaggtgagatttttctttggagatacgtttgggatttattatctgattataggtttaggcatatttttgatatcgatatttatagcaggctcgaagtatggagatattgttcttggagagccggatgaaaaaccaaagtactcattcttttcatggggatgtatgatgttcacatgtggtctggcagcagatattttattctactcattttctgagtggattatgtatgcaaccaatccccacattaaggagcttggaagcatacaggaatgggccggtgtatttcctttgtttcactggagctttattccatgggcgttttatcttgttttagctgttgcatttggttttatgcttcatgtaagaaaaagaaaccgtcagaaatattcggaagcatgcagacctgttcttggaaaacatacagatggttttgcaggacgtattatcgacctgttagctgtatttgcgcttttagcaggaacagcaaccacatttagtgttgcaacacctcttatggcaacaattatcggagatgtgttccatatatcgcttagcagaaccgcaatcaatatcattatccttataattacatgtatagtttatacatactcattattacatggatttaagggaatcagcattttggcaaaagtctgtatctatttcttctttggactgcttgctattgtactgctgtttggcggtgaaacaagatatattcttgagaccggattgtcat

SEQ ID NO: 487 - DNA, 19401 bp, unidentified
  source 1..19401: mol_type = unassigned DNA
atgccgaatatgtcacctaaaaaagctcctatgcctacacaggagcctaatgtaagaaataaaaactttcttgaggtagctacaggctacacagaggaagttgcaatcgaagaggcacagcgttgccttaattgtaagcataagccttgcgtatcgggctgtccggtacatatttcaattcctgattttattaaggaagttgcacagggcaacttttcgggtgcttatgatgtaatttcaaaatcaagctcacttcctgcagtttgcggccgtgtttgcccacaggaaacacagtgtgagtcaaaatgcgtaagaggtattaagaccgaacctgtaggtatcggcagacttgagagatttgttgccgactggcacaatgctcagacagatgttgttgtaaataagccggagccaaacggtcataaggtagctgtagtaggttcaggcccttcaggtcttacttgcgcaggcgatcttgcaaaaatgggttacgatgtaactgtttttgaggcactccaccttgcaggcggcgttcttgtttacggtattcccgaattcagacttccaaagtcaatcgttcagaaagaagttgatacacttaaggctctcggcgttaaggttgaaacaaatatggttatcggcagagttatctctattgacgagcttatggacgatatgggctttgaggcagtatttatcggttcaggtgcaggtcttccgagatttatgaagattccgggcgagaacctttgcggcgtttattccgcaaatgagttcctcacaagaacaaaccttatgaagtcttataaagaggattccgctacacctattatgcacgctaaaaaggttgctatcgtaggcggcggtaatgttgctatggacgctgcccgttgtgcaaagcgtcttggtgcagatgaagtttacattgtttacagaagaagtgaagaggaacttcctgcaagaagagaagaagttgagcacgctaaggaagagggcattatctttaagctccttaacaaccctgttgaaattctcggtgatgaaaacgagtttgtaacaggtatgaagtgcgttgatatggaactcggtgagcctgacgaaagcggcagaagaagacctgttgttaagccggacagcgagtttgtacttgatgttgacgcagtagttatttctatcggtacatcaccaaacccacttatcaaggctactacaaagggccttgaaacacagaagtggggcggcattatcactgatgagcacggtcttacatctcgtgagggcgtatatgcaggcggtgacgctgtaacaggtgctgctacagtaattcttgcaatgggtgcaggcaaaacagccgcagcagctattgacgagtacattaagagcaaagagtaattcttatataaaaaacatttacccgattatagcaaaagctatagtcgggtattttttgtgtgtttcatctctaagattaataattaaggctctttatcaaaagttggtgtaattatggtttggtaaaataattaaaaaatttaggtcaagcctttttaaaggcttgcgggtttgggcagagcccataaaaagtttcccttacatcaaattatcgggcgcaaacagcaaagctgttttcgtgctaagacaatgttttgaaaacaggcgatagccttaaaaaggggaatagataaaataatgtgccgtcattgcgtagcaatgacggcacaattatagggagtatcttttctctgttgctgtcgcattggctttcgccattgtgttcaagccgccaaacggcaagccatttggctatcaaaatttgcgatagcataaagtatttgtgggcgttgcccacacccacaacctttgaaaaggttgaccaaactttttacttcgggacggagagtttagtttttgctttactttgttgcccgactgaaacttagtcataatttataattttgtcattttcttaaaaagttagtctgattttccccaccccatcactgcaaaacagcaaacaaaaacccgattatagcctttgctacaatcgggtatcttaatacttttctaaatcagcttaccgcttttttataaagctttttataaaccaagaacaatgccaccgatactattaaaaagaacagtgagcacgcaagcacgcacattataatgttatttgcacacgatacaaacagcatatatgttgctcttgacgctatgttaaaggtttcaatcttctttgacagcaaaattactatcggcaataccaatgttgtcaaaaatgtggcggctgttgcataataaatatggcgcactgccctatgtttccattttgttgataatacaaatattacgcaaatcagcgccgaaagcactgcacatattgcaattacaaacggcaacagctttttaacattctgaaatctgcccgctaatgttccgaaaaacggcaattccagcgactgcttataaattttagccgcctcttttataaggtattccctgttttcgctcgaaacactgtcggcgcttatgcccttttgctctatataatcgtcaagcgctgtattaaacgcctgtttaaaagctgttttatcaatcacactgccctcgcccgaataataatcctgtatatacttttcagtatcatcgtgaatcattatttcatcaagcaagccgttgaaaaagtcctcttcaagtccgcttgcataaccgaggtcggtcaaactgcttgttatctcgtcctttttctcagttatgtaattgcaggtgttcatattgtcaagcataaagctgtcattaaacagtgtaaactgcaacgaaacagcatacgcaagcactgttaaaagcaccgcaagcacaagtgaaagcaatatattaactatctttttaactgttgacatattcagccctcctttgatgttttatcaatctgaggacctgaaacatattttgcatacacaaaaaatctctgatctgtaagaccaagctcgtcaaacggataacaggtatacattatgagattttcttcatttgcgtttaaatcatacgcagaggtgtctgtcgctttctttacagccgtatcggtaatttcgtatgtgtaattgccgtagcttgtcttaatggtaacagtctgccctgccttagcgtttttaagtccgttaaaatatgtattgttgtgtccggcaacaagaattgtttttccgtaacccggtataaaactgccgttatatatgcctacgccgtttcgcagcgcaacatttccgtcaccgaagaaaaggttattgtcaatagagcaatcctctatgataagttcgccgaactgctcacctgtctttgggtattggatttcacttataggcagttttttatttgaatcggtttcattttcgttttctgacaccggcacaaatatattgttatattctgtggaataatctcttgcagagtccgaaaacataagacctgctgccgaaattaaagaagatgacggcataagtacaaggtagcctaaaagataaattaccacaaaaaatatagagggaagaattaaaaaacccttcccaccaatttttttatgcctgtgtctggtatttttcatatcagacatttacaatcaagctctttctctttttttaacagaaagaacaactgtagcacctgctgcaagagcaactgctgcgcctgcaactgtagcaacagcgaatgtgtttacattagcgcctgttgtagcaatagcattgcttgtagttgttgtgttacccttactgtcagttgtaacctttgtgctaacaattgcgttgccgttcttgtcagtagcagaaacagtcttagttgccttgtcgtaagaaactgtaacaccgattacattagcagccttctgaccataagtgaagagctcctgcttctgatctttgttaagatccttaacagttgaagcaccctgtgacttaaggtaatctacagcatcattgatgtccgcaataatctccttagattctgcgtctgtcatgtcaatagtgttgaagtagttttcagcctggttgagcatctcatcagcattagtaacaaaaccaccgttgtagcttgtgtttacttctgaaagcttgtcaagtacagcctgttctgcgctgttgataccagcggcaaaagccggcacgctagccatagcaataactgttgctgatgcaaggattgcagataactttttcattatttataccgcctctctaaagtatttagcaaatcgttgaacaaaattatatatataaaattttgcccaattatctactttgaactatattttaacacaataattcttttttgtaaatactttacattaaattactgtcgaatcttagtttttttatttttttgcagtaaacaaagttgtttatcttgcttgtttttggtattattcacgaattttcttgtctgacatacattcaacaagaacagctttttgcgcatgaagtctgttttctgcctcttcaaagatttcattggcatgctcttcaaatacatcggcagtgatttcttcgccacggtgagcaggtaagcagtgaagaaccatacactccggatttgtaacagacataagctctttgtttacctgatagccggcaaatgcctgttcacggattttcttttcttcttcctgtcccatagaagcccaaacatctgtgtaaaccacatcggcattcttcgctgcctccatcgggtcttcaacaatttcaaatttgccgttgccgtactttttaccgaattcaataatgtgttcaggcggcatatatccctttgggcaagctgcagagaaagacatacctgtgctgagtgcgccgacaatgagagagttcatcatattgttgccgtcaccgataaagcacattttaagtccctcaagtttacccttgaactcacggatagtcataaggtcagcgagtacctgacaaggatggcagtagtctgtaagaccgttgataatcggaatagaaccgtgctctgcaagagcctcaacttcttcctgcttaaatgttctgatcataataccgtcaagaaaacgagagagaactcttgctgtatcctgaacaggctcgcctctgccgatctgtaaatcattggatgaaaggaagagcggataaccgccgagctgtgtcatacctacttcaaaagaaactcttgttcttgtgcttgacttctcaaaaatcataccaagtgttttgccggcaagaattttgtgctcaatgccgtgtttctgctcatatttaagctggtcagcaaggttaagtgtattgatgatttcatctgttgaccaatcttcaagtttaagtaaatgcttcattttaattctcctttaatgttttttcaagaatatcaagcgcaaggtcgatttctttttttgtaatgttaagcggcggcaacattcttaaaagtgactttgcggtaatgataataagtccgttttcaacgcattttgccgcaatgtcgtgtgcgtcgccgtctttaagctcaatgccaatcataagtcccattctgcgaacagcctttacgccgtccattttgaggactttttcttctatatatttaccctttgactcaacctcggagagaaactccggctttgaaattttatcaagcacatagtttgcacctgcgcaaacaacagggtttgcaccgaatgttgtgccgtgagtcgaaggtgacattacatcttttagtttttcgccgcaaacgcataagccgatcggaagtccgccgccaatgccctttgcaactgtgaaaatgtcaggttttacttcaaaattctggaaagcgaacagcttgcctgttctgcctgcacctgtctgtacctcgtcaacaataacaagaatatccttttcgttacagaacttaacaaggctctgaacatagtctttatcaaggatatttacaccgccctcgccctgaataagctcaagcataactgcgcaggttttgtctgttacggcattttcaagagcgttcatatcgttggcgtcaacatatgcgaatccctgtgtaaacgggaaaaagtagttgtggaacacatcttgtcctgtagccgaaagtgtggttactgttctgccgtggaaagaattgttgagtgtaataatctcattgcggtcagcaccgtacttatcaaagctgtattttctcgcaactttaatggcacattcattagcctccgcaccgctgtttccgaagcatacctttgaaaagcctgtaagtgtacagagtttttcggcaagattacttgcctgcgggcaataaaagtagtttgacatatgctgaattgtgtttgcttgttcgcttacggcttttacccagccgtcctcgcaccagccgaggctgtttacaccgatacccgatgcgacatcaacatattttttaccgtcctcgtcataagcagttgcacccttgccgctttttaaagctacattgtatctgccgtaggtgtgcattatgtactgcgaatctttttcctttgtattcatcataccaccccttaagtgttatctacatcttcgttattaaaggaaaaaacaaatatatcctcacgctttttaaatccgaaatcctgccagaagctctgacccgtggtgttgttctgatagcagaagatatgagttttatcaattccttggtctttaatcgctttgatagcgctttttgcaagttcgtgaccgattcggtttcttcggtaatcgggcagaaccgccatatggtgaataaatcctcgtctgccgtcatgacttgcaagtacagtacctacaattttaccgtcaattacggcaaccttgctcataccctcgcttcttgtcagataagattctatttttgctttttcgtcagccttggacaaggctctttttgaggtaatctgccagagggcaaatacttcttcgtagtcatcgattgtcatttctctgattatcatatctgtttttccttatcaactgcccgtaggcaaaatatttgcaaatctattaatagaacattgtgccgataccctcatcactgaacatttcaatgaggatagagtgttcaattctgccgtcaataatgtgtgctctgcttacgccgcttcttacagcctcaacacagcagtcaattttcggaatcataccgccctttatgatgccctcacgcttgagcataggaacttcgctgacatttacaacagatatgagcgagtcttcgtcgtttacatcttttaaaagacctctgatgtctgtcataagaatgagctttttggcaccgatttttgcggcgatgtgagctgcggcaatgtctgcgtttacattataaacatttccgtcataaccgcttgcaacggtagccacaatcggaatataaccgttgttgataacattctgcaaaggttccggatttacttctttaatctcgcctacatagccgaggtctgcacttgtaacaagtttttccgccataagcatattgccgtcaagaccgcaaagaccgattgcctttccgccgtgtttttccataagctgaacaaggtttttgtttaccttgcctgcaagtaccatctgcacaatgtcaatagtttcttcgtcggtaacacgcataccgttttcgaacttgctttctttgccgactgccttaagcattgcatttatttcagggccaccgccgtgaacaagcacaacattaacgcctacaaggcgcataagtgcaatatcgctcataacggcgcttttgagtttatcgtttatcattgcgttgccgccgtattttacaacaattgtttcaccgctgaatttacgaatatacggcatagcttgtattaagacttttgctcttttattaatatccatttttcatttcccctgatataaatttaatgcccgtttttcagataaattatggtttggcaaattactttgccaattaggttctgtagtcgccgttgatttttacataatcataggtgaggtcacagccgtaagcctcggcatagccaaaaccgtcatttaatgatacaagaatgttgatttccttttcaagcagaatttcctttgctttttcttccgaaaactcaacccctgcgccgtccttgcatacaagaatattgcctttggcggattcaaaagaaacatctacctttttaacatcaacatcagcgccgctgtaaccgattgcacacaatactctgccccagtttgcatctgagccgaacattgcggcttttacaaggcttgaaccgataatgctctttgcaactttaacagcgttgggcttgctcttagcaccctcaaccttgcaaacaagaagttttgttgcgccttcgccgtcacccgcaagtttctttgcaagtgctctgaaagctgcggtaagtccgcttaagaatgtatagtaatcttcgtttttgttggtaatcattctgttgcctgccttgcccgatgccataatagcaagggtatcgtttgtagatgtatcgccgtcaacgcttaccatattgtaactgtcctcaacagcctcacgcagagcctcacgcagcatatccgaagaaacagccgcatctgttgtaacaaaagagagcatagtacccatattaatgtgaatcataccgctgccctttgcaatgccgccgattgtaacggtcttgccgtcaagctccatctgcatagccatttctttttttaccgtatctgttgtcataatagcctcggctgcgtctgtgccgccctctttggtgaggtgacctttcatataaacgcaagcctttaaaataggctgaataggcagaggctgaccgataacacctgttgatgcaacgataacatcttccgcttttacaccgagagtttcgcctgcgataaggcacatatgatttgcaatgtcatatccgtttgcgttgcaggtgtttgcattgcctgaatttacgataacagcctgtgcaatgccgttttcgaggtgctttttggttacctcgatagccgaacttttaacaaggtttttagtataaacagccgccgcagtacagggagtgtcgcaataaatcagcgcaaggtcacgctttgttttatttgacggcttgattgacgcacaaataccggctgctgtaaagcccataggagaagtaactgtgccttcgataaatctgtagtttcccataataaagcctccgttttatagttttgcttaattattaattaaaaagcaggcggaacgattataaggcctgtcttttcgtcaagtccgaaaataatgttcatattctgaattgcctgacctgctgcacccttaaccatattgtcaatagctgcgcaagccacaagcttatttgctcttttatcgtgatgaattgaaacatcacagaagtttgaatagcgtacattgtgaatgtcggcgcatttgccgtcgtcaagaagtcttacaaaaaactcgtctttgtaaaaatcctcatacgcttttctgatttgctcaaaagtaacgccctcgttaatatccgcataaacagtggcaagaatacctctgtttacaggtaaaaggtgcggcacaaatgtgattgttacatcttcgcccgaaagttttgaaagtgtctgctcaatttcgggtgtgtggcggtggcaggctaccttataagcgtggaatccctcgttaagttcagggaagtgattgccttgtgtaggttttctgcctgcacctgttacgccgcttttgcagtcacagatgataccctttgtgcttacaagtccgtttgcgattgccggagcaatggcaagtggggaacaggtagtgtagcagcccgggtttgcaattaattttttacctttaattttatctctgaaaaattcaggaagtccgtaaacagactgttcgtgtaactttttgtcaagaaaagtaccgccgtaccactctgtatattcttcttcgctctcaagacggaagtctgcgccgaggtcaatgaaagccttgcctgcgcttatgcacttttcggcaagttcctgtgaaagaccgtggggaagtgcggcgaagataacatcgcttttctcaacaacagcgtcttggtcttcacagaccatatcgtttaaaaatgtatatgacggataaacatcgcttaacttctgaccttcaaaagaaaccgagctgatagctgaaatttcagcctcggggtgacttgtcagaagtcttacaagctcggcgccggcatagcctgttgcgcctacaatacctgcttttatcattttaatcaatcctttatgaatatatatctaacaattcttatactgatactaatagtctatatctaaatcaatccgccaaacattaactaaaacaaacaaataaaagtttgaagtttccaaaggtcactgacctttggtcgtctaaggaaaaaggattcttaagggaaaagggactcgaaatcccttttctcttgagcgtgctttcttttggagcttttcttttcacgcaaaagaaaagcggaattggcaggaggtttaatttaagacaaaaattgttttcaacaactgcatttataaaatcaattataaattcttagcaatttcagccacacgctttgcctgtgcctttacattttcagaggcagggccgccgaatgcttttctttcgtttgtacaagtttcaagtgaaattgctctgtaaacatcatcgttaaatacatcacaaacctttttgtactcctcaatcgggaggttttcaaggtctgtaccaagctcaatgcatcttgcaacgagttcgcctgttgccttgtatgcatctctgaacggtactccgttctttgtgagccagtctgcgcagtcggttgcgttaataaatccgcctgctgccgctttacgcatattctgcggaataactttcattgtgtcgagcattggagtaaaggctgtaaggcacattttaactgtatcaacagcatcaaaaattgcctctttgtcctcctgcatatctttattgtatgcaagggcaatgcctttcataattgtaagtaaggtcatattgtcgccgaaaactctgccgctcttgccacgtacgagttctgcgatgtcaggattctttttctgcggcataattgaagaacctgttgaaaaagcgtcgtcaagctcaatgaatttaaattcccagctgcaccacataatgatttcttctgaaaatcttgagaggtgcaccataataatagaaagaacagacgcgaactcaatgcagtaatctctgtcggatacaccgtcaagcgagttgtttgtaattctttcaaaaccgagcagctcggctgtaattgttctgtcgatagggtatgttgtgcctgctaaagcacaagagccgagcggcatttcgtccattctcttaaggcagtcctcaagtcttgacacatctcttaaaagcatttcgccgtaagctaaaaggtggtgaccgaaagtaatcggctgtgctctctgtaaatgagtgtagccgggcataacggtttcgctgtacttttccgccttgtcggcaataaccttgataaggtcaacaacgagctttttaacatttacaacttcctttttaaggtaaagtttaatgtcaacggctacctggtcgttacggcttcttgatgtgtgaagtcgcttgccgttgtcgccgattctttttgtaagctcgccctcaataaaggtgtgaatatcctctgcttccatatcaatatggagagtgccgttttctatgtctgcaaggattcccttaagaccctgaactatgtcgtcagcctcttcctgtttgataatgccgcatctgccgagcattgttgcgtgggcaatactgccctcgatatcctctttatacatacggctgtcaaatgagattgagctgttaaaatcgttagtggtttttgaaagttcctttttaaatctgcctttccaaagctgcatataatcacctcgggttaatgaatgattgttaatttgtgtattatttataattgatattgctgtttaaaaatatccgtataaacaactgtcagggacagagaatttccctgtccccgaaccggaataattattttaattcatacaaaagtctttgagtaaaaattacttaataagaccctttttagcacgaaccttgattggaagaccgaagaggttgatgaaacctgcactgtcattctgatcgtaaacctgatcctcgtcaaaggttgcgatttcttcatcatagagtgaatatgggcttgtaacgcctgcgtcaatgatgttgcccttgtaaagctttaacttaacatcacctgttacatactcctgtgtgctgtcaacgaatgccgagagagcctcacggagaggtgtgtaccatttgccgtcataaacgagttctgcaaatgtgtttgaaaggttcttcttgtagtgaagtgtatccttgtcaaggcagatttcctcaagcttgttgtgagctgcatagaggattgtgccgcccggtgtttcataaaccccacgagccttcatacctacaagacggttttcaacgatatctgtgatacctacgccgtttctgccgccgattttgttaagctctttaataagctcaacagagtcgatttcttcgccgttaagttttgtaggaacgcccttttcaaatgaaattgtaacatactctgccttgtcgggagcctgctcaggagaaacgccgagttcaaggaaaccttccttgttgtacataggctcatttgcaggatcttcaaggtcaagaccttcgtggcttaagtgccagaggtttttatccttagaatagtttgtttcacggttaatcttgagcggaatgttgtgcttttcagcgtactcgatttcgtcctcacggctcttgaattcccaagttctccaaggagcgataatcttcatatccggagcataagccttgatagcaagttcaaaacgaacctggtcgttacccttacctgtgcagccgtgacagatagcgtcagcgccctcggctttagcgatttctacaagtcttttagcaatgataggacgggcaaatgatgtaccgaggaggtatttgccctcgtaaacagcgcctgctttaactgtaggaatgatgtactcgtcaacaaactcctttttaaggtcttcaatataaagtttagatgcgcctgtcttaatagccttttcctcaagaccgtcaagctctgtgccctgtcctacatcacccgaaacagcgataacctcgcagttgtcatagttttcttttaaccaaggaataataatagaagtatcaagtccgcctgaataagcgagaacaacttttttaattttattgtcagccattttaatttcctccatagaaatgatttatattactcttacattatacgctttctgacggaaaaatcaagtgttttttgaataattattcaatacaccgtaaaattgtgataaatgcacttaattctaaataaaacccaaggtttttacagcaaaatcaaccttgatttcaacataaatcttcaatatatgtataaaaatgcatatatgcagaaataatgaatattcattttttgcgcttgattttgcataaaatgtatattttaatgaatattcaatgcagatattcattttggcttgcggcaaagcaaaaaataaacagccgattggatatttaatcaaagtaaaacaggtcttaaaattttttgtccaatgaaatgcataaaatcagagcaagttttattgtcaactttattatacatatgctaagtaaacttgttaatagattttttgatttatttatatcactaaatacaagcaagtaaaaaagcccgactgtttttacatagtcgggcaagtattataaaatatcaagatttcttttccaaattaaaattctttttacagactcgtcgagtctgtctgctgtaatttctccgctttgtacggcattaagcaatgcggtatattcgctttcaatatcgccgcaacagaggaagtcattgcctgctttaaaagcgacaaccgagagtggttcgtaaatgtcaagggcgtcaacggcaaacatatcgaggtcatcggtcataacaactccgtcaaatttaagcgtatctcttataacctcatgcacaggctcagagagcgaggcgggattttcgctgtcaatcgaatttactgttacgtgcgacacaagaatactgtctgcgcctgcggctatacctgcctgaaacggcagaaaatcattgttctgcaagtccgagaaagttctgctgtcagtagcgctggaataatgtgtgtcgccgttatctccgtatccggggaagtgctttaatacagtgccgagttttttctctttgcttgcttttacaaccgtatccacaaatctgcttgtgcttgcggcgtcacttgaaaacgacctgtaatacataaatgaatcggggttggaagtgatgtcgcagacaggcgccatatttacatttacgccgagcgaaagcagaaattccgctttatcgtatgcgtcgtcttcaatagcgctccaaccgccgttgttaaatgtatcgctcggtgaaaggtatgcgctgtcccttaggtttggattatcgctcgctcttacaaccgttccgccctcttcgtctgtgccgataataagcggaattttggcattggactgcatagcttttatatcggcattcacttcttcttttgtcttgccgtcaaaatctacgccgaacagcaaaacgccgccgatgtggtattcgtttattgcgtcgctcatatcattgccacgacaatttacataaaacagctgtccgactttttcttcaaccgtcatttttgaaatcatatcgtcaatgtctgaatatgtgtcgggaggagcggtggtttctgtcactgctgcctgactgttttgctcgtcatttgtcgactgcgcttttgaagcttcgctcgtgttctgacagcctgcaagcactgttgccaacattgctgcggtgagaagtgatgtaattgttcttttgattttcattttatccctcatttaaaaatttcgacagtcgtattttctacaaatctgtccttaaaagttttcatcttttgcatatgcggtgtgttaagatgttctttttgcaatttttcggactgccatttttcaataagcagtacctcattgctttttccgaatgacggcacaaagtaatcgtattttatacagccgttttcattttgtacaatctgcggaaagccctcgtttttaagagctgtcaaaaagtcattaaccataccgtttttaacggaatattttacgataagcgtgatttctttcattttatctccttgtcggcctttttaagtgttttgtaagtttcaaaataaaagaatttgtctgtatatgtacctattataccaacgactttgcccattgtaaaggctgcaagtacagttcctatgctaagtccgtcaaggtagccgaggcagaagaaagtaagcgcagcggttataaaaatcttccgatataacaaattattatgcacactgacagcctgctgtcagtgtgcataaaacaaaatttgaaaaaacaggcggtagccgttgtaaccgaaaatgcccaaaatataggcaacgcattgcgttgcctatgaaggttaagtatgttttcttttattgctctcgcattgacttccgcccagtcgttcaagccgccaaacagcaagctgtttggctatcgttagattgcataaacggaaagtatttgtgggctttgcccacacccacaacctttgaaaaggttgaccaaacttttataatactttgcaaaattattttgttaaactttaattatcgttttgctattgcttgctgtaaggtggtaacatcccttacatcacggtgaccgtcaaagtttgtatctgtgtaataatactggagcgaatcaagctcaaccgatccggaaatgtactgttgcagaaaagtaacatcgtttacatctactgtgccttgaaggtcaatattgccgaatctcaatatgtatatattcgaaccggaagtaccgcctccgccgccgactacataagctttgcggtaagaaaatgtagtgcagtaatctgttggttcattaattttagtagacagataaatttccacgcagccgtccttatccggaactacgcccgttacagcgccgccgctctgaaagtacaaggcggagtcataataaccgccgccgtctgctttttcgtatttgaacttataatcatgactgccgatacttgagtattccattgtatgcgagccgtccttgttaaaataattcggagctaactcgtgaagatttatttttgctttaacataccttccgcctttattgtcaaatgtgtaacttgcgtatgtgtttcccgaaccgcttacaaaatagcgggcatatttttcggaagacggcataaagagtgttttgtcaccgcctatacaatcggcaaatttcattgagtagtttttttgagtatcgcctcccgtaaataatactccgtttgtataatcggacggaatattgtacgcagaaaccaaaagcgtgttgttgccgatgttttttgccgagttgtaaatcttaacacccttatgcggcttaacggtttttgcgtttgcggtcactgctgcacctgcagtcagcaccgcacaaagaattaaacatacaaatttttccattttatactcctttataattatttggtaatagcttgttgtaagtctgtaacatctttaacatttgttttactgtcacggtttatgtcggaataaaacatctgaagtttatcaaattccgcatcgcccgcaaggtatctctgcaaaagggttacatcgtttacatttgtactgcctttaaggtcaatattgccaaaacaaagcatcggcacatacatacttattattccgctgtaattaggcaggtaggttgaaaatgcggttttcacaccgggttttgcttttatataaatttccacacagccgttctcgtcgggtgcaacaccgtttaccgcaccgccgctaaagaaagtgagattggatccattttccctaagagtgtaggttgctccgtttccgtctgtatcggtatatgaaccgtcactgttaaaatagcttgaaacatcgcttaattttacctttagttttgcatattcgccgcctgtattcgcaaaggaatagcctgcataagtatttccggtgctaccgccgtttgccgaaacaaagcgagtatagctttcgcttgacggcatggaaataacggtatttttacctatacaatccttgtattgtacagcatatggttttcctgtgtttttgccgtaaaaacacactccaccaagcgtatttttgctaagattataagtaaacacatttaaggtgttgttttcaagttttacccctgaatcaagcacctgaacgctcttattctcccgaacaactgccgcattggcagaaactattgagcatgttgccataacagctgcaagtgctgtacttaaaagttttttcattgatttcctcctcgctttaaaactaaattaaaattaatatccatagtattcggcaacggctgtctgcaaagcggtaacatcctgaacatttattttgccgtcacgattaatgtcggcatggtacatttgcagagaatcaaactctgcattgcccgaaaggtactgctggagcaatgacgcatcgtttacatttacgctgtaatctaaatttatattgccaaaagtaagcttatatatctctctgccgtttgttccgccgccaccgccgcttgtcagccccacatcaaggccgtattctgtaaagtaattcacactatggtttacctttgtactcacataaaattccacatatccgttgctgtcgggaactgcaccggtaaaaactccgccgctctggaaaaacaaaacagattcatagtagccgtcctttaccgtttgacgagtaaaattatatgtatgtccgtcttgggtgtgtgtgccgttacttttaaattcatttggatttatatccgacagcttggctcttaccttaacatattctccgcctgcctgtcttaaatccaaattagtagttccgcccatactgcttgaaagacaagtccaaatattatatttttcgttagacggcatagttattgttttgggtgccgataaataattcttaaatatatatttgtatctttttccgcttttttgaccgtcaagtacaaatccgccgtctgagcctgtattcttcatattgtatgtgtaaatacttatagtgttgtttttagttgttatttttgaactcaaaatttgataatccttattttgttttaccgctgcgttggcagataccgctccacctgccgccattaaagcaacaagtgcgatactgattaattttttcattatttatcccctcaatataaaatttttgtaaaataataaatattacatacagtcaagtaatattatacaatattttaaaagataaagctataacgcaaaaagccgaatttttaattcgcttatagaaaagttactgcactttgcacatacaactctgttttaacttgttatcacaaagaatttatgctattattctaataatgaaaggcggtaataatatgttgaatttctgctgtcctgtctgcaaagaagaattaaaacttgacggtcgaacctacagatgtataaataaccattgttttgactgtgcaaagcagggttatgtcaatcttttgcagagcaacaaatccaaaagcaagcgtcacggtgacgataaacttatgatagaggcaaggaccgagtttttaaatacagattcgtacaagccgctgtgtgaccttatgtgcgaacttttgcaaaaatatattccacaaaatgcctgtgtgcttgatgccggctgcggcgactgctattatacaggaaaaattgaaaaagctcttgcagacaaaaacgcaagtatagcgggtattgatatttcaaaatttgctcttattgcagcggcaaaacgcagtaaaaatattcgtttggctgtagcaagcgtatttgctttgccgacagcggatttttcctgcgatgcggtgcttaatgtattttcaccttttgcgccggaagagtacaaccgagttttaaaaagggacggagtgcttttgcgtgtaattccgcttgaaaatcaccttttttctctcaaaaaggcggtatatgacaatccgttaaaaaatccgaaagaaaacaccgatattgacgggtttattcttgccgaaagcaaagaacttaaatacagcataacgcttgatgataacagagaaattgaaagcctgttcaaaatgactccgtactactacaaaacatctcgtaccgaccaacaaaagctggagaaattaaactcacttacgaccgaaatcgaattttgcgtgcttgtctataaaaagctgtaa

SEQ ID NO: 488 - DNA, 40725 bp, unidentified
  source 1..40725: mol_type = unassigned DNA
  misc_difference 20300: note = a, c, g, or t
  misc_difference 20301: note = a, c, g, or t
  misc_difference 20302: note = a, c, g, or t
  misc_difference 20303: note = a, c, g, or t
  misc_difference 20304: note = a, c, g, or t
  misc_difference 20305: note = a, c, g, or t
  misc_difference 20306: note = a, c, g, or t
  misc_difference 20307: note = a, c, g, or t
  misc_difference 20308: note = a, c, g, or t
  misc_difference 20309: note = a, c, g, or t
  misc_difference 20310: note = a, c, g, or t
  misc_difference 20311: note = a, c, g, or t
  misc_difference 20312: note = a, c, g, or t
  misc_difference 20313: note = a, c, g, or t
  misc_difference 20314: note = a, c, g, or t
  misc_difference 20315: note = a, c, g, or t
  misc_difference 20316: note = a, c, g, or t
  misc_difference 20317: note = a, c, g, or t
  misc_difference 20318: note = a, c, g, or t
  misc_difference 20319: note = a, c, g, or t
  misc_difference 20320: note = a, c, g, or t
  misc_difference 20321: note = a, c, g, or t
  misc_difference 20322: note = a, c, g, or t
  misc_difference 20323: note = a, c, g, or t
  misc_difference 20324: note = a, c, g, or t
  misc_difference 20325: note = a, c, g, or t
  misc_difference 20326: note = a, c, g, or t
  misc_difference 20327: note = a, c, g, or t
  misc_difference 20328: note = a, c, g, or t
  misc_difference 20329: note = a, c, g, or t
  misc_difference 20330: note = a, c, g, or t
  misc_difference 20331: note = a, c, g, or t
  misc_difference 20332: note = a, c, g, or t
  misc_difference 20333: note = a, c, g, or t
  misc_difference 20334: note = a, c, g, or t
  misc_difference 20335: note = a, c, g, or t
  misc_difference 20336: note = a, c, g, or t
  misc_difference 20337: note = a, c, g, or t
  misc_difference 20338: note = a, c, g, or t
  misc_difference 20339: note = a, c, g, or t
  misc_difference 20340: note = a, c, g, or t
  misc_difference 20341: note = a, c, g, or t
  misc_difference 20342: note = a, c, g, or t
  misc_difference 20343: note = a, c, g, or t
  misc_difference 20344: note = a, c, g, or t
  misc_difference 20345: note = a, c, g, or t
  misc_difference 20346: note = a, c, g, or t
  misc_difference 20347: note = a, c, g, or t
  misc_difference 20348: note = a, c, g, or t
  misc_difference 20349: note = a, c, g, or t
  misc_difference 20350: note = a, c, g, or t
  misc_difference 20351: note = a, c, g, or t
  misc_difference 20352: note = a, c, g, or t
  misc_difference 20353: note = a, c, g, or t
  misc_difference 20354: note = a, c, g, or t
  misc_difference 20355: note = a, c, g, or t
  misc_difference 20356: note = a, c, g, or t
  misc_difference 20357: note = a, c, g, or t
  misc_difference 20358: note = a, c, g, or t
  misc_difference 20359: note = a, c, g, or t
  misc_difference 20360: note = a, c, g, or t
  misc_difference 20361: note = a, c, g, or t
  misc_difference 20362: note = a, c, g, or t
  misc_difference 20363: note = a, c, g, or t
  misc_difference 20364: note = a, c, g, or t
  misc_difference 20365: note = a, c, g, or t
  misc_difference 20366: note = a, c, g, or t
  misc_difference 20367: note = a, c, g, or t
  misc_difference 20368: note = a, c, g, or t
  misc_difference 20369: note = a, c, g, or t
  misc_difference 20370: note = a, c, g, or t
  misc_difference 20371: note = a, c, g, or t
  misc_difference 20372: note = a, c, g, or t
  misc_difference 20373: note = a, c, g, or t
  misc_difference 20374: note = a, c, g, or t
  misc_difference 20375: note = a, c, g, or t
  misc_difference 20376: note = a, c, g, or t
  misc_difference 20377: note = a, c, g, or t
  misc_difference 20378: note = a, c, g, or t
  misc_difference 20379: note = a, c, g, or t
  misc_difference 20380: note = a, c, g, or t
  misc_difference 20381: note = a, c, g, or t
  misc_difference 20382: note = a, c, g, or t
  misc_difference 20383: note = a, c, g, or t
  misc_difference 20384: note = a, c, g, or t
  misc_difference 20385: note = a, c, g, or t
  misc_difference 20386: note = a, c, g, or t
  misc_difference 20387: note = a, c, g, or t
  misc_difference 20388: note = a, c, g, or t
  misc_difference 20389: note = a, c, g, or t
  misc_difference 20390: note = a, c, g, or t
  misc_difference 20391: note = a, c, g, or t
  misc_difference 20392: note = a, c, g, or t
  misc_difference 20393: note = a, c, g, or t
  misc_difference 20394: note = a, c, g, or t
  misc_difference 20395: note = a, c, g, or t
  misc_difference 20396: note = a, c, g, or t
  misc_difference 20397: note = a, c, g, or t
  misc_difference 20398: note = a, c, g, or t
  misc_difference 20399: note = a, c, g, or t
aatatgcgacaagattctgtaatcacagtatgacatactgctataactacagtaattaaacaatattttgaaaatactgaacagttacgagaaatcacaacattcagtagaaaggagcgtaaatatgcatacagcacttacaattgcgggaagcgattcaagcggtggcgcaggcgtgcaggccgatttaaagaccatgcttgcaaacggtgtgtttggcgagagcgtaatcacggcactcacggcacaaaacaccatgggagttgacgcggtgatgaatgtaccggctgattttatcgaggcacagatgaaggctgtttttacggatatttatccggatgcggtgaaaatcggtatgacatcatcggtagatacgattgaggcgattgccgcaggtcttgtaaaatataaggcaaaaaacatagttctggacccggtgatggtcgctacaagcggaagcaggctgcttgaagaaaatgcagcaaacactctgatggagaagctttttccactggctgacatcattacgccaaatatccctgagcttgaggtgatatcgggcagacagattgaaagcacagatgacatcatagaggcatcaaaggctgtttatgataaatacggctgtccggttttaagcaagggaggtcatttcacagacacagcatgcgtgtgtgactatttgtgggatggaaagcgaatcatcacatttgagaccaaaagagtggataatccaaactcacacggcacaggctgcacgctttcatcagcgatagccagcggcctggcaaagggacagccgctcgagcaggctgtggataacggcaagcgatatgtcacggcatgtttaaaagccatgcttgacctgggacacggcagcggtcctatgaatcatggagcgttaatcttgaaataattactaattaataatacaaataacaataagaacaggagagtacaatgagtaattacacaacacagatggatgccgcaagaaagggcatcgtaacacctgaaattgaaaaggtagcaaagaaagagaagatggatgtagacaagctgatggagcttgttgcaagcggaaaggtagctattcctgctaacaagcatcacaagtcacttgatgcagagggcgttggaagcatgcttcgcacaaaaatcaatgtaaacctcggtgtgtcaagagactgcaaggactatgatgtggagatgcagaaggtcatgagtgctgtaaagcttggagcagaggctatcatggacctttcaagccatggcaatacacagccattcagacagaagcttacaagcgaatgtcctgcaatgataggaacagtgcctgtttatgacagtgttatccactatcagcgtgatcttgcaacacttacagcacaggattttgtcgatgtagtcagactccatgcagaggatggagtggactttgtcacacttcactgtggaatcacaagaaaaacgatagaccagattaaaaagcacaagcgaaagatgaatatcgtaagccgtggaggcagccttgtatttgcatggatgtgcatgacaggagaggaaaatcctttctacgagcactatgatgagatacttgaaatctgtgaggagcacgatgtgacaatctcgcttggagatgcctgcagaccgggctgcctggcagatgcaacagatgtatgtcagatagaggagcttgtaagacttggagagctcacaaagcgtgcatgggatcacaacgtacaggtcatggtagagggaccgggacatgtgccacttgatcaggtagcagcaaacatgaaggtacagcagtcaatctgtatgggagcaccattttatgtacttggacctctcgtaacagatatcgcacctggctatgaccacatcacagcagcaatcggtggagcagtggcagcaatgaacggcgcagctttcctttgctacgtgacacctgcggagcatcttgctcttccaaatgtggaggatacaaagcagggaattattgcgtcaaagattgcggctcatgcagctgatattgcaaagggaataccgggagccagagatatagatgataagatggcagatgccagacgtgtgctcgactgggatgcacagtttgcatgtgcacttgatccggaaacagctaaggcaatcagggatgaccgtctgcctgaggatgaccacagcgaggcatgcagtatgtgcggtaagttctgtgcagtgcgaagcatgaacaaggcacttgcaggagagtatattgatatactataactttttagtacagaaatatgcgatatactttaaggtgaggtaataatggaaagtaaaaagaacactaaaaaaagaactctttcaatcagaaagattgccatggcaggagtgcttgtggcagttgccgtagcaggaagcttaataagctttcctgttgccggcagcaaatgtgcacctgtacagcacatggtaaatatatgcgcagcagtatttttaggacctgcatggggtgtcggtgtggcattttgtgcgagtatcatcagaaacctgacaggacttggaagcctcatggcattccctggaagcatggtaggtgctctgtgctgtggactgatgtacagattcagcaaaaaaatcataccgacatgtattgcagaggcgcttggcacaggcatactcggaggtctggcagcgtatcctcttgcaaaatacgtgatgcttattcagccggaaggcatgtttatatacatagtgccattccttatctctacagtggccggaagcatagtggcagcaattgtcatgctgattttaaagaaaaatggcgcactgacagtatttaaggaaaatcttgagtaatatccagggctatggctttataagaagcttcataagctcatcctgacagatagacctagagtagtgatagccctgaaaccaggtgacgtcgaactgcctgagatagctctcaaggttatcattttctatgccttcaatacatatccttaagtctgcggcattggcaaaattaatcattccgattacaagtgcctgcttctttttctcctcgagaatgtctttaacaaagaacatatctatcttgacaccctctacaggaagctcaagcatcatctgagatgaagagcttcctgtgccatagtcatccatagtgatgtggattccggcttccctgaatgcagtgacagttttctttatcatagatataggcagatctctgcatcgctctgtaatctctatccacagctgtgaagctggaaaatcatactctttaagaattgccagagtatcttccacaaaacattccttttcaagctgctctgaggatgcatttacattgatgaaaaagcccggttttatctttgtaaattcactggctgcgcttattgcagttctcatgatataatttccgagctcatacatagcaggggtatcctcaagccagtcgataaacagtccaggtggcaccgtgccaaaaggctcctttttccagcgcaccagagcctcagcacccattatttcaccattgcaagcctttacaatgggctgaaactctacaaaaaagccatcacagccattgataaccgactgatgaatgattttcatgatatctatatgcgagctgccattgaacctgaccatatcattgaaaaataacaaatcagggctgtgaagctccttcgcgcggtctagagtgtattccaccttgctgatgacagttgaggtatcaccatcataatccttgagaatcagacacgcagcatatatatcaaactcaaatttaaagcatttaaagaaatacatggactttattgtatcggcaattttttgatagaaggcctcggccaaggcgcggtctgcttcctttaccacaaatacaaacttgcaattattcatatagtaggtagctgtgctgccatccatcatgtagatgaatttgagcgcaagctcacgctggattgcagtgttgaaattggaaccatacagtatattgaactcatctatatgacctatctccacctcgattatggctacagacctgttttccatgatatagccgttgatgtctctttcaaacttcgactgaccataaagatatgtatatgggtcgatatccggaagagtattttcgtttctgagcacgaggacatgatagcggtgtccgtcatcaccggtaaaaatatcagaataaaatcccatcatatattctttggtatgctttcccatgcggacataaaatatatcatccggtttttcaccatttaagcgatagcggatttcccgcttatattccggcaggtcaacgtcgttgacacaagagctcagctgttcaaagaagcaggtatgctcgccggcttcaaagccgaaaaaatcagctgtcttatccggtacgtatgataagtcattatccaggtcggtgatgataggatatatcccgtctgataattctgaaattttatcaataaattccttgtatatcgtgtgttctatcataaattaaaactccatatgtgtataatgcacaaaattcttttattattatagcatatgtatacattatatacaataagttagttgggctctgaaaatgaaatttaggtatgaagcattaatataaattaatgattttagtgtgtcatttatatatttgaaggtatactgatgactgaaatataccatcagctgcttcaaatgcaacgtcaccatcatatttgccggcaacagagcggatggatgacagacctataccatagtcgtccctcttagaagaacggtattttccgttttggatggtaacatgtccgtcaaagctgttgtccatagtaataataagtgtcttatagtgtacgtgggcatgcagtcggataaagtgcgatgatttctcgttcaaagaatcagaagtatccatgcgtctgcaggcttctatagcgttttctatcagatttccaaataccaggcacaggtcattgtccaaggccgcatcatcggtttccggaacaataagctttgtctcaagagcgatattttcatttctgcatatggcactatagtatgacagaatggaattgactaccctgttttcgcaatagcttgcaggcgcagatggtatgctgtggatcagggcatccaggtattcattcagctgtttattttcagtgtttgcgaggccttttattgcaaccagctggtgacgcagatcgtggcgctgcttcttaaaaagctgttcgtttgttgtgatgagcgaattatatttcttctgctccaacagggaatgctcaaggagattcatatcgaatatgagtctttcattctcacgttttatcatgagcatatcgcttatattaagccccattataattcccatgattataatgaaaagcagagttccaatctggtacagtaatgacaatgaggccacaaattttaaatgataattgattatctcagcacatgaagcaagtgccagtatgaataccggaaccatcagccgttttgccctgctgttttggctacgaacagcctcaaggatgatgtatgcagtcaggaagcaaagtatgagaggcagaatgacatggaacacgtacatgctctgggatagtgcaaccgtaccgctaagctgtaagacacaagcaacaaggtcaagcacggtgaggagcttcgcgataactataattggcttgtcattcttaaaaccaactgcaagcctgcagaaatacagcagcggaatcatctgcgagaaaagccctataaaagcacacagatatagcagtgtagggtttttgactatgacacctgtatagttgcactcgccgatagaccacatgccggccatgagtgagaagaatccaaaatgaaatatcatcttgcaaacctctttatcgtagtataaaagcatcagtgagataaatataaacaaaacacctgcggcaagctcaagcagtgctataaaaaatgaccatttattcagctttaacagagtgaaaaataaggatttgtatgctccgtagataggagaatataccgtaagcgagcttctggtaacaggagacagatactctatgcgaagctctgtatcacctgaatgaccgtcagtgcctatcaggtacccctcggttgcgggatccttcatataggatggatagttttcggccctgccaaactcatatatgaggtcatcgtccagatagaccttcgcaggggaatagacagtttttatgtagattggatcatccttgttcaggttgatatgtgttgtgacggtgacatgtgtgcgcggcgaaaggtgcttaaaggtatgtggaaatgtgatttcttctttatctgaatccgagccctccactacggcatatgcagaacttacgatagtggcttcaggatagctcgcctggctcataatcatgttttttgaggaaagaagcagtatgcaaatcagtgtaagcagtataattgtcagatagggaatatttcgtatagcgctaatttttttcataatccgggctccttgcagtgtattacttttgacagtctagctcatatcaaatcaataggaaagtgccttatttaagccctctggtgtgctcaaagtagtatctctccagagcttttttggctttgccggagagctctctcttgatagggatatttgtgtcatcggccatcacgaagcatttgagtgaagtatcaatgcgtgtgacatacgacaggtttaccgcgtagcttttgtgcggcagaaaaaacagctcagcgggcagctgatctgaaagctctgaaagcttctcatagcagctgatttcctcattttcttttaaatgtatgaaaatctgcctggctctctgctctatgtacatgatatcagaaagggcaagcctctccatactcttgtttctcttcacataaagagatggggcatcggatttcttcagcatggcaaggtgaagaatgttacttagctcagctgccgaaaccggcttttcgatatagccgatggcagacagcctgtagctttccaaggcatgctccgtgcttgttgtgatgaaagcaaccgggatatcggcatctgtctcacggattatggagacagcctctatgccggtcatggaatctttcatgtatatatccatgagcagcaggtcatactttccgtactcatatgaggcaagaaaagaatctgcatccgtaaagacagtgtatgtattttggatatcgctgtggttgagaatatcacaaagcagcacggtctctgcagcttcgtcctcgcatacagctatattaagtgtttgtggcatgttgattcctctttaaatactagggatgattaatcagattactgcatgcaagcatgcatagatgataccttttgaccctttaatcatcataatataatatgaaataaatatcaaataaatattgctattaaatatccgaaatgttaatatagttatcagcagtttattaattattttaaggaggtttcagttatgaaatactgtacaaattgtggcaggcaattagctgatgatgaggtatgcacatgtcgtcagcaggcacagacacaggcaccaaatcagacacaggacaacgcacaggcagacaatgcagcacagcaggcacagttcaatggacagccgcagggcaacgcacaggcacagttcaatggacagccacagggcaacgcacaggcacagttcaacggacagccacagggcaatgcacagtcgcaggcgtttgacaacttcacacagcaggtgagtgcggcaggacagcagctgcagaatgacaaaaatgtggcatctatcatcacactctacaaggggctcatcaagaagccggcacaggcagcagcagactttgtaaagaatgcaaatatggcatcaggctttatattcatcggcttatttgccatagtagaggtagtgctttctgtagtatatctgttatcaagcgtgattggcagcataggcggcttcggcttctcattctacccggcaagcttctttgagggaatcttctcaggaatagtaggagaggcagtgagggtgctcatccttgcagcagtcattctggttgtattaaacgcagtgcagaaggataaaaaggtgacatttgcacagacactctcagcagcatgtctgtacgacgcagtatacctcccgatcatccttgtggcagcaatcatcgatataatcccattccagttctttggcaatgtgagcagctggctgcatacatttgcaggtgtagtcggatatgtatgcatattctttggagtaagggcaatagaagaggatgacaacaagcttccactcgtgtgtggactggcattccttgcaacagccattggttcaacaattgtaaatgctattttctaatttaatatatctgaaaagccggatcctgtgagattttcttgcaggatctttttttatttctggctttgaatagctatcatatatcttacgatttgtcaagtacgagttttgacactttttgtgtaaattgtcgttgttattgccatgcgcggaattgatgtataatgataattagattaatttgtttagttaaaaactagctgaatatatgagtcaatgataatatgaattctataataagcaggtttataaaactcgggaagagaggcacctatgacgcataaaatcaaggtacagatgtttggcaatttcagaatggactataacggagcaccatttgtggcggaaaaaatgcataaggaaagccagttcaaccgcatgatgcaggctttgatacactattctgactgcggagtagcaaaggataagctcgaggaaatagtaattggtgagcgtgacatagatgcacctcacacggcactaagagttattgtatacaagacaaagcaaaagctcgcacagctcggactgccgggaaagaacctcatatatttggagggaggcatatattactggacaccggatatagagatagaagaggatgcagcagagtttgagaagctctataacgaggcctgtgcactggaaaagcagatgccacaggaaccggagagtgcagagacagtgtgtgatgagcggataaaggaaatagaagacaatatgcttgagctgtacgtaaaagcactatatctgtataagggagagtttttggcggcatatacaggcgagacgtggatagcacaggaggccagacgctatcacattatgtttgagaaaatcataaatgaagccgcgtacatactgcgaaagagaaaacaattcaaggggctggagaagctcggagtatatgcggcaaaggtcgatccattcaatgagtgggaggagctcatcatggaggcgatggtagagaccaggcgctatgatgaggcggaagagctatacacggatgttgtggactattatctcagggagtgcggtatttatccatcttcaagactcttggaaatccttgagaaatacagtaatcagatgaatcatgcacatgagatactggaaaacatccaggagggcatgaacgagcaggaggaaacagaaagaggtggatatttctgcagctatccggtattcagaggaatataccaggcgtccatccgtattatgaagcgcacaagggtacctgtatatctcatgctctgtactctggaggacgaggaaggcagacaggtgcagagcgagacaaagatgaacaagtattcaaggcaacttaagaagtgcgttggtgaatcaatccgctacagtgacatatatacctcgtatggaaaggtgcagtttcttattatgctcatcggaatcaagcgtgaggactgcgagatagtcaaaaagagaatcaaccgccagttcgcaaagaaaaatccgagagtcgcagagaaatatcatgtgaacagtatagtttgtgagttgtaaagggaatagtacaaattggttggaaaagatgcaaggtgctgttacacaattaaggttagagttaatttgattattttatatattatggagaaaatgttatgaatggtaaagacaagatatcagtaattattccatgctacaatgtccaaaaatatattatgagatgctttgattcaatttacagccagacatatggctttgaaaatctcgaagtgatactcatagatgatttatcgacagacaatacatggtctatattagaatccttacaaagaaaatacccggagaatgttatatctcttaaaatacagaaaaaaggaaaatgtggcggtgcacgtaatctgggaatggatatctgcaccggcaaatatatcacatttgtggatgcagacgattatgtgcatccggatatgctcagggtgctgtatgatagaatgacagaggacgattatgatgtggcacagtgtggtgtatcgtgttttaaagcagataagccaaatgtattagaagtaaatgatttagaaattcaaaggcttgatttggataatgttgataataggaaaaatctcattataggtctgaccggatttactaatgtaacagcatgggcaaagctatactcgaccaaatttataatagaacataatctaagatttatagaagatgtatattatgaggatacacatttttctatgctttgtgtgttacttgcaaagaaatattgtaaggtgcaatcgacattatactattactttgagaatacagagggcattatacgttctgaaattagcaatgcaaagatccgggatgctaagattattatggatcatataaggcaggctattcaaagtagaaaagcagaactgggaaatgtaattgagcagtgttattgtgaaatccagacatttttgttatggcaccaatatattgagccatatagtagaatagaaacctttatgaatagggaactggatatttgcaaagaagagtttttaaagagtgaaccggatatatttaataatccatatgtgaagtttttttcagatgatgtggtattgaaaagaatgtcaaggctgagagtaactgcgaaaaaaatgaataatgtatgctttttagataatgcaatacatatctgtcttggtatacatgataaggatggaaattacagtgtctgggctggaacaacgatgcaatccattgttgaaaacacaaaagcgccaatagtttttcatatattacatgatgacacattgaacgaaataaataaaaataagctgagtcttattgccgataatagtggaaatgatatagaatttcatcattttaattcggacgtttttggcacgtttgctgattcaatgaatagatttgcaattggaacaatgttcagaattatgttgcccgatattatgccggatttaaaaaaaataatatatttggactctgatttatttgtaaatacagatattgaagaattatggaacctaaatatagataattactgtctggcggctgctcaggattgttcgacaataagaaattggggaactccatacgctgtagcagcagggcagacaagtcgtgacagatattttaatgcgggtgttctttgcatgaatcttgacaatatcaggaaaaatggaagcctgtttcaacaggttatagattatctgaatgataatccacggacatggcttcctgaccaggatgctttaaatgccatattcagcggaaaaaccttattgatagatgaaaaatggaattattttattgatgaggcaagaaaaaataatgagaaagcagagaaaaaaatatatcattatgctgcaaccctgttgatgctgcatacaaataatgaaattgacagagcctactatttcacaatactgagaaccccatggggagagcaaatggaggatggcttattgtgtaattctatgggcagaattgtggatagaacaggtatgttggagaagctgctaaaaaaagttactcaaaacaatatacgactcgtattctatggcggagagaacagctcaataaggaatgcaatgaggctattaaacagaaatttcgatagctgtgaatggcatgagcatttaaaggagaatgagattatctgtgatgataatactgtctatatagtctcagcagaagcggacgatggcaatggactggaaatactggcaaatgccggattagaaaatggcgagaattattttataacacagaggtttttacattatacagagggtgggtttgccctatgatttttattactgatgaattaggtaagtttgagaaaaatataatagagctggcagaaaatgtgggatttaaagaatgcaaaacaatagaagccatagatttgttttgtggcatatctgaaaaaaacgatgtgcttaaggaaaaagacaggtattatgcattcatagatatccctcaatattggagtgttcgtgcagatggtctaaatggtgctatatatgataataaaaccaaaaaggcaaacatctattttaagaatccgatagagaaaagaatggtcagcagagtcgagtggattgacaggaataatacagtatataaagtagattattacaacaaatacggatataagtattgttcagagaatgtgagagatggcaatgttataagcagggaattctatgatagaaatggtgatattaaggtaatagaacagacaggcccaaagacatataccacgtttggcacccgcattagtccgagaagctatagaggctttgctgattatctggaagcttatcttaaatctaatgaaatatatgatgaaaatatatggttgacaagtgatgagatattaaataaatttgcctgggattatggtaattttaaaatatcttacctgccacaaaatagattaaactcagatttgacagtaataactcagactaacacagcgtttcgaatactgtgcagtgaagagcagcaggtcaattggtataaagaaaattcaaattataaatgcgacagattatattcatatcttgagaataataaatcaaaatttgggagaaaagaagcatttattattacagaaacggatcagctcgagtatattgaacagcttataaatgactttcaggaaataacatttcacatagctgccagcactattatgtcagataaattaacgagactggatataaataataatgttgagttatatccatgtattacggaacaaaagagaaaagaactgtttgaaagatgcgatatttatttggatatcaatcattacagagagctatacaatgcagtaaaccaggcactgataaataatatgataatactagcgtttgacaatacagtacattcaaaagaattatatccaatggaaaatatttttgatagcagcaactatgtgaatatgaaagaaactctaaaaaatataataactagtcagacgatattcaatgaatatatagacaggcaaaagaagcaattaaaacaattagctgcaaaagtagttatgggtgatacagatgagagtatttgattttacattacttagtggatatgaattttccggagtcgatgttgctcagggatttagagcaagattgtttgcaaaaaacaatgtaaacgctaaatttatttttacagagctgccgacaattagggatatggaactgtatggttcgcaaaaaataaaacgtggtcagattatgtctgcacatctttttatgaccggaagattagatatgagtttgtctgtgaaaaaagaagctcttttagaaaatgaaaaagaaaattatgagtatgacaatatagatgaggatggaaaggtgatttgtctatataattccggtgaaaaatcggttgaaatattatgtgatgaagatggatttgttgtaaatgaaagtctatttaaaaacggaaaaaaatatttagtaaattattatacagacagcttgtcatatacagaactgtataattgggataatgattcgagcgatggcttaaatccggaaaggagaattttttggaacaaacaaggacagatggtttatgaacaatgtatctataaagataatgttgaatatctgtttaaaaatggtgaagttatagacaatgtagagtttctagaaagatttgtaaaggcacttaatctttgtgagaatgatatatgtataatggatagagcgggatatcttgattatatacagcctctttttgaaaataaaggcaaatcaaagctgatagctgtattacattcagatcatttttacaaaatatatgaggatgaaagctcattatacatgaactatgagtattattattggttcaaatattcagaggcaatagattattttgttgttggtacggatgaacataaaagaagtctggaagcatttttaaaagagtatgattgttttgttccgcatattgcagctattccgcccggggctataccagaaggcaagcttaaaagtaaaaataatcgtaggcgaggcagcataatatctgcttcaagacttagtccgagaaaaggtattgatattcttattaagagtgtgataaaagcgcatgaactaaatcaaataatcaatctggatatatacggaagtggcgatgatgggtatactatatatttaaaaaatatagttaaagatgcatgtgctgatgattatattcactttaaagggcgctgtaatcttgaaaaaatatatccgcactatcaattgtttgcctcattttctttgtgggaaacatttggactttcactcatggaggctgttggagacggactagccatggttggactggatgtaagatatgggaacaggctttttatacatccggatgaaaatggctatctggtggattttgatattgaaacagactatcaaaataaagataagctctgtgaaagaactgcagcagcaatagttaaaatatttgaggatgatgacagattgaagaaattccatgaaaattcttatatgattgctgaagaatataaggagcatgtaatagaatcaaaatggatgcagcttataaaaaatatactagacctcaatccgtcaaacttaattttatagagaaatgcagtaacatgaaggtaaaacatcataaggattattggcttgagtatgagagaaaaatgttggaaaacatcaatgaaacaacaggcttgtagacaggagtatcaatgaaaacacacattactacactaaacaacatggcaggaactgccagtctggcacatagaagagtattaaaggtggctcagagtattggctgtcatgaaatgggcttgtctttttatcctttaaagccagactatgcaaaggagatagacaaacgtcttgatgggataatagcgcctcttaactatggggatattgtgatttttcagtatccaagctggattggggtgaattatgatgagagctttgtaaacaagataaagtcttaccaggatacaaagctgataatttttgttcaggatatacaaaagctcatgtttgattctgagcaggcaattcttgatatggaaattaaaactctcaataaggcggatttacttattttgccatcaaagaagatgcatcgctatctgaaggaaaatgggcttgatgagaagcctgttatctatcagactatctgggatatgccatcagacatttgttttgtggatcatgctgtaacgagatgctttcactttgccgggaactataatcgttttccgtttctggcagagtaccatggcaagacaccgatttatcaatatgatgcaaataagccggacagagaaaatgatgacagcttttgctggagagggtattttgagcaggaaaagctaatgcatgagctttccaaaggtggctttgggcttgtttggagtgatgacgaatattttgacagatattattcgatgaatcagccgtacaagctcggtacaaatctggcagcagggataccagttatagtaaaaagaggctgtgttcatgagaaatttgtcgaaagaaacggtctgggatatgcagtcgatacgttggatgaagctgataaactggttcagagtattacggatgcagagtatataaagctttaccataatgtgaagaatattcaaaagctgatattagatggcgcatatacaagaaaaacacttcaggatgcaataattgaggttttggaaaatgcctgtacaccggttgaaaacagatatcaagatcatatatagatttagcagacaaatcaacagtgacaggatatagtatttgaccatgatcaggtgtatgaatcacagatagttgctacagtggaataatggggaagagattatgagcgtacatattacaaaaacttataacataggtggattgattggtctccgtcaaaatgcggtgaaaaacgcaggtgaaacacttgcctttaaagaaatgagcctatttaaatttcctgatgcatatgatagtgatgatgagctgcatgttaggatggatggcataatcgcatcactttgtccggaggatatagtgatttttcagcatccaagcggtgagagtcccagatacgatggatttttatttgatcatttaagaagatatcatggaacaaaaattgttgcgtttatacaggaaatagcatccgatagagatgacagtgagtattctttgagtgatgaaattacgttgcttaaccgggccgatatgtttatttttgcctcagctgcgctgcgggatcactatatcgcaaatggattaaaagaaaaaccttatctgattcaagctgtaccggattatatgacagacatttgcgcaaatgagcataaaaataaaaaactatatatcatggcggaaacgagtcaaaatgactatctattgaacaatttgaatatagaggtggtgcgatatgatgagtaccacgtcactgaatctatactcaggttgtcagacggaggctttggattaatatgggatactgatgagcaggcacttggactttatatggctgccggaatcccagtgatagttaaaaaggggttgagctgtgaaaagtatgtgatagataatgaaataggagcagcagcgacagattttgaagatgtataccggatagctgtatcagaatcggaagataaattgagtcaatactacgcaaatgtcaaaaaactgcaaaatttgttcataaatggaatatataccagaaaattattgctggataccttgattatgtgtggagaaaggctataatttggcggtatataaatgtttttatacgattttagatacacctaggagtttatatttatagtgtaaaagaggaaaactatagttatgtccggatgaaagaggattaggaaacagataatccaagtatccggattcatgtgaataaggagagactatatgaataagaagaaggttgacagtattttaaaaggtataaccgcagcaggaattgccatgggtggagtcagctctatccagggggctgatatggttatggctgcaattaatgaatcggcagcagattccaattcattagttgacgcaggctctttgtctgagagcgaacgtacagagtatagcgagagtacaacacagagcatgagtgaaagcgcttcagagagcactagcgagagtgagagcgtgagtgtaagtgaaagtgaaagtgaaagtaccagtgaaagctcaagcatcagcgaaagtgctaagcagagtgatgcagaacaacagagtggtgataatgttgtagcggctacatacacagatgatgcagaacaggatacggctgtttatgctcgaatgagtggaatgccgcagcttgcaagtaatgatacatatagagatggttgtgtatcaaataaggtacatcatgtgactaagattacggaaagtaattattcgcagtataagggggatacattgtttggaacaaagtacaatttaatccaaacaaaggaaaatcattcatttggaaaatgggaaaagtcgagttgtaaatatagaattcaaaattctaatacgaatgaatgggaatattttaatgactttaattctgtgacatttaattggacagaaggaccttggtgggatgaaactagatataataaaacaggtgaattgtatatatgtgacggaaatgcgtttgtattaaaagtgtctgataatgaatgggtagaatttagaagtagtagtacaggtggagtacatacgtataaatacgcatataagcatggggattccattgatttattggatagtgcagatccaaactatgagaagagtgaatcagtaagaatatcagagagtttgagtgttgaagcaagcactagcgcgtcaacaagtgcaagtacatcggcaagtacaagtgcatcaaccagcgcaagtatctcagcaagtacgagtgcatcgacaagtgcaagcacctcagccagcaccagtgcatcgacaagtgcaagcacctcagcaagcacaagtgcatcaacaagtgcaagcacctcagcaagtacgagtgcatcaacaagcgcaagcacctcagccagcaccagtgcaagtacctcagcaagtacaagtgcatcaacaagtgcaagtatctcagcaagtacgagtgcatcaaccagtgcaagcacctcggcaagtacaagtgcatcgaccagtgcaagcacctcagcaagtacaagtgcatcaaccagcgcaagtacaagtgcaagcacatcagcaagtacaagtgcatcgaccagtgcaagcacctcagcaagtacaagcgcaagtacaagcgcaagtacatcagtaagtacgagtgcatcaaccagcgcaagtacatcagccagcacaagtgcatcgacaagtgcaagcacctcagcaagtacgagtgcatcaacaagcgcaagcacctcagccagcaccagtgcctcaacaagtgcaagtacatcggcaagcactagtgcctcaaccagtgcaagtacctcagcaagtactagcgcatcgacaagtgcaagcacctcagctagtaccagtgcttcgaccagcgcaagtacctcagccagcaccagtgcctcaataagtgcatcaacaagtgcaagcacctcagccagcacgagtgcatcaaccagtgcaagtatatcggcaagtacaagtgcctcaaccagtgcaagtacatcggctagtaccagcgcatcgacaagtgcaagtacctcagccagcacgagtgcatcaataagcgcaagcacatcagcaagtactagtgcatcaacaagtgcaagtacatcagcaagtacgagtgcatcgacaagcgcaagcacaagtgcaagtacgagcgcatcgacaagtgcaagcacctcagcaagcacaagcgcatcaaccagcgcaagcacaagtgcaagtacgagtgcctcaaccagcgcaagtacatcagcaagtacgagtgcctcaacaagtgcaagcacatcggcaagtacaagtgcctcaacaagcgcaagtacatcggcaagcactagtgcatcgacaagcgcaagtacctcagccagcacaagtgcctcaacaagtgcaagtacatcagctagcacaagtgcctcaaccagcgcaagtacatcagcaagtacaagtgcttcaacaagtgcaagtacatcggcaagtacaagcgcatcaacaagtgcaagtacaagtgcctcaacaagcgcaagtacatcggcaagtacaagtgcatcgacaagtgcaagtacatcggcaagcacaagtacatcgacaagtgcaagtacctcagccagcacaagcgcatcaactagtgcaagtacctctgcaagcaccagtgcatcaaccagcgcaagtacatcagctagtacgagtgcctcaataagtgcaagtacctcagccagcacaagtgcctcaacaagcgcaagcacatcggcaagtacaagtgcctcaacaagtgcaagtacctctgcaagcacaagcgcatcaactagtgcaagtacctctgcaagcaccagtgcatcaaccagcgcaagtacatcagctagtacgagtgcctcaataagtgcaagtacctcagcaagcaccagtgcatcaaccagcgcaagtacatcggcaagtacaagtgcctcaacaagtgcaagtacctcagcgagcacaagtgcctcaataagtgcaagtacatcggcaagcacaagtgcatcgacaagtgcaagtacctcagcaagcacaagcgcatcaactagtgcaagtacctcagcaagcacaagcgcatcaactagtgcaagtacatcagccagcacaagtgcatcgacaagtgcaagtacctcagctagtacgagtgcctcaataagtgcaagtacatcagcaaacacaagcgcatcaactagtgcaagtacatcagccagcacaagtgcatcgacaagtnnnnnnnnnnnnnnnnnnnnnnnnnnnnnnnnnnnnnnnnnnnnnnnnnnnnnnnnnnnnnnnnnnnnnnnnnnnnnnnnnnnnnnnnnnnnnnnnnnnncacaagcgcatcaactagtgcaagtacatcagccagcacaagtgcatcgacaagtgcaagtacctcagctagtacgagtgcctcaacaagcgcaagcacatcggcaagtacaagtgcctcaacaagtgcaagtacctcagccagcacaagcgcatcgacaagtgcaagtacctcagcaagtacaagtgcatcgacaagtgcaagtacctcagcaagtacaagtgcatcgacaagtgcaagcacctcagcaagcaccagtgcctcaacaagtgcaagtacctcagcaagtacaagtgcctcaacaagtgcaagtacatcggcaagtaccagtgcctcaacaagtgcaagcacctcagcaagtacaagtgcttcaactagcgcaagcacatcggcaagtacgagcgcctcaacaagtgcaagcaccagtgcctcaaccagtgcaagtacctcagcaagcacgagtgcatcaacgagtgcaagtacatcggcaagcacaagcgcatcgacaagtgcaagtacatcagcaagcaccagtgcctcaacaagtgcaagtacctcagcaagtacaagtgcctcaacaagtgcaagtacatcggcaagtaccagtgcctcaacaagtgcaagcacctcagcaagtacgagcgcctcaaccagcgcaagtacctcagcaagcaccagcgcctcaacaagtgcaagcacctcagcaagtacaagtgcatcgacaagtgcaagcacatcagcaagcaccagtgcctcaaccagtgcaagtacatcagcaagtatgagtgcttcaacaagcgcaagtacatcggcaagtacgagtgcatcgacaagtgcaagtacatcggcaagtacaagtgcctcaacaagtgcaagcacctcagcaagtacaagtgcttcaacaagcgcaagtacatcggcaagtacaagtgcctcaacaagtgcaagtgagtcatcaagtgtaagcgagtcactcagcacaagcgagagcatcagcacaagcacaagtacgagtcagagtcagtcagctgcaaatgtggtaccgacaccggctccaactcctgcaccggcagtagataatgctcctgcacctgcaacaactatcacaccggctgctacacctcttgcagcaggcggaacagccaaggacggtatcaaaacatggtggtggtggattgcagcagcagttgcagctatcacaggaaagggtgtttatgacaaccacagaagaaaacctgcaaagagcgacgattcagaagataattctgatgagaaataaataattaatagcaatactaacaatattgttttataatattagtgaccatctgtagcggatggtcactaattcgttaagctgttttgtagtaagacgagattactttgtgaggaaaggtgaattccttgaagcagaaagatagtataaagaagaaaaaacaaaaacaacagaaggaacatgtattattatataagctcttatattcgttcatgaccatgcttgtgtacatggtcggcagaaatataccactctacgggattgatatagatgcatatagcaatgtaaacgtagatgcgcagtccatacttttacaggctatttcaggtgatatgaagaactgttccattttcatcataggcttgtggccgtacatgctggcatccatgcttgccatactgatagttgcaatcatgtcgcttgacaatacaagaaagctgtcaccgaagaagataaacatatggacagttaccatcatgatgattatcgcagcagttcaggcatatcacaaaacacagacacttatgtatagagttagtggagatgaacttatatggaataagataatagttttcatacagcttatcgcgggcatgctgatagtggtgtatatgtgcgacagagctaccaagtatggtatcggtggcaaggtgagtgtgttcatggtcaatatagttagtggtatgatgaccatgtttacaggcaagccacttgagaagctggcactgcctgtagccataggagtggcagagattgctgtcatgatagtacttgagaccactgagaagcgaatagcagtacagagagtttccataaacaatatttatgcggataagaactatatcgcttacaagctcaatcctgtcggtgctacaccgcttatgtttgcgtcagccgcttttttgcttccacagtttatgtgcaatggacttcattatctgtttccggacaatgctgatattcagtggtggatggacaatatgaggctcacatcaccgcttggaattgtagtatacatggtgattatatgtctgcttacaattatcttttctatggttatgctgtctccgggcaggacagcagatgatctgcttaagtcgggtgattctatacaggatatatatgcaggaaagtctacgaagagatatctgattggcacagtgctcagcttttccgttataagctcaatcattatctgtatatgtcagggtggaccgctgtttttacagtttggaggatatgtggacgcatcacttgctatgctgccgtgctctatcatgatgacgacaggtctttggatttcgctgtaccgcgaggcagaggtgtaccggaatatggacagatatcatacattcatatagctcccggcgctttgaattaagaattaggaggaatcataatgctatattttataccggcatggtataaacagaatatgtggtgcgaaaacgagcagcagtggtatatgcgcaggctcaagtcagagtttgacgagactataaagcagattactctttttcatagaaatgtggacaggccttacaggattcttgtgctcggatactcgccaaatttcagacatttcctacacaggcagggcatgtaccgctcaaagtactggtcatgctttgatgcgatagcacaggtcaggagaaagaaggtcgctgtgctgtcatatcacgatatcaagtggccgaaggggctggagtttgtgtattcgcctttttctataatcgctttgcagggcgatgtgaagtatgcacaggtagagtttggtgaggatggcaatccgatatccatagatatgtttgaggatggcaaaatctgcaggcgcaactattatgatgacagaggctttgtttccagtactgttatatatgaaaacggcatagagcagtatcaggattttttgatggaaaacggcatctggaagatacgtgagtataagaataatggtcacgtgattatcaatcagacatgccctaattatgatgtggtgcctgatgccaagagcggcaaagcaggtgagccggttgagatgcgctttacaaaggctgaatatgacagcctcgaggcggttatcgaagaggtatttgcaagctatgtgaatctcacaaggcaaaatgacaactttttcgtggcgatgcatccgcttcatatcagggttgcagagcatgtgcttaagggaaaaaggattattgctacattttttgaaaacagatttgatttcacgcagacatcactggcagcggattttttagagcatgcggaaaatatcattacggattctgattatacgacgaagcttattatggaaaatctgggtgcagtaaataacaagccggtcagattacatatcacagatattccgccatatgataccaggatggacttcggtatcagctcgcagcttcgtgtgcagaacatactcgtgccggttgatggactgactgaggatgcatttgctcggattataaaggggcttgcggattatctgaccattaatgaccttgcgagagttcatttctttacaagagatgcctcatggggtcatgaggatgctataaagaatgatacggtaaagcttcttgatagtatgggctatgattcccgtttggtaacaggcgatggtgaggcagctctcggctttggaggcagcggggctgatgtatttgccgagaatgagctgggggatatagaaaaaacggtggagcagagatttttcgtggatgtatgtgtggatgagcgtgatatcagcaagtgtatcaacgagcagagagtcatcctcgatatgagaggcacgatggatgtttttgtttatgttacagctatcagcaagggcgtgccgagaatcagcctgagtgcagaccagtttcttgtttcaggaaaaaacggaatggtcatagatgatttttctgatatcggaaggagtctgacctattatctggacagctttgaaaactggaatcaggcattggtggagtgctatgagctgggtcagaaatataccacatccgtattgcttaagaagtggagaaaggtgctaaatttcagtgagtaagattcatgttttatatgttggcgatgacgattggacaactaaatacagcattccggacaatatagagtttgaagtatacgagtctgatgagagtgaactaacggcaaacagacctgcgagaaagctcatggatttagttattcttgacagggatataacactctcagaggaaaaggcttttacgaagtttacaaggggctactgtctttttgctacggaaaatgtgcagatgctaaacagcgcgacgagcagatatttcaaggcacgaatgggacagtatctgtataccggcgatgtgcagtattttctggctcatgaggtgagaaattactattcaaatccttatggtgagaagtttaatcctgccaagcttgctgtcagtgattcctttacaggaagggtagcatgtgatggaaactataacttggttctagatggagagtttggggaggatttttcgcagattgcatactggagatataatatcccggtttttgagggacagtgtattgatatgtatcttgaatatgagaaaactggggatgtagagattaagcttagattatttcagttctactatggctcgattggtgatattaagcaggtctgggagtttgacgaggaacagcttcaggatgttttcagaatagataatgaatcagatcagggtcctgtttttgtttctatccttgcaaggggcaccggcagcctgaatatcatatcattgcacgacagacattcccgccgtggacacggatttttcctgcccggaggtgagaggcttgtctcttctaaaggagaggaagtgtttgtatactttgagaagggcgatatgaagccaccgcttgctgtctatttctcaggctacaggactcaggagggctttgagggctactatatgatgcgaggcttcggatgtccgtttattcttgtgacagacccaagaagtgagggtggagccttttatctgggagacagtgaatttgagcagatgattacggattatgtgactgataagctcgatgagcttggccttacaaaggatgagctcgtgctctcaggagcttcgatgggaaccttcggttcactatactatggctcaaagctttcaccacatgcactgcttcttgcaaagccacttgccaacatgggaaatgtagcacgaaacgagcgaatccttagagccggaggcttcgctacctcgcttgatatactgatgaaaaactatgacaatctctctgatgaggcgatagagcagctaaacaacaggatgtgggacagattcgacagtgccgactggtcgcacacaaagttcatcatctcatatctgtatgaggatgattacgacccggatggttatccgagcattttgtcgcatctgaagtcgagcggtgttgaggtgtatggcaagggctcacacggcagacatactgacaattcagcaaatgtcatggcatggttcaagagccagtacaataatctgctgcatgatgatttttcaagataagcaaataaacgttgcaggtcacacagtcaggtgtgaacagtaacaggaaaacaaatattaagtgaacaatagtaagacaggtaagtattatgtatggtgacacatggcaggtccgctggaaggaatttctatcggactcgtatgtatatggatcaaaaattgaatttaatgaggatggttcagtttcttataagaaccgcctcatgccgccgggcacggtgattcacacatggtattctatgacgaatttccaggggaataggatagagccgtcgcttccgctcatcgatggagagcgggcatattccattgcggtgaatattgactatcacaacagtgagagtgaggcgctgatgcttcgtatcatattttttgacaggtatgatgcacaggcgcagagtattattgtccgcgataaaaaggcgtttttcaagccgtccatcaggacctacagctacaggatagagctgataaatggtggaaatgctgattttacattcaaatcactggtgattaaagaggtttcagaggaagagtttgatgcagagcaggaaagaattgagagacttaaagaggactctaacaaaagtaagaaaaagcgaagaaaaaataaaaaatctaagtgatgaagagctttctgcactgacagagcagtttaagagcaggtatagcgatggggaatcgcttgaatcgcttatgccggaggcttttgcagctatctgcgaggctgattacagggtgcttggaaagagaccgtatgatgtgcaaatcttagcggcagcagctcttcacggtggatatctcgctgagatgaatacaggtgagggaaagactctatctgctacgatgccgctttatctgaatgcgctgacaggcaagagctgcatgctcgtgaccacaaacgagtatctggcatcgcgagatggggcagagatgggagaggtctacaattttatgggtctcacctgctcatatccggatgcggatgatacaaaaaagcaggatgatgatgagaaaagacagttctattcggctgatatcatatataccacaaatggcacacttggctttgatttcctttttgacaatctggtaaagaaaaaggatgacagatttctctgtgatttccactatgtcataattgacgaggctgattcggtgctgttagactctgcaattatgccgctcgtcatatcgggagtgccgagagtgcagtcgaacctgtacgatgtatgtgattttttcgtcacgacacttgtggaggatatagactacatagaggaggataaggccgtctggctcactccaaagggtgtgaagtttgccgagagcttctttggcatatcaaatttttacggtaaagaaaattttgagataaacaggcatgtcacgctttctcttcgggcgcacaagcttttgaagaacaaaaaggattatgttgtcactgacaagaaggaggtagagctgtttgatggagcgacaggccgtctcatgcacggtgtcaagctgcgcggcggtcagcatcaggctatagaagcgaaggaaaaggtggagatatcgcaggaatacaggactgtggcatccgttaccttccagaatctgtttatgatgtttgacaagatggcaggcatgagcggcacactcatggatgcaaaggatgagctttttgagacctacggcaagcatgtggtgaaaatacctacaaacaggcctcttaaaagagtcgacaggaaggacagatactttaaaaacggtcatgatcagttctggacagcagtggatgatgtgataaggcttcacgagacaggccagccggtgcttgtggtgcttaattccgttacggatacagatcttttttcaaggcttttaatagagaaaaatatcccgcacaatgtactaaacgcaagcaatgctttctgggaagcacagattatcgcaggcgcaggccaaatgaatgcggtcacggttgctacaacgatggcaggaagaggaacagatataaagctcggagacggagtgaaggagcttggcggcttagccgtcataggtataggaaggatgaacaattcaagatccgagaggcaggcgaggggccgcgccggcagacagggtgatccgggcttcagccagtactatgtgagcctggaggatgacatagtgggagctgaggatgatgacaagctgcagcgctatattgatggcaaaaagcgtattggaaagcgcaaaataaagcgtattgtcaaccagtgtcagaagcttagtgtggagtctgaggagatgaaccgcaagaaatcactgcagtatgaccaggtcctccagcgccagcgagacctaatctacgcaaccagaaaaaaactgctcgacggcgccagcgtcgagcaggagaagatagtagagattgcgaaggagaatatctcagacttcgttaatcattttgactgcatacagagtaataagaagcatggcaggcgccgtggcagaaagaaagatagcgataaaaataccaatacacagcaatacacatccatgcttaacagatacattcttgacaacatctcctacaagctggacgccggtctgactttgtctgacatgcaaagcgccgccactgttagcgattacctgatgcttcgtgtgtatcaggggctttcaatacagcgtgagcgcataggtgatgaggaggcttacgagcagtttgtccgcgaggcaactctaaaggcggtggatgatggctgggttgagctgattgactaccttgagcagctcaagtatgcggtagcgggaagagcatccgcacagagaaatgttatgtttgaataccaaaatgaggctttcgagtcgtttttggatacagaaaaagcggtaaaatgtaatatcataaggaatattttgcttagtgatgtgaaaatcggcaaggatggcaggctgcaggtcatctacccttaaaggttattataatataaatagtttgacagatacgaggagaatcatatggtatataacttcaatctcggaataggctgggcttcaagcggcgtggagtacgcacagagctacagggctaatctgctccgcagggcgcacattccggcaaggtttgttttcacagatatgtttccaactgaaaatatagagcacatgacaagaaatatcggctttttggatgaggaagtgatatggctgtacacattttttacagatgtgaggacatcgcatgtcacattcactctaaaggagcttgaggctacgatggcagaggaggattataccttttccagagagggcaagacgtgcaggtatcagtttaaggagagcggcaggttctacacctgctacatggttgatgatacaagtgatctcgtgcacagagtcgagattgtttcaaacggatgcctgatcaggaaggatttttacacctattgcaggaccttcagcgagtactatgctccgctcgacggcaaggctcatctgtacggcaggacatttttcaatgaggatggctcggtgtgctacgaggaggtcatagaggatgacagcaccttttacaggattggagcgcaggtgctttataccaaggctgacctggtcggctatatggtaaagaggcttaacttaacggctgatgatgtggtgatcatcgacaggacgacaggcataggccaggcaatcctcgaaaactgtggaccggcgcgcgtaggaatagtggtgcatgcggaccatttcagcgagggcggcacggatgatgattacatactgtggaacaactattatgagtattcgttttcacagactgagcacatagatttttacatcacagcgacagatgcgcagaatgagcttatgaggcagcagttcaagaagtattgtggaaaagagcctcaagtggtgactattccggtgggcagtctggatgagcttaagtatccggatgagccgagaaagaggcactcgctcatcactgcgtcgcgtcttgcgactgagaagcactgtgactggctggtggaggccgttgtaaaggcaaaagaaagcgtgcctgacatttcacttgacatatatggaaagggtggcgatgaggcgaagcttaaggggcttatcggaaggctggactgtgccgattatgtgcatttgatgggacagcagaaattagatgatgtatacaagcactatgatgcatatgtggcagcttcacagagtgagggcttcgggctcacactcatggaggccataggctcagggcttcctatagtgggctttgatgtgaggtatggcaaccagacctttatcgatgatgggcaaaacggctacaaaattccaatcaccgatgagatggatcagaaggagaagataaagctcctttctgagcgtatagtgaggatgtttacagaggatgacatggatgcattttcaggacattcatatgagaaggccaaagaatatctgactaaggaggtggttcacagatggatagagctgttgaagtaacacacacggcggatggtatcacactgctctttgatacattttcaggcgagagcaagaatctccttgagtcatttaagaatgccggtgctgcctttcatgcagcagtcattgaggatgacggtttcctgccggatgatgtgatgagcgtgtatggatttttcttaggcgattacaggaaagctgacagcttaccgggtaagccgctgtatttcaatcagatacagattcctgattactggcgcatagagggcgataattcatctgcgaatgtcatggaccgtaccagggagcgagcgaggatatttttcacggagcctacgcacaggcggcaggttaagattgttgactggctcgatgatgccggtcaggtcaggctttcagagcattataacaggtatggcgcgattttctgtcacacggtttttaataaaaaggggcagaaggcactcaggaagttttttgatgtgacgggcagggagatgatagtggaaaactttgtcaccggtgatatactcgtcagatggcaggataaggactggattttcagaagtaagacagactttatagcgtttttcatcaggtgcgcagggctggaggatacagcggtttatttcaactcgctgtcatatccgttttttgcatcacaggcgcttgcgccaaacggctttcgcgacgcactcttctggcacgagccggtgggtgatgagataccaggcaatatgcagattatactgcatgatcagggaacgagggcaaagcgcgtatttgtgtcgcgcagggagtcctacgacaggcttatagcacttggcgctccttccgataaggtgaagcagcttggatatatctacagcttcgtcagggaaaataagcacaggccgcacatactcgtatgtaccaattcagagaatgtgggtcatctgacagagcttgcgtcgctcatgccacagatgcattttcatgtggcggccatcacagagatgtcgtcgaagcttatgtcggcagggcagtatgacaatgtgtcactctaccctaatgtgaagatgtccgtgctggatagtctttttgagaagtgtgatttctacctcgatatcaatcacgagggtgagatagtggatgcggttcacagagctttcttaaacaacatgcttatagtgggctatgaggagaccatgcacaacgcatattacaccgcagacacgaatacatttaaggagagcgagtacgctgatatggcggaggcactcaacctgacactggctatgccgcatctcattgatgaggcgcttgccatgcagaaaaaggctgctgtagcggctgatgcaacagactacatggaaatactccatttgtagtaatacagggtttatgaacagaaaggagcttaatatgagtaaaaacactaacaacaatcagacagtagacgagaaaaagggtaaaaggacagggcttacaatactgggctatgtgcttgtgatcgtggcacttcttacagtgcttccggttgtgcttccaccgatatttggctatcatacatatctttcgggcacagatcacacaggaaatatctcaaagtatggcagtgtggtatatttaaagactatcgacgaggcatcttacaaggatggcaatatagtagccatcgaatcagctgattcatcagccagaagggttgattcttattatgtagattctaatgattcttctgcaaaagagattgcacttcgtgatggaaatggtgtatcatataaggtagttaaagggcaggttatcgcaaagactccgtttataggatacttaagccagctgtgcttttcagcagttggaattattgtcacggtagtgatttttgctgcaggtgtagcaatcatgatgtatgtaaacaaaatcagcaaggaaatcaacaccatggttgaacagcagactgcatagtgtgtctgaattcccatctgcgacattagaaaacctgactattataaagcagaccttatgtttgcggaataggataagttatggatagatacagtgtgagtaggacaaagaggtcattgttttatttaatgatggcctttttgattgttggatttataattgccgagtgcatattaccgagtgagagaagccagtctgtaagtgataataatatcacctacgagggcagctttacatgggagaagtccgatggtgaaagggaggctattgaagtacccggcaggtacgatgtcaagccgggggatacgatggttataactactgttctgcctgatgatttcaatgcaagtgtcatggcaatcagagcatcacttcagacaatcagattttacgtggatggcagtctgagagcagagtatgatacaaaggacacgagacccttcggtaaggattccgcgagcagatatgtattttgcaatatgtcggaggatgatgccggcaaagagctgcgcattgagctgacgagccatgcatccaactattctggcgttgtaaatacagtatactgtggagataagagcaatatatggacaaatatatttcataatagttcaagagagacgattatagcatttttcattttttttgctgctgtagtgtctgttatgttcagtatagcactcagtattgtatacaagacacattttgacatggagtatgtaggctggtgtatgcttcttggggcaatatggatgcttggtgaatcgaagctgcgtcagatgctggtgccgaatgcatctgttttggcggctatgtgctttgtggttattctgattagtcctattgctgtttcgatttatattgacagcatacagggcgggcgttatacaagagtgtatacatgcatagaggcgcttgcggctgtgaatttaattgtctgcacatcactgcagctttttggtgtgtgcgattatatagagactctgccggcaggacagggaatgcttgctgtctgctgcgtggtcgtcatcacaacatttatcattgatataattaaacacagggctttgggatacagaccagagatggttgccatgattgtggcacttgttctagcgcttatagaggctgcatctgtgtactttgttgtcaccatgtcaggtttatttatcggaataggccttattgtgattttgtttgtcaatatcatagtcacaataaaaagaatcagcgagatagaatacaagcgccagaaggaagagagtgataagcttagaaatcagacagagagagtttcccttcagatgatgaagacacttgctgctacaattgaggcaaaggacgattatatgagaggtcactcatacagagtcgcagagtattctgctctcatagcaaagcagcttggctggagtgagcatgatgtggaaaatcttagaaatgctgcatatctgcatgatatcggaaagattggcgtgcctgatactattttaaataagccaaccaggctgactgatgaagagtttgccgccataaagagccatactgtgatgggcgcagatattttaaaggatattaccctgttagaccatctggtggatattgcaaggaatcatcatgagcgctacgatggaaagggctatcctgacggactggtgggagaggagataccgctttctgcccgtatagtgtgtgtggcggacagctatgatgccatgaggtcgcgcaggatttacaggaatgccctgccagatgaagaaatccgaagggagcttttggataactgcagcactcagtttgatccgcagatttcgagtatgtttgttgatatgcttgacaatggcatggttgtgattgatgaggataatccggcggctcagggctaccgtgataatgcggctatcgagtcagtggcagacaaattcatatctgaggtcaagaccatgagcagtcaggaaaaagccgatagtgttgattatctgacagggctttacatgcgaagtcgtggacagcaggtaatagcagccctgatgcaggataatgatggctgtcttgccttcatagatatggataatctcaaaaaagtcaatgatgtgcatggtcacaaggcgggtgacagggcacttaagcttataggtaatctccttgctaaagagactgagaatgagacctttgcagcctgcaggcttggaggtgatgagttcctcatctttatgccatattctgacagggcaagcgtggagagcgttataaagcgcatatttgaaggtttcgagagcgccagggaagcagactgtgagataaaggaggccgctctttcagcaggactgtgcatgacgacaaagggagccatgtttgaaagtgactacacaaaggcagataaggcactttactatgtgaagcagaactgtaagggttcatatttcttctatgagcagctcttagctgacaataaggagaatacaaatctgagtgcggatttacgaaacgtggcaaagcttttaaaggagagtggcagctatacaggtgcgctggatttaaactacagagagtttgcaagaatctatgagttcgtgaacaatgtaggagataggcacaagcacaactgctatctggtcatggtgactatgaacactctgccggagcagcttgcagatatcgaggaaattgagaaggcacttgactgcatggagcagtctatccgcagcaagatcagaaaggtggatgtctgcacgcgctacagctcaatgcagtatcttatcatactatttgaaccacaggaaaatcagattccaaatgtcatggagagaatctttatgcattactatgagctctgtgacagagagaatttcaagccgcagtatgagtatatcaaaatgactgaggtaaaatagggattgttaaataatagtcaatgtggtatagttttcttcgaacggtattcgaaggaaactgtatcatggaggatgtgttgtcaccttatgacagagcatatccggcagacacaaggaagccaaaagcacattgctgtagcagatatgaagcagacagcaaagtgacaggcgcgcacagggtaaatcgaccgctgccatacggcacatggcggagattatatcagctgcgagataaggaatggtctgaccggcttggaaagaaggtggtagcatgaaaataggcataatcggcgcaggcagagtgggctgttctataggtaaatacctaaggacaaaggacatagagcttgcaggctattatgacgtggattctgcggcggctaaggaggctgcggagtttacaaggacagagagctttgattcgctaaagcaactggcggatcaatcacagattatatttatcaccacaccggattcatttattataccggtttgggaacaattaaaagagctgtctctaacgaatcagattatatgtcattgcagtggcgcattatcatccgattcattttccggaagggagagcatgagcgtatcatgctgttcaattcatccaatgttaccgttcagtaacaaattttcatcatatgagcaattaaataaagcatttttcacagtggaagggcaggatgctgcggttgaagcaatatccgggctgttttgttctattggaaatgaggtatgccgcattgatggcgctaaaaaggcaaaataccatgcagcggctagtattttgagcaatcaggtgattgctgtccttgacatgggctattctcttttggaggactgcggctttacaagggctgaggctgtaagagctacaggccagcttgtgatgcgcaatatcgaaaacgtactcgaagcaggctgtgacggcgcactgaccgggccaatcgagagaaacgatattgaaacagtgaaaaagcacatcgcatgtatgcaaaatgacgatagcgatgatgtcagattgtacaaaatgcttggtacaaaactagtaaatattgctgaaaaaaagaatcctgataaggattacactcagatgatggaattgctaagaggctgacaataccgtgaatggttccaagtagttacaagaaacggattgttgcagaaagacagagggattggacaatgaaaaatacagtagtaacttttaaacaggcaaaggaaaagggcgagaagctcacgatgctcacagcatatgattattcgacagcaaagctcatagatgaggccggaatcaatgcaattttagtaggagattctctcggcatggtggtgcttggctatgaggatacactttcagtgactatggaggatatgattcatcacagcgcagctgtttcaagaggcataaaggatacgctgctcatcacagatatgccttttatgtcatatcagacatcggtttatgatgctgtggtcaatgcaggacgactcgtgaaggaaggccatgcgcaggcagtcaagctcgagggtggcaaggaggtatgtccacagataaaggctatcgtggatgcgtcaattccggtatgtgcacatttagggcttacaccacagtcagtaaatgcatttggcggcttcaaggtgcagggcaagggtgaagaggcagcgcagaagcttcttgacgaggcccgtgcggtcgaggaggcaggagcatttgcagtggtgctcgagtgcgtgccaaaggcacttgcaaaaaaaattacagagagcataagcatacctacaatcggtatcggagcgggagcagactgcgacggccaggtgcttgtatatcaggatatgcttgccatgtatgcaaacatgaagccgaaatttgtaaagcagtttgcacaggtcggaaaagaaatgaatgaggcgttcacagcctacaaaaaggctattgaggagggaagcttccctggtgaggagcatacctttaagatggatgagacaataattgacaagctgtattagtatcgaaaatagtattgaagaatatttacaaaaaatagctacgaaaaataaaagaataaggagacataaaatgttaatatacggacaaatcgaacaggtaagagaagcagtaaaggcatggaaaaaagagggcaaaagcgttggctttgtacctacaatgggatacctccacgagggacacaagagcttaatcgatgcggcaagacgcgagaatgacaaggttgtagtgagtatttttgtaaatccaatgcagtttggccctgcagaggatttagacagctatccacgtgatttaaacagggatgcaaagctttgtgaggatgcgggcgttgacattattttccatcctgagcctgaggagatgtatgcagacggcttctgctcatatgtggatatgaatggcctcacaactgagctttgtggaaaaacaagacctatccattttagaggtgtgcagacagttgtcctgaagctgtttcacattgtgacacctgaccgtgcatactttggacagaaggatgcacagcagcttgcggtcataaagcgtatggtaaaggatttaaatgttgacacagaaatcatcggctgcccaatcatccgtgaggaggatggactggcaaagagctcaagaaacacatatttaagtgaggatgaaagacaggcagcgcttgtactgagcagaagcttaaaaatcggaaagcagctcgtagaggatggcgaaaagagtgcaaaagcgataaaggatgcaatcacagcagagataaacaaggagccgcttgcaagaattgattatgtagatgtggttgattttgaaacaattacaccggttgatgagattaagggaacaacactcgtggcaattgctgtctatatcggaaagacaaggctgattgacaattttattgcgtagacggacaagaaacgattattgaaaagaggtacaaacaatgaattatacaatgcttaagggcaaaatacacagagcggtggtcaagcaggctgacttaaactacgtgggaagcatcactgtagatacaaagctgcttgaggcagcaggcatcttggagtatgagatggtacagattgtcgatgtggaaaacggaaacagattcgagacctacaccatcgccggagagccgggctcaggcatgatatgcttaaacggcgcagccgccagacaggttgcagtcggtgaccatgtgatactcatgtgctatgcgcagatgacaccggaggaagcaaaggagcatcatccgaaggttgtgtttgtggatgatgaaaacaagatagcgcgtgtgacaaattatgagaagcatggaaagctgacggaggattttatttaacaatagaaaaatcaagtctgctgtagtataataatttatcgggtaaaatatcatgtatttatgcgggaggtaaatatgtacacagcagacgaaaagagatacgacacaatgagatataacagatgcggcaggagcggacttaagcttcctgttgtatcgcttggtctatggcacaatttcggtgatttttcatcgtatgacaacatgaagcagatgtgcttcacagcctttgaccatggcatcactcactttgacctggcaaacaactatggtcctgaatacggcagcgcagagaagcacttcgggcttatcctgaaggagcatctgtcagcataccgcgatgagctcatcatcagctcaaaggcaggctatgatatgtggaagggaccatacggcaactggggcagccgcaagtatctgattgcaagccttgatcagagccttaagagaatgggactcgactatgtggatattttctatcatcacagaatggaccctgagacaccgcttgaggaaacaatgggagcactcgaccagatagtaaaaagcggaaaagcactctatgtcggactgtcaaattatgatggcgagaccatgaagagagcctgcgagattcttactgatttgaaatgtccgtttatcatcaaccagaattcatacaatatattcaaccgtacaatagagcaaaacggcttgaagcaggctgcaagagagtgccaaaagggcatcatctcattcagcccgctcgcacagggaatgctcacagaccgttacctgaacggcattccggatgacagccgtataaagacagacggtcgctttttgaatcaggaaaagctcgctttgcacatcgagcagattaagaagttaaatgaattagccacaaaacgtggtgagacacttgcacagatggctctcaagtgggtggtaaaggatgatgacgtgacaagtgtacttgtcggtgcctcaaagccacagcagattcttgaaaacttaaaggttatggagggcactggcttctctgaggaagagcttaggatgattgatgaggttgtgggagtgtagaattgaatctggtgatataaatggaatatattgcgcatatagaagaagaaagaaagcaaaggcttattgatcatttggatggaactgccaaattagctggaaaatttgcagaatcatttggaaaatatgagtggggatattgcataggtatgttacatgatctaggtaagtattccaaagaatttcaacatagaatacagtttaatacgaatgacagagtagaccattctactgctggaatgagattatgtaatgaaaaaggtggatattattctatattacaatatgctattgcaggacatcattctggactaatggattactataagcttgaagaacgatatagaaaatcaatatgtgattatcaggcatatagacaggaggtagaaattccacaaataaaaagtgatccttttgagagctgtaaaacacaaaatcctcatttttcaatggggatttttatgaggatgctatattcatgtcttgttgatgcggactttcttgaaacagaaagttttatgaagaataaccatgtggaacgaacatcgggggaagaaatggcatctttattagcaagactggaaagacatattggttcatggttagaaaattatgatcttaattcgataaacggtagaagaactgagatattaaagtcctgtctgacagcaggtgagaatgacaggggattgtttcacctgactgttccaacaggtggtgggaaaacaattgcctcattggcatttgcgt

SEQ ID NO: 489 - DNA, 5398 bp, unidentified
  source 1..5398: mol_type = unassigned DNA
atggagatcagagaaattacgactcccgatgaaaagcggcgcattacgcgctttattttagaatcgctgcccgactggtttggcattccagaggcgcgcgaggaatacatcgaaaagagtgttaagcagccgttttttgccgcgttcgacggcgagaacgccgtcggcttcctttaccttgccgaaacggggagggatacagcggaactctatgtcatgggcgtgctgaaagaataccaccgccgcggcgtcggcaagatgctctttgccgcagcgaagcagcgggcgaaggagcttggctactcgtttttgcaggtcaagaccgtgcagatggggaagtaccctgagtacgacgcgacgaaccgcttctatctcgccctcggttttggtgagtttgaggtattcccgacgctctgggacgagtggaacccgtgtcaaatctacgtgatgagcctgaaataagaaaatgttggaactttttcccgccgttttgcgtctataaaagcagaaaaacaggggagggaagcatatgaccgtccgcgaaccgaaaaaacgctctaatttgcggctgaagctcggcggcgcgtattttagcgcgcagcgaaaactcagatggctttcgatgcggaagcattttgcgcgcgagtgcagcggggaagacttagcatatcaggcgttttcccaccatacgccgctcatgcgaaagctcaaggacgtcgacatgcagctccagcgcaacaaggtgacgaatctccgcctcgcctgtgcgcggctcgacgggcttttgctgcgccccggtgaaacgatgagctactggtatctcatcggaaagccgacggcggggaaggggtatctgcccggcatgatcctgcgcaacggcgggtatctggccgcgacgggcggcgggctctgccagctctcaaacctcatctactggatgacgctgcacacgccgctcacggtcgtcgagcgccaccgccacggctacgacgtctttcccgacgcgaaccgcacgcagcccttcggcagcggtgcgacctgcttttacccctatcttgacctgatgatccgcaacgacacacaggacacctatcagatgcgcgtacgcgtcggcaagacagaccttgagggcgagtggcgcgtgagcgccgagccgaccgagcgctatgcggtcgtcgagcgcaaccacgagatgcgcgcgcagtactggggcggctacatccgccacaacgagctctaccggcagacgtttgatttgcagggcaacctgctcgcggaaacgctcgtcgccgtgaacgacgcggtgatgatgtactcgccgtatctcgaagaaagcaaaaaggaaggctgacaaagtcaaccttccttttatcttattcagccgtttcgtccgcatcttcgggcttatcctcttcctcaggctcctcccacggctgcatcgtggcgacacagcggttgatgttcttgccctcggcatagaatttggcctcatagtcagtcatcacgccgcgctgtccgcttccgtgcaggtcgcgcgtgacctcggaaagggtgaagccaaactgcggaatttcctcgatcgaccactcaaacagcgggtcgttgtcggtcttgaaatgaatttggccgttgtccttgagcaccttgcggtagagcttcaagaaattgccgtgcgtcagccgacgcttggcctgccgcttgggcggccacgggtcgcagaagttgacatagatgcggtcgacctcgccctgatcaaaaatctcagggagttggttggcgtcgatgtcgatgaaaaagacgttgtgcagctctgccttcgccgcacgctccatcgcgacgaccatcgcgtcgggcaccttttcgaccgcgatgagcagcacgtcgggctccgccgcggccgtctcgacggtgaagcggcccttgccgcagccgagctccacgcggatctccttcgcctcgggcatcaagtcgtgccagcggcccttgcgctcgtagggatccttgatctgatacgccccgcaccgctccatgcggggaagcaggtttttctttttgcgcattcgcatagaatgaacctcgttttcctataattcaatcctatcatatcgaaaattggtgcaagagacaagtcattttaaaaattttatacaagagttgctgcattgggagaaaagatcattaaaaatgcagcgtttcttgcaatgacaccggaaaagtgtgaaacttttttgaaaaaagtgatttttctcttgcaaatatgccttgccgcccatataatagggggcagttgaagaagacaggaggagacacatgatgtcttttgtcaaatatgaacccaagggcaacattgcctatctcatcattgaccgcgaaaaggcgctcaacgcgctcaattctcaggtgctcgccgatctcgatgccgcgctcgacgcggtggacttaagcgagatccgctgcctgatcgtccgcggcgcgggcgagaagtcctttgtcgccggcgcggacatcgcgcagatgaaggagctcagcaaggaggaggccgaggccttcggcaagcagggcaacgacgtcatgcgcaagctcgaagcgttccccatcccgacgatcgcggcggtgggcggctatgccctcggcggcggctgcgagctcgcgatgagctgcgacttccgcatctgctccgataccgccgttttcggccagcccgaaacgggtctcggcatcacgccgggctttggcggcacgcagcgccttgcgcgcctcgtcggccccggcatggccaagcagatgatctacaccgcccgcaacatcaaggcggacgaggcctaccgcatcggccttgtcaacgcggtctatccgctttctgacctctacgccgcggcggaaaagctcgccggccagatcgccggcaacgcgcccatcgcggtgcgcgcgtccaagcaggccatcaacgacggtcttcaggtcgacattgaccgcgccgtcgtgatcgaggagaaggccttcggctcctgcttccagagcgccgaccagcaggagggcatgggcgctttcctcgaaaagcgcaagcacgagccctttatcaacaagtgattccatagaattatctatttatattgtaggaggatacacacaatgaaagttgcagttttcggcgccggcaccatgggcagcggcatcgctcaggtcttcgcggccaagggccacaccgctctgatgtacgcttccagcgtcgcttccgctcagcgccacaaggataagctcgccgcttccctgcagaagcgtgtcgagaagggcaagatgaccgaagaggctaaggacgccatcctgaacaacatcctcgtcgaggagaagtctgccgcggcggacgccgacctcgttatcgagtgcgtcaaggaagagatgggcaccaagcgcgagctgctcggcgagctcgacgagatgtgcaaggagagcaccgttttcgcgaccaacacctcttctttgtccgtcaccgagatgggtctcggcctcaagcacgccgtcatcggcatgcacttcttcaaccccgtgcccagcatgaagctcgttgaggtcatccgcggcgccaacaccacgcaggagaccttcgacttcatctacaacctctccaaggagatcggcaaggagcctgtcgaggtcgctgaggctccgggcttcgtcgtcaacaagatcctgatcccgatgatcaacgaggccatcggcctggtcgagaccggcgttgcctctgtcgaggatatcgacaaggccatgatgctcggcgcgaaccaccccatgggccccctcgccctgggcgacttcatcggcctggacgtctgcctcgccatcatgaacgtcctctacagcgagaccggcgatccgaagtatcgtcccgctctgctgctcaagaagatggtccgcggcggccagctcggcaagaagtccggcaagggcttctacgattacagcaagaagtaatccgttcctaaaaggataaaaaggggaggaagtttacaaaaactgcctccccttttctcttttggaatggaaaggattcctgaaaatgacagaaaactgtcataaaaggaacggaaatgtcaaaaagactttaatgaattcggcgaaaagcacgaattccaaaaaggaatgatagttcctcttgcgaaaatgaaacgcacaggatataatgaaagtcacggaactgatttgtgaaaaattagacaatccaattatttttatagtgaaggagcaaaagactatggatttccatctgtccaaagaacatctgctggtccgcaaaatgtatcgcgaatttgcagaaaatgaagtcaagcctttagctgaggaactcgatgaggaagagcgcttccccatggagaccgtcgaaaagatggccaagctcggcatgatgggtatttacttcccgaagcagtacggcggcgccggcggcgatgttctcagttatgccatgtgcgtggaggagctcgctaaggtttgcggcaccaccgctgttatcgtttccgcccatacctccctctgctgcgctcccattttcgagaacggcaccgaggagcagaagatgaagtatctgcctgaccttctgtccggccgcaagatcggcgcgttcggtctgaccgagcccggcgccggtaccgacgcctccggccagcagaccaccgctgtcaagaacgagaacggcgactacgtcctcaacggcagcaagtgcttcatcaccaacggtaacgttgcctccactttcgtcgtgttcgccatgaccgacaagagcaagggcaaccacggcatcaccgccttcatcgttgagaaggacttccccggcttctccaccggtaagcacgagaagaagatgggtatccgaggcagctctacctgcgacctcgtcttcgaagactgcgtcgttcccaaggagaacctgctcggcaaggaaggcgaaggcttcaagatcgctatgaagaccctcgacggcggccgtatcggtatcgcctcccaggctctcggccttgccgagggcgccatcaacgaggctgtcaagtacaccaaggagcgcgtccagtttggccgccgcctgagccagttccagaacacccagttccagctggccgacatgcacacccgcacccaggctgcccagtacctcgtgtacgcggctgccatgaagaagcagaatcacgaggattactccatggacgctgccatggccaagctcttcgcggccgagaccgcttccgacgtcacccgccgcgctgttcagctcttcggcggctatggctacacccgtgagtatcccgttgagcgcatgatgcgcgatgccaagatcaccgagatctacgagggcacttccgaagtccagcgtatggtcgttgccaagtatcttggtgtgaactaa

SEQ ID NO: 490 - DNA, 26094 bp, unidentified
  source 1..26094: mol_type = unassigned DNA
  misc_difference 9135: note = a, c, g, or t
  misc_difference 9136: note = a, c, g, or t
  misc_difference 9137: note = a, c, g, or t
  misc_difference 9138: note = a, c, g, or t
  misc_difference 9139: note = a, c, g, or t
  misc_difference 9140: note = a, c, g, or t
  misc_difference 9141: note = a, c, g, or t
  misc_difference 9142: note = a, c, g, or t
  misc_difference 9143: note = a, c, g, or t
  misc_difference 9144: note = a, c, g, or t
tggtggattagcggtcttacatctgcgggcccgactgcccaaccaaactccgcctatatcaagaaagacggtaacaaagcctacatttacgatgataccggcgcgggcgatgataccaatcccggcaaccagagagcgactgtgatgctgcgattcggcgaagctgcgaatagcaaggtcacaaacgacgttgatattaccgacatcaccgacgaggttatccagaactactataagtacgtgctggacagcaccaagcccgcccagccgggagaaatccacgtcaaggccagccaggtgcaggacgcggacaacaacgtctatggccgttatgaagtgacgtgggacgagccgaacgacaagacagccagccccgccgcttactaccgtgttgaaatcctgccctgcaacgatgcgggtactgtcgcaccggatgcagatccctatctcaaagctgacgtctaccagcgcagctatacttttgtggctgataaagcgtggacgggtaacttcgtcgtgcgtgtaacgccctacaataccaacgacgacccgacgcagtccgtcaacccccgaaccagcggcgtgcagacctttatgtacgccctgccgacaccggagattgagttccggctggtcaaacgcgagaacggcggctttgactggaatcagtgcaagacgccgcatgacgagtgggccgcattcaagtatgaggttgtcgcagtgctgaaaaactacaccgaatacccgacagacgaggcatggaccgtcacgctgaccgatggaacgcacaattataatttcagaagcctagaaaaaaagcagtacatccgcctgactaaaaatttggaacgcactttgacgcttacggcgttggcaaccccggacaacagcagcagtacaaagtatctgcgctcggcccagtacaagtcagagacctatctcccgtcccagtggcgagaccacaacggtgactccggcaaggacgaggacggtctgccgctgggcacgctgaacaaggacggcgacacggagtatgtgacctacaccggccagacagcggagagctttgaagcaaccgtgaagttcagctttaccccgaaggtcaagaacggcagcgagcacggcagcccgacctaccgcgtcatgctgctggcaaaatatctgggcaatgacatggtcaacgggcagtccctgaacggccagtacatcacgctggccgcgcgggagggcatcgtcaccgagacacccgtcaccttcaacctgaacagtctgccgtcggatgctatgtccaactacacggacttccttgccattgcggtgcccatcaccagcggtaaaggcgatgtgaccacacgctgggatgccacggcggacgaagtgtccgcagccatcgccagccatgcaaacgacaccaacaaagaaatctggtggaagaacggctatgagatcgtccgcacgggcgagcacagctatacctatgcccatctgacgccgctctgcttctccgacgtgagccgcaccgatgacaagagttgggctatacaggccacgcagacgaccccgcagatcatcttcaagcagctgaacctgaatgttctgaaagccccgacgctggcggaagataccgacggtggcaaggtgaacccggacaacaatcagctgacctacacgttcaaatggacacaggacgacatgcaggccactgacgcagcccccgtctaccagatcaggctctacggcttgctgacggacgaggacggcaaggtgaccggtcaggagcaaattgcgctgaaggacggcgtaaatctggccaatgaggttcggcgtagcggcaacagctttaccctgcctgtcaacgtggataccatgctggccaacggcagcgacagctggcgctataacaaggtccggctcgaggtaacccgcgtggcggcagccgacaccaccgaaatcggcgcgtccgctgtggcggattacagcgttaagcagcgcctgcccggcatcagcgcgccgagctccatcacccgcgtcaacggcgagaccgacaatgcggatgccctgctctacacggtcagctggtcgccttccgacaacgcacgcattgaccactatgagctgtgcgctgtcgataccaacggcaaaactgtgctgacgctgcccaccacgggcaacgtcggcagcctgacgctggatctggagcagtatcagggcgtcgcgatgcgcttccgcgtcattgcccgccgcaagactggtagcaattgctttgacggcccggacggcgcgttgagccagcccgagaccatcgtccgccgcgccgctgcgcccaaggttacggccagcagctttgcgcccgccagcccggatcaggagacgttcctgaacgacctcaagctcaacatgacgctggacgcagccgcacagggcaatgtctactttaccggctatatcttcagcgatgtggccaactatacaaaaattgccaaactggccgaggcttggcagggcgaaggcaccggacaggacaagtacacggcccagcaggagttgaccaaagcattggacgagatgctgaacaatggcgacgccgagctggtcatcccgaaggacagccgcacggtgggcgggagcgccagcgtcaacgacaaaaccgccagctatacctttgtgcccgacggcaacggctttacgctgacgcccgaccatgcaaaacaatacctgctgcccgcggtgcgcgttatgcccaccgacggcacgacagcgtcgaactggttctacatcctacagaaggataccgaagcggcacagctgccggccatcacgctggacgcccccgtggacgctgccgaaccggaacgcgcgcttggcaatgccgtttacaagcaggaagtcaacctgtacaacgaccccgagtgtaagaccagtcgcggtacggccccgctggagctgcgccgctttacggtggagtggaccgcggtgaataagcacacccaggccgacggcacggtgcgcaacctgaccgacagctatacctttaccgtcacgccgctgggcgaggacaaaacgccctacagcattacggtgacgacctacgacagggacaagacggacgcagacggcaccatgcataagcgcggggaaatcaaaaccgttaccaagacctatgacggcaaaacgacggagcttgacaagcagaccaccgttgtggacgcggagaccaaagagacccgcatctggtacgacctgagcgttgagcctgtgtacgacgagaacggcaaagtgacagactgggaatcgcaaccctatgacgtcaccggcacggtggaaaaggacggcggtacgctgtactacaaggcaaagacggttcccatgctggagctggtgcaggaggacggcgccgagcctgtttaccgcatcaccctgcccgagctgcaggaaaaggtgcaggacgactcgctcgatctgcaaaagttcaccgcaagtgtgacgctgcagacgctggcgcactcggataacaaaggtaagaccgtcgaatccggcacggtcaaggtccccgtcaacgaggcgaacaccgccgatgcggcggaggatgcccagagcatggactccacggagagcgtcgcgcctgccgagactgcagaaagcacggcggcggaaagcgcccccgcaagcgtgcccccggtcctgatgcgggcccgtgcggcactgcccatggcgaccccggagaccgccgctgccccggatgaaacggacgcggcggaaaccgcgcccccggaacggacggaaacaagcgacgcatcgtaattttatttcaggaaagaaggtggcattatgcaccgcagggcacgcagcattctgcgcggggagcaagggctttcgatgatactggtcctctgcatcggcgcgctgtttgtggcgctgtcggcagcgctggtctatgcggcctccgtgctgacggccaatgccaaccgccagctgctggaacaggaagcctaccagttggcaaccagcttttccgacgtgctggaaggggagctgaacaagaaggacagcagctttgccaagttcgtcaatgggcagttcatgttctcccaaagctacggcaaggacatctatgatttggaatcccagcccaaggagtttgcctggaaaccgaacggcagccagcctgatggcggggccgaggccatcacggtaacactgcgccgccgcccgggcgacggtgccgataagctgaaccaaacggcgaacagcaccagtgccacagacctgcgcaacctgctcgacacactggagggcgaagaccgcaagggcatggcaatcgtcgatttacagctggacattacggtgacagtcacgaaaaacggtgagagctttgcctttacgcggacgtatgaccgcacagtgaagtacaacagcgacggcagccaggcaaaaagctatatattccccaaggtgtattacacaataaacgacggtataacaaagtattaccgcattaacgaactgacgttctacgcccccagccttcccgaagtgaccattgatgataacaacatcgacagcaaccgcctgacgttccactgcgacaccagccagcagcccgattccatcacctacacccgcggtgccaaacagagcaccggcacaacacaggagtgacccgctatgaaacatactttacaaagtcagcgcggcgagaccattgtggaagtgcttgtgtcgttcctgctgctgatgatttttacgtcgatgttcgtcgtttcgctgcggtacgcccgcgccatgtcccaaaaggccgaaacgctgcgggagacagcctatgccttctgcgccgggctgtacccggccaataacgcggcccccgactggaagaaggagcaggaggggctggagttctcctttggcgattacggtgaatttacggtgaacggcgtcgagctggacagcgtggagacaagcgcggaagttacggaaaacggccaaaaaacgacggaacagcacaagttttaccgctacagcaagagcacggcagaagggacgaccaacccatgaagcagcgtttgaaaaaccagagcggcacaacgctggtggagctgatcgtctgcatggtgctgctggcgatctttacgctggcggcggtcacgctgatacagcccagtgcgcaggcgtacatggacatccagcagcagacgcgcgcgcaaaatctggccgacgcgctcattgagacgatccgcggcgaggtgctcgaggcgaacggctatatccgcttcaccgacggcgcgacggaccttaataatttggacagcgtttttgcgtccaagggtaacgactacagcaaaggcacggcattggaattcagcgtctaccccaaccacattgagctgatcgacaaggactgtgtgccgatgctgacaaagacagacggcacaccactgctgacagcggatcaggccaatgcgctgaacggctacctgcacatgcgcttttaccgcgatgaactgaatgacgccgggcactacggcaacccgcagcacacaaaaaaggacaaggccgaggacggtactgagacggtcacacggccctacgttgcctacggctacacaacggcctatccccgggatgcctatatggggctgttcatcagcgatctgcatttctacgcccgcagctggacgcaggacggcgacgaaaccaagaccccgcgcattacggctatgacggtggtgctgactgtggccaagcgggacgccaacgaccagatcgtgccgctgtgcacccaaaaagccattgtgcagctgcccggtgagccggtcatcctgtatgaacccggcacctgggacggcaaggcatcgtcggagtcgtgagcggtgccctccgggactatttttgaaaagtttattacaatcccggcggatgtactggacaaattcaaatggactagttatactttaaaacatgaatacctgtgtgccggacaaaaatgcaggaacgccatgggcatcagagcagagaggatgactaggatgacaacaattgaaatcaaaatgctgggcggctttgagatccgtgtgaacggcaagcccgtgctggcacagctggcgcagtcccgcaaggcaacggcgctggtgcagtatctcgttttgcggcgcggggagcgcgtctcccacaaggtactgaccgataccctgtgggcaggggagcggtccaccaacccggacatggccctgcgcgccatcttgcatcgcttccgcaatatgatcgacgcggagggtctggatgagatgaagggctgcatcgtgaccagccgcggctactaccagtggaacccccatctggactgcagcgtggatgtgtttgaggtcaacgacctgtcggagctggcccgcaaggagggcgacgccgagaagcgcagccgcatttatgaacagatcgtcaacctgtatgacgggcgcctgctgccgcggtctgcgtccgagccgtgggtcgaaagcgtcagcgtgcgtctgcacgggcagtaccgcacagccattttaaacctgctggagctctgcaaaaaatggggcgagagcacccgcatcgttgcgctgtgtacccgcgcgctggagctggacccctacgaggagcgcctttatctggaaaagatcgtcgcgctggagacgctgggccgccacgaggaggcgcaggatctggcacgccgcggcagcgccatgggctgcctgcatcataccattgagccgggccgcgcaggctctgcctaccgccagatgcgccaggcagaccgcaatatggagagcgatgtatccaagctgatctctgctctgccggataccgagaacacgggggcctgtatctgcgactttgagacgttcaaggaaatttaccgcgtacagcgcggcgtgcaggcccgctacggtctgcaggtattcctggcgatcctgaccgtggctcccagccagaacaccgatgctgccgagaccgctctgatggtggagcagctgggtgatctgatccacatgaatctgcgccagtgcgatgtggccgcccgctacaccgatatgcagtatgttgttatgctgagcggcagcaccgccgagagcggcaccggcccgatggagcgcatcaaggccgcgttctaccgcatccctgcccatggccgctacctgttgagctatagcctctatgttcccgaggccaaggccgacaacgggcgcgcccgccgccgcaaaaagacggcgaagaaggaaaaataagcgagccgttaagccgtacagtgaaagctgtgcgggttttttgctgcacggaccggcaaagaaacgattggtaggggcgggcattgcccgcccgtgcccgtttgccctgtgataaatttccccgaaaagacgatgctgcgccaagttggcgggcgagcaatgctcgcccctacactcgctgtatgtcgaggaacgattttttacactttccacaatcttttgcctaaaaatttttacaaaaaatccgaaaaaactgtttaaatttccacaacaatgtggtaaagtagtatcaaacaggcgggagtgttcaaaaatcactgcgccgcaatgaaattctacgccgcagggctgccggaagcagccccggcgcgaaaagaggtttgacgatccatgggctacgcaagcaaagacatccgcaacattctggtggccggccacgccggctgcggcaaaacgacgctgaccgaggcactgctgtacatgagcggcgcttccgagcgtatgggccgtgtcgaggacggcaccaccgccagcgactttgaccccgaggagatccgccgcaaggcatcgctcaactcgagcgttgtccccgtcgagtacgagggcatcaagtacaacctgatcgacgcaccgggtctgtttgactttgagaccggcgctgccgagggcatcatggccgccgagagcgtgctgatctgtgtgtccgggcgttccggcgtgaccgtcggtgccgagaaggcgtaccagctggcgctgaaaaacaacaaggcgcggatgatctttgtcaccaaggctgatttggaaaacgccgactactttaagatcctggagcagatgaagatcaagttcggtcccagtgtctgcccctgcgtcgtgcccgtccgtctggacgacggcaccgtcgcctacatcaacctgttcagccagaaggccttcaaatacgaaggcggcaagcaggtccagatcgacctgcccgacatcggccaccgctttgagggcctgatccaggccatgagcgaggccatcgccgagaccgacgaggctttgatggagaagttcttcgagggtgaggctttcaccacagaggagatcgtccagggcatggcctccggcgtgcgcagcggccagatcacgcccgtgttctgcggctccgccgtcaacgcgcaggcgctggatatgctgctctacaacatgaacgtgctgctgcccggcgcggacaccgcgtccgctgtgggcgagtctggcggcgagccggtggagatcaccgccgaccccgctgccccgctgtgcgcttacgtctttaagactgtggccgacccgtttgtcggcaagctgagctttattaaggtgctgtccggcaggctgaccgcgacgagcaacgccgtcaacgcccgcaccggccagccggagcgcctgggcaagacgctgaccgtctgcggcaaaaagcagaccgacacgcccgaaatcgccgccggtgacatcggcgcagttgccaagctggccaccgccaagaccggcgataccctgtgtgaccccgcccgcgtcgtggcgctgcccgcacctgtttaccccatcagcagctaccgcatggccgtcaaggtcgccaagaagggtgacgagggtaaggtcggcagcgcgctggcccgcgagatcgaggaggaccccgccatccggttcgtggtcgaccccgagacgaagcagcagatcatcagcggtctgggcacccagcatctggaggtcgcgctggccaagctgaagaataagttcggcgtcgagatcacgctcgagaatccgcgcgtgccgtaccgtgagtccatccgcaagagctgcaaggcgcagggccgccacaagaagcagaccggcggccacggccagttcggcgacnnnnnnnnnnctggatccagttcgagccggtcgagggcgagggcatcgagtttgccgagaacgtgttcggcggcagcgtgccgaagaacttcttcccggcagtcgaaaagggcgttcgtcaggctgccgagcacggcgtgctggccggttacccgatggtcggcatgaaggccacgctgctggacggcagctaccaccctgttgattccagcgaaatggcgttcattatggccgccaaactcgcgtataaggccgccatccccgaggccggccccgtcctgcttgagcccatcggcgcattgaaagcccacgtccccgccgacaacaccggcgatattatgggcgaggtcacgaagcgccgcggccgcgtgctgggcatgaaccccgatgacgacggcctgcaggtcgtcgaggccgaggtccccgtggccgagatgcaggacttcaccaccttcctgcgccagctgacccagggccgcggctacttcacgttcgagttcgtccggtatgagaccctgccgcagatgctcgagaacaaggtcatcgagcaggcaaaggcattgggcaactttgcggatgaggattaaatcgtaaataaaagcacctgctgaccggtatgcgtgtgaccggtcagcaggtgctttttggttgagatattgaaagcttctttgcttactttcttctcgaagaaagtaagagaaaagggagcctgcggaaaggtgccaaagcccctccggcctcgcaggctcggccagtccttcggacccgaacccctctgtcgcttcgcgacatctccccacactgtggggagtcaccctcgcagagggggccaaggagttttgtgacaaacgggggggggggaaggcttatttcttttcactgtgccaatgatgcacggtctgcagctggaactcaaagtcgcgggcatccttggcaagctggctcgagaggatgatgcccgagataaacagcagcagcgccgccaccagcacaaagcagcagacgatcaaagtcgggaagcgcggcacaaggccggtccggaaatactcgcccagcaccgggatcataaagccgatgccgaacacggccaggatcgcggccagaatgccgaaaaagctgaacgggcggtagttcttgaacagccgtgcaatcgtgcccaatactttaaagccgtcggagtaggtgttcagcttgctctccgacccttccggacggtcacggtagtcaatgacaacgttttcgacctgcatgttgcgctgcagggcgtggatcgtcatctcggtctcgatctcaaacccgcgggacagcacgggataggtcttgacgaactggtagctgaacgcgcggtagccggtcataatgtccttgatcttgccgccaaacaagtgatttgtgcagaaccgcaccagatcgttgccgaagttgtggaacgggcgcttgttctgggtgtagtaggtgctggacaggcggtcaccgacgaccatgtcggcctggcgcccggtcacggcagcgaccatctcgggcgcggcctccgcagggtaggtgtcgtcgccgtccacaagaatgtacgcctctgcgtcgatctcgcggaacatgcggcgcatgacattgcccttgccctgctggtactcgtggcggacaacggccccggctccggcggccagctcggcagtgccgtcggtggaattgttgtcgtagacgtagacggtggcgtcgggcaggacgcggcggaaatccgagacgaccttctcgacagtcttggactcgttgtagcagggaatcagaacggcgattttatccataataacaggacctccgggcggattttacatccagaattgaacaaggcggctgacggtgtagtaaagggaaggattcatgccctgcagatacggctccatggcgaagagcgtgcagaagcggtagatggcggtatatgccacagcggcggccatgacggtgcgcagtgcgggcagcgccgcagcggcagtgccctcccccagcgctgcgcggcgggagagtgcgccctcggcgcagaaccagcacagcgccgcaccaagcagcagcacggggctgtaatccattagataacggtagagcaccccggccatctcgcagtcaacaacggtcatgacgaccatgacggccgggctgccgtagaccacacaggcggtgacacggcggcggtgcagacagtggcggaacgcgggaagcagcggcagcgccagcacccacaggtacggcgtggcggccagaatgccgcccgtgaacttctcgctgatcgtgcggatgacggcgttcgtctggacgtcggtctcccgcaggaacgggaaaacaccctgccagctgggcagctcgaacagactcgtgaacacagccgggccgatgcgcacggcgttgaagccgcgctgggtcatatcgttgccggtcaggttgtagttggcgccaaagtcaaagggcgagccgaaccgcgcagcgttgtaccacatgagcccggcagcgaccagcaccaccggcagcagaaacgcggcggcctcccctgccccggcgcggctgcgcagccgcttctgcccgatgtaccgcggccagaagatgggcacggccaaaaacgcaaacagctccatctgggggcggcacccggcgacgagcgccacgcagaggctgccgaagacgagcttgacgaccagcgcaccgcgcttttccaccggcgtgctggcggcggagagccagagccaaagccccagcatcagcagcgccgcaccgcagaggatggcatattcataaatgtaggggcgcagcaacagatagtagaactgactgcccagcgctacggcggccacggccagcaggtacgctgcggcgggcgcccgcgggaaccaccggcgcacggcctgcccgacgacgccgaagcaggcggcgaggaagatcagccccagcaggaccatgcagggcgcataggccaggttctggatgccggtcagtgcctcaaacggcagctggaacaaaagacacggtacaatgccaaaatagacgtagtagcgcccattgtaaaaggcgtggtcccagtggatgtcgttgatttgcgcggcgtcgcgcgccccggcatcgtaggggttgtccagcgccagcagctcggcgggcgggtcggcctccaggtcaaggcgcccgttcagcaggctgtgcgccagcgcgccgtactgctggtagacgaagctgaccgtgctctctccgtcccagaacgcggtgttgtaatcttttgtggcaaggccggtgttgctcggctcccagaacgggatgaccacgacgaaggcagccagcacaaggcccagcacggcggctgcggcgcggtcacagacgttgcccgccagccagcggcggtgccacagcccgctggccgggcgcaggccgtagacggccagcagcgccagaaataccgcgcagaagcgcaaaatcgagaaatccagcgcgcgcggcgcgttggccgtgatgccgcggaaggtcagcgccaccgggaactgcgcgtaggtggagctgtacccggcagcggtcagcgtcagcatcccgacggagccggtcaggtccaagctgatgacctgggtgcgcggggcctgcagccccacctgccagctgccgaagcgggtcagctcggtgttggcggcgtcggtgccctcaatggtgaagatcacggcgctgtcggcgtggagcggctcggtgtcgtcgctgaccagaccgtcaaaccgcaggttgtagatgggctggtcaatgtcgagaaaccgcagataggtgcggccctcgtcgagcgagatcgtgccgacgccgcgcccgacgttgatgttgtcgtcaaggtaatcgacgagctgaaacggcgtgtagctgtgggtgttgaagtaggccacattgccgacgaacacctccagccccagcgccgtgacggccagcagcgggacgacggcctttaaccctttgcgcccgaggctgcgcagcccggcggtgacaagccccgcccagccggtcatggcggtgagggcgacgagccggaacgcatggaagccgacggtcagcccggggcggtggtaggcgcacagagcgaacacccagacggccagccagagcccggcagcccaggcagcgtcgcggcgggaaaccctgcggcgggatactaccgcaggaaccgcaccgaagatgccggagacgagcacggtgaggagcagggcgattataataaacataagaataatgctcctccttttgtgggatgggtgatgtggcagcgggaaatggccagagcccttccggtcatcgctggcgctcgaccacctcccctgaaaggggaggcttttttcgggcgtacgcccgtgaaaggcgccccacagggtggggagctggccgagcttgcgaggcctgaggggccttaccctgcgggagctgccgcttcactgctttgcatacttctccatctcgtgcagccagaactcggcggtcttgtcccagctgtactttttcaggactgcatcaagggtggcaacaggctatatggctagtgcagcggttccatcggtgaagttgttgcagagcctatattttttgcttgggttcgatatgagctgaattacaaagctgaaccagaaaacagctaagtgcgaaaaatgtaatagagagttcacgatgtgtgaaaccgaagtgaatataggagtgattctgtgtaaaatagtaccacacaaaaggcatacaagcaactaagcataaaggggagaaagctaaaatattatgcaaagtcaaacaatggcggtgtaaagccaatacgatagtaactaagaaaagaagaagccacagaattttccacgtacgtaaatcgtatgcctgaagattgttttttagggtagccatataggttatggtttgccccagtgtttcatgagaagaacggagaataatgctgttatatgcttcagaaaagaggttttcctgcaagatgacagaaccaagcaaccatttttctgcccagaaaccaatataaccaatgccccacgataaagagcaagttgtaatttggaaaaaacgttgagaaggagaacttgtctctaactgtaaatacagaatgagggggattcctaaggtaacaagcggatatgtcagaaaatcaaaataacttgttgccatgccaagtgataagaaaaacaaccaattaaatttatttattatatttgtatggcgtagaagaacaacacagccaatagccataatgagaaaacacggagtatattgaaggcagatgcctgtagctatcggggttaaagagcagaacattagtgccagaggaaaaagaaggtgagttaatgaatgacaggataacagatgagcaatccataacattaagaaaagctgaacaagcgtattcaagcgtaagatatctttgtaatccagcaacagaagaagtggtctcaaaatggccaactgaccctgccaataacgatcatatgggccgtgggcagattcgttggttgcactgagtgaagaaattagctttcgataagaccaattttcatctccctctggtggaaggacggaataaatggcggcagccttcacaaaaggactttcatttccatcatagatagcttcggataaaatagttgcttctgttaagtaatccaaatgcgtagctaaatcatcctttacgagggcaacagaaccgttataaaaaacatcaggtgtgctctctaagtgactgcgcatacgattagtgggcaggcagaacgcaataactaagaacaaatagcctaaaacagcccccaaaagcagccaaataacagtgataccgactttgcacttgaatgtaagtgaagcccctttggatgggggagaaataaatttcataggagttctcctagtttatggtttatgctgttactgattcgcgtacttctccatctcgtgcagccagaacgcggcggtcttgtcccagctgtactttttcaggacctcgtcgggcgcggccacgggctgggcggccagcgcgtcaagatccacatcataatcatacgggtcaaaataccgcgccgtatcgccgtacagctcgggcaggcaggtggcgttggccagcgcgaccggcgcgcccagggccagcgcctccagcggcgggatgccaaagccctcgaacacggcggggtgcaaaaacagcttgcagtgcttcatcagcgcggcgttctcggcatcggacacatagcccgggtagaacacattgtgggtgtccttcgcctcggcgtcgtcgccaaaggcacgcaggtccttgccgcccgcgacgacaaacgttttgtcggggctgcggcgggcgacctctcggatccacttgaagtttttatgctttgccagactgccgagggcgtagaagtactccccttttttgatgccgggcatcttgtcaaaaatgctctcgtcgggggttacgttcttcatgtgctcccagccgttgtaggtgatgccgatcttgtccagcgggatgccgagcttctcactgatgaggtgccgctggttgtcgctgaccgtgaacacccgctgggcgaaccatttggtggacaggcagtgtacccagaacttgaagcggaaaaagcccttgtcggtatccatgaccagcgggcggatgtcgtgcagcaccacgacgctgcggcgggtcagcagcatatcgctggcaaggcccacgtaaaacgcatgggtgcggcgcaggtaggcgggcagcacggccagattgtaaaaatacgggatggacttgagcggcaccagccggatatttttcagctccggcagatggatgggccgcccgtcgtcgcggtaggcaatgcggacgtccagggcggtgccctcgatcagcttgtccagccggacgacattctcatagacatagcgcgggatgccggtgatattgtcacacagtaccgtgccgttgatgacgatagggttcaatccaattcctccttctcccagtgggagcagtcgagcagctcctgctgccagtcggccatgcggcgcaggcagtattccttcagctcgcgctcaaagcgttcctcgctgaaggagcggctgtgctcacggatttcctctttggaacaggccacgccgtcgcgctcaaaccgttcgatgcagtcggccaggctctcgacggtctgctctttaaaccagtagccggtcctgccgggcagcacgctctcgcacgcgccgccgcggccataggccagcaccggcgtgcccgcgctctgggcctcgacgggggtgatgccaaagtcctcttcacccgggaaaaggaagcccttcgcgcgcaggtagtagctgcgcacttcttcgtcggacagaccgccgcccttgaactcgatggtcggcccggccatggccctgagcttgtccagctctcccccgccgccgatgacgacgaggcgcttgttaaggcgcgtgcaggcctgcacggccagatccacgcgtttgtaccaggtcagacggcccacggtcaggtagaagtcctccttttcgacaaaaggcgactcgttgatgtggcagcaggggtaaatgacatcgctgtcacgccggtaatattttttgatgcgctgggcgatataatgcgagttggcgatgaaataatccacgcggtccgcggcgcacttgtcccagatgcgcattttgtgcatctggccgggcatgacgagcttcgccagccagttggcgttggcgcggtaggtgtagtaaaaatcccacacataacggatcggcgtgtggcagtaacagatgtgtacggcatccgggcgggtgatgacgcctttggaacaggaggaggacgacgacagcaccagatcgtactcggtcaggtcgaacgcctcaaacgcgcggggcatcagcggcagcatggccttgtacagcctgttggagaagggcaccttctggaaccagcttgtgcggatgtcatagcttttaaagtgctcgggcatgtttttggggtcgtacacaagggtgtagatgacggcatcggggaaaacgcgcttcatggcgtccacaacgcggtccccgccggcgtagccgacaagccagtcgtgaacgatggcgaccttgggctcctttttgctcattacagacactcccgtccggtaacgcacagggcgttattgtagtttttcgtcgttgaccatcttgccgccgaacacggtgcggaagatgatcttgatgtccagcgccacggtccagttttcgatgtaccagatgtcgtagcggatgcgctcggcaatgtcggtgtcgccgcgcaggccgtggatctgcgcccagcccgtgcagccggggcggacctgctggcgcacaaggtagcgcgggatctcctctttaaaatgctccacatggtagggcacctcgggccgcggcccgacgagggacatatcccctttcagcacgttgaagaactggggcagctcgtccaggctgaacttgcggataaagctgccgaagtgggtcttgcgcggatcgtaatcggtggaccagccggtctgctgctgcacattgacccgcatcgagcggaacttgtacatcatgaagggctttttgttcaggccgatgcgctcctgcctgaagatgaccggcccggggctggacagcttgacgccgatggccgtgaccagcatgaccgggctggtcagaatgatcaggatcaggctgccgataatatcaagcccgcgcttgacagcggcgttgagcagattgtcaaacggcgtctgccgcacattgatgagcttgcactcgtccagcacgtcaatggtgggccgggcgggcagatagtcgctgtagaacggtaccatcgtgatgcgcacgccgtttttgtcgcaggcggcaaaaacgtggggcagcaattcgatctcgtcagcctccagcgctacgacgacctcatcgacggcaatctcgtcgagccgggcggacagcgcatcatagctgcccatgtagcgcacaccaagacccggttcttcggttccggccagatagccgtccacgacaaagccgtagtaggggttgtgctcgagcgcgcgcagatagagcgcggcggatttaccgccgcccaccagcaggatatggcgcaggcccagccccttgcgtcggcgggcgcggtctacccagcgcaggaccatacgctcgatcacgacgcctgccgtgccgaggatgtagaacagcgccagtacgatacgggagtagtcgtccaggtgcatcagatacaaagcaccaatgaagatcagcagtcccgccgcgttgatgacggcaatcttggtgcagcgctcggccaggccgcgcagccgcgtggtgctgtagataccggcgacccagtagatgagcacgagcaccagcgacgtggccagcccggcaatgatgttgcgcgggtcccgggccacggccagcgcaggccctgcgccgcccggctcaaagtagcggacgtaattgaaacggatatagttggcaagcaaaaagccgatgaaaagcagtgccgcgtccgccagcacatacaaaaggcttttgaagcgttggttcttttccagcaagaggtgatgccctccctacggtgatagatttaaacaatctattttaccatatttacgccggtattgcaaatcagcggtaaagctcctgcagctgatccagcgttttcttcatttcggcgcggacctccggcgggccggagacgacgacgccggtgccgaacccggccacccagccgaagaactgcgggctgacctgaatctcggcggtcatcgtaaagtgttcgccgtcggcgcagggcgtcaggatcggcgcggtgccgaaccggtcgatcatcgccccggcaaagcggttctcgcattgcagcgttacccgcttgagcgggccgttgaacatgccgaacatctgctgcatatacgtattgacgtcgaaattagcgtattccccggcgccctcgcgggtcgtgtcgggcagctggtgaacgttctgcatcttgtcgacgcggtagtgcttgagccgcccctcggtgtaggcgatcagataatagttgccgttctcccacacgagcacccacgggctgacgcggtagagctggccgtcgtggcgcgggaccatccgcttttgcaggttccagtcgcagtatttgaaggtgacctgctcccctgccgtgatggcggcgtgcagcgcatcgacggtgtacagaatcttctcgtcggtgctcttgatacgcccgctgaccagtaccttacggtccagctcctcctgccggtatgtggaggtgaactggccgagcttgtcgatcaggatcttggatttgcgcgccgtgatgaatttgctggcgtagacggcatcgacgagcagcttgagctcggcaagctcaaacggagcctcggtcatatagtagccgccgccgcgcccgcgctgctgcacgatctcatatttggtgtcgggcaggttgtttaaggtgttcaggtcatcgtagacgcttttgcgctcggcgacgacgccgtgctcctgcaatttttccacaagctggggaacactcaaggggtgcttctcgtcggtttcccgggcgaggatctccaaaagaacaagcagtttgcgtttctggccttctttgcgcgacataacagcggctcctttcctgagtctggcagatatagtcctattatacaccctataggggcgggtggcaagaccgggaacggctgcctcccgggaggtcctacttgtgaccaaaagaaagcagcaaagaaaagtcccgctgttgcggatgcggtgcggggttgtgcgccgccaagcgcccccgaacccccgctgcagccttcctctgcctgccgcctttcggtccgcagccttaccgccccagctcccctaaaatccaccctagatcttgaaacagatcccccggcagcatggcggtcatgctgcggcgcttggcgcagcggtctgcagcggcgccgtggagccataccgcgcagagcgcggcgtcctcgggcgtgcggccctgctttagacccgctgccagcagcccggcggtcagaccggctaaaatatccccgctgccgcccttggctaacccggcattgccggtctcattgcgccagaccgtgccgcccggcgcggcaaccagtgtgtgatgccctttcaaaacggcgacgcagtgatatttttcggccagcgatacggcggcaccctcgcggtccgcctgcacctcgggcacagtcaggcccagcagccgcgcggcttcgccggggtggggcgtcaggatcgtgtttgcgggcagatcccccctgtacttccccgctgccagtgcgttcagtgcgtcggcatccagcacggcaccggcccacggggcgttcctgccgagcagggccttacagacatcggcggcgctctcccccaacccgggcccggccagcaaaacggcgtgcctgtccgcgaaccagcggcgcagcgcgtcggcgtcctgcgggtggatgcccccgttggccgccgtgcggcagccgcaggcgcagcattccggcgtgcgggaaagtaccagctggataacaggctcgacgctggccagatacaccagcccggccccgccgcgcaaagcgccctcggtgcagagcgccgccgccccgcggtaggccatgctgcccgccgcggccagcacactgccgtagctccccttgttgctctccgccatgcgcccgggcagcagccggcgcaccagctcccgtgtgatttcgcgctgcatcttgcatccctccgaaaatagattataataggtatattataaggcataaaagccaaaagcgaaaggggtagtttgcatggttccggcattagaggaaattctggcagcaacaaaaagcatggtctttttcggcggggcgggcgtctcgaccgagagcggcatccccgatttccgctcggtggacgggctgtaccaccaaaaattcaagtacccgcccgagacgatgctctcccacaccttctacgagacccacaccgcagaattttttgacttctaccgccagaagctcatcgtccacggggcaaagcccaacgcggcccacctgcgtctggcggcgttggagcgcgagggcaaatgcaaggccgtcgtgacccagaacatcgacggcctgcaccaggccgcgggcagcaagaccgtgtatgaactgcacggctcgaccctgcgcaactactgtacgcggtgcggcaaattcttcccggtgcagttcattgaggatgcggcgggcgtcggcgacggcgtgccccgctgcgacgagtgcggcggcatcgtcaagcccgatgttgtgctctacgaggaagggctggacgaggagacgatggaaaacgccgtgcacgccatccgcggggccgacaccctcatcgtcggcggcacaagcctggccgtctacccggcggcgggtctgctgcgctacttccgcggggagaaccttgttgtcatcaacaagcagcccaccccggcggacgcaatggccaatctgctgatccacgctccgattggccgcacgctggaccccgatgcccccgttgaagtgtagaaattacacaaaaatccatgctttttttaaaaaaggcattgcaaaacgccgtggaattttgttatgatagattcatattgagtttataggcagagttgatagagggagacggtttttatggcaaatgcactgacggattttaccaagaaacgtgaatttctgatttgcatggattccgacggctgcgtgatggacacggtgcgcatcaagcattccaccgtcatgtgccccgagctcatccgcgtgtttgcgctggatgaccacgcggatttcatcactgccgcgtgggatgagatcaacctgcacacgatcacccgcggcatctcccggtttgagagcgtccggctggtgtttgaccggttgaaaaaccgcggcatcgagatcccgggcagcgaggatattgccgcctgggtcgataccgcgacggagctttccacggccagcctgcagcgggagctgcaaaagaccggcagcctggccctgcgcaagctgcaggagtggaacaacgcctgcaaccgccgtattcaggcgctggagccgacgtttgagccgttccccggcgtggaggaaagcctgcgccagctgcacgccgtggccgatgtggccgtcgtcagtgccgcgaacgagagcgccattgccagcgagtggaagcgctacgggctggcccgtcatgcggatgtcatcttcgggcaggaggtcggcagcaaggcaaactccatcgccacaatgctggcctgcgggtatgagagccgcaaggtcatgatggtcggcgacgccatgggcgacgcccaggcagccgctgccaacggtgtggcctttgtgccgatcctgccgggccgcgaggccgaaagctggcgccgcctgcaggaggaggccctgcccaagctgctgcacggcaccttcagccccgcctaccaggccgagctcctggccgccctgagaagtgcgctgcacgggtaaaactgcgcttgcctccctttgcgggggaggtggccaagaaaagacaaataaagagatcggaagagcgtcgtgtagggaaagagtgtagatctcggtgggcaccccgccctacatccatgccaaaaaggggcagcggagatattcccgaaaaattccgaaaaggagccgacacatggaccttttacagcaagcccgtgccgagatcgacaccgttgatgccgagatggccgctctgtttgagcggcgtatgcgcgcggtggccgatgtggtgcgctacaaggccgagaccggcaagccggtctttgatgccgcgcgggaggccgccgtgcttgacaaaaacacggcccgcatcaccgatgaggcgctgcgcccctactaccgcgcctttctcagcgatgccatgagcatttcccgcgcataccagcgcgcccggctgggccgcgataccgccgcctaccaaggcgtgcccggcgcgtggagccacattgcgctgcgccgccttttcccctttgcgcgggagacggcctgcaccacctggggcgaggtctttgacgccgtgcagaacgaggatgcacaattcggcgttctgccgtttgaaaactccaacgcgggcgatgtctccaccgtgctcgatctgctgtacacccaccccgatattatcattgccaggatgtgcgacctgccgatccggcaggacctgctgggcgtgccgggcgcgacgctggagacggtcaggaccgtcatcagccacccgcaggcgctggcccagagcagcgtttttgtacagcagcacggctttaaaacgtccacctggggcaacaccgccgacgcggcccgccatgtggccgagctgaacgacccgagcgttgcggccattgccagtgccgagaccgccgggctgtacggcctgcagatcttgtccgcgggcatcaacgccgacggcgacaacacaacgcggttcatcgtgatcgagcgtgccgccgccgcccccgccatgaccggcgagggccagcggctggcgctgctgttcacggcacgccataagcccggccagctggccgcagcgctggatcagatcggtgcgcggggctttaacatggagtgcatcaagagccgtcccctgccccatgttccgtttgaatactatttctatgtacagatcgtctgcccggcgggcagcacgggcgcggggtgccagaccctgctggacaccctgacttctgtttgcagcaccctgcggctgctgggtgccttcacccttgacagtacggagaaataagccatgaagaaaaaggatgtgcgaagcatgaaactgacgatgcagcttaaaagccgcagctacgatattattttgaaggctggatgccttgccaacctccatcagttcacgaacgtggcaaaccgcaaggtctttgtgctgaccgactccggcgtacccgccgagtacgcgcagaccgtggcggcccagtgccccgattccaccgtctacacgatcccccggggcgagggcagcaaatgcctgaaggtctacggtcaggttttgcaggctatgctggcgttcggcatggaccgcaaggatctgctggtgtccgtcggcggcggcgttgtgggcgatctgggcggcttctgcgcggccagctacatgcgcggcattgactttgtcaactgccccacgacggtgctttcgcaggtggattcctccatcggcggcaagacggcgattgatttgggcgagacgaagaacatcgtcggcgcattctggcagcccaaggtcgtgcttgtcgattttgacacgctcaagaccctgccccgccgtcaggtcgtcaacggcctggccgaggcgctcaagaccggcatcatcggagacccgcagctgtttgcactgtttgagtgcgagcaccccgaggataacattgaacaaattgtttacagaagtctgaaatttaagaaaaagatcgtcgagcaggacgagcgcgagggcagcgtccgcgcctgcctgaacttcggccacaccatcggccacggcatcgaagccgtgcgcggtgtgcggggccgccgtaccacgggcctgtaccacggcgaatgcgtcgcgctgggcatgctgccgatgatcgaggacacggccctgctcaagcgcacccgggcgatttaccgcgcgctgggcctgcccacccgcgccggggccaacaagaagaaggtcctggcctacatgcagcatgacaaaaaggcccgcggcgaccatatcacggtcatcaagtgccccggcctcggctgctggcgcgccgacagtctgcccatgaccgagctgccggctttgttaggtatggaatgagggaaacggcatctggcggcatggctctctcccccaccggcctgcgggccgagggccttgcctccctctgcgagggagagagcttgccgggattgccatttttccattcatagaaaaatcgggaaggatatatgaaaaacacctttggaaatgccgtcagtatgacaatttttggtgagagccatggacctgccgtgggggcggtgctcgacgggctggccgcgggcctgccggtggatgaggccgcgattgccgcggccatggatcgccgccgcgcccgcggggatgggctttccaccgcccgcaccgaggccgacgccgtggagttcctctccggcgtgtatgagggccgcaccaccggcacggccgtcaccctgatgatccgcaacctgaatacccgcagcggcgactacgccaaaaccgccgacctgctgcgccccggccacgccgactacacggcctacgccaagtacgagggctttcaggacgcgcgcggcggcgggcacttctcgggccgcattacggcggcaagcgttgcggcgggcacgatctgcgagacggtgctgaacggtctgggcgtaaaggtctacacccatattgccgagtgtgcaggcgtgcaggacgcaccgctttccagcgctgcggggctggtcatgcctgacccgcagcccggacactttgcgctgctggatgcgtcgaaggaggaggccatgcaggcggctatccgcgctgcgggcagcgagggcgacagcgtcggcggcattctggaaacgattgtgaccggtctgcccgcgggcatcggcgagccgtggttcgacagcgttgagagcgagctggcccacctgatgttcgccatcccggcctgcaagggcattgagttcggcgcgggcttcggctttgccgcaatgcacggcagcgaggccaacgatccgttcacgatgcgggacggcaaaatcgccaccgccacgaacaagaacggcggcatcaacggcggcatcaccaacggtatgcccatcgtgttccgcacggtgctcaagcccacgcccagcatctataagcaacagcataccgtggattatatcggcaggaccgatgcggagctgcagatcaaggg

SEQ ID NO: 491 - DNA, 7851 bp, unidentified
  source 1..7851: mol_type = unassigned DNA
aaccaggaggttgccaaatatcctaattattcagtgcattacgctgttaaagccaatgccaacccgaaagtacttaccattatccgtgagagcggaatgggagccgattgtgtgagcggcggagaaatccgtgccgctatccgtgccggattccctgccgataaagttgttttcgcaggagtcggcaaagcagattgggaaatcaatctcggactggagtatggcatcttctgtttcaatgtcgagtctatccccgaactggaagtaatcaatgaattggctgctgctcaaaataagattgctaatgttgctttccgtattaatcccgatgttggcgcacatacacatgccaatataactaccggtttggcagaaaacaaattcggtatcagtatgcaggacatggacaaggtgatagacgtagcacaagagatgaaaaacgtaaagtttatcggtcttcactttcacattggctcgcagattctggatatgggtgattttgtagccctctgcaatcgtgttaatgagttgcaggacaaactggaagcacgaagaattttggtagaacatatcaatgtaggtggtggtttgggtattgattacggacaccccaaccgtcaggctgtcccgaatttcaaggattactttgctacctatgccggacaattgaaattgcgtccttatcagacattgcattttgagctgggacgtgcagtggtaggtcagtgtggttctttgatatccaaagtcctctatgtaaaacaaggaacacggaagaaatttgccatccttgatgcaggtatgaccgacctgattcgtccggctctgtatcaggcattccataaaatggaaaatattacttccgaagaaccattggaggcatacgatgtagtaggaccgatctgtgaatcgtcggatgttttcggaaaagcgattgacctgaacaaagtgaagcgtggtgacttgatagcccttcgttctgctggtgcttatggtgaaataatggcttccggatacaactgtcgtgaactgccgaaaggatatacttccgacgaactggtgtaagtaaaaaatgaaccgctacaatcaaaatgtgaatgtagtttaaaaatatagggtgcatggaacaattttaactgaaagcgtgttatttttgtaatgagttcaaaaagaaactacattaacaacttaataaaaaaatacgattatgatttcagaaaaattacagaatgcaattaacgaacagattactgctgaaatgtggtctgctaacctgtatttagcaatgtctttctattttgagaaagaaggtttcagtggttttgctcattggatgaaaaagcaatcccaggaagaaatgggacatgcttatgcaatggcagattatatcatcaaacgtggaggaactgctaaagtggataaaatagatgttgttcctaacggatggggtacacctctcgaagtattcgaacacgtttacaaacatgaatgtcatgtttctcaattggtagacaagctggtagacgtagcagctgctgaaaaggataaagcaacgcaggatttcttgtggggatttgttcgtgaacaggtagaagaagaagctacagcgcaaggcattgttgataaaatcaagaaagccggtgataccggaattttctttgtagattcacaactgggacagcgttaatgatgctactctgaaaaatagttctttattatacatagaagctgcctgaatttttgttcagacagcttcttttttttcacttatttggcttatgttcgaaaataaactacctttgtattacgagtcagagagaaattaatcccgattattataaatgaatggtgtgaatagaggaatttttagattgctccctatatttttattgctctttttgggggtgagcagttgttctcaaaaagaggaacggcgtattttagttatccactcttatgaggagacttacgcggcttatccggaatttaaccggatgatagcggagcaatttgagaaagagaaaatagatgctgatatccgtaccgtttatttagattgcgagtcctattgggaagaaccggagttggaacgaatgcgctttctggttgattccgtttcgaaagactggcggccggaagtgattctggtgaatgaagaccaggctacctattcattgatgaaatgtggggttcagttgggcaaagaagtacctgtggtttttggtggtgtcaattacccgaattggggcttgctgaaacgccatcctaatgtgacgggtttccatgataagatcgcctttaatgaaaatgtcagtgtggcaaaagaacttttcggtgaacacgtccggttgtttaccatgctcgataccacttatatcgataaacaaatcagaagagatgcaaaggaacagtttaaaggtcataaagtgaccggattcatcgataaccccgaactttctcttgaagaacagatacgtttaacgcaggaggaaggttatactcgtttcatggctattcctttacgtaatgccagaaatcattcggacgccacctttatgtgggtgttgaacagaagctatcgcgatcaatgttatattcagctgaaacgtgattatactaccattaatattggaagcatctgtggcagtcccagcttgacagccatcaatgaagccttcgggtttggtgagaagttgctgggtggatacatcacttcgttgcctattcaggtggaagaagaggtgaaagcagccgttcgtatattacacggtgcgagtccggcggacatgcctattgttgaaagccggaaagagtatgttgttgattggaatacaatgacgcaaataggtttgagtaaggaaagtattcctgctaaatatcgtattatcaatattccgtttagtgataaataccctttgttgtggggaatttcagtcgcatcgttcattcttatactaattattcttttcgcttctctttggtggctataccttcgggaacagatgaggaaaaagcaggctcttatagcattggctgatgaaaaagaaacattgtcattagccattgagggtggaatgacgtatgcctggagattggataacggttgttttgtttttgaagatgcattctgggcgtcgcaagggttaaatcccagacaactttcgtttaaggaattcatgagctttatccatcccgaccattgggaaggagtgaagttcaactggcgaaatctgaaaagtgctcataaaaagattgtgcaggagctttgtaacttcgacggcaaaggctatcagtggtgggagttccgttataccaccaaacagctacctggaggcgaatataaaactgcaggtttgttgcttaatatacaggatataaaagatcgtgaagaagaattggaagcagcacgcttattggctgaaaaggcggaattgaaacaatcattcctcgcaaatatgagccatgagatacgtactccgcttaattcaatcgttggctttgccaatatactggcattggaagatggattgagttccgtagaacgcgaagagtatatcagtactattaacaagaacagcgagttattactcaaactgattaatgatatcttggaactttcccgtatcgaatcaggatatatgtctttctcattcaagagatgcaaggtgagagagttgattgacgatatctatatgacacatcaggttctgattgctccacatttggaattcctgaaagaagtggataatacacctttggaaatcaatgtggacagagagcgcttgatacaagtcctgacaaactttctgaataatgccggtaagtttacggaaaccggatatatcaaattaggatatagttatctgccggatgaaggcaaagtacagatttatgtagaagataccggaagagggattccacgagaagaacaacggatgattttcagccgtttctacaaacaaaacgaattttcgcagggagcaggattgggactttctatttgtcaggtgattatagagaagctgggtggaaagatcgaactcaagtccgaggtaggcaagggaagccgctttacggttattcttccttgccgggtggtatcttgataatgatagactttaacgggaatacgaacaatcttatttcttgtgttttcctttctccatcgttcccaggtaaatctccagtgaacgggtggaaatctgtatttcgcggaaagatacgcctaaagaagctatcagcagaatcaatgccaatccgaatacataagcagagaataattgaagcccgatataaataaggaacatgctgactacacagaaaaaaaggcttgcaatacctagtccttgcatcctacgggtcaggttcaaccgtttccgtagattctcgatttgcgcttcagtgatatccgaagggttttccatgtagcggtcacgcagttggcgcacaagttgggcatacgataagaaacggttggtataagccagcaatatcaatgaaactgccgagaaaagtagggcaggagtagtgagagtcaattcttccataatcttttttttatagtcaagtagcggttcaaaattcattttataaaagagatttttttggcacgggttacatggatttcacggttttagaaatatgcttgcataaagcaacagcgtaatctgtgtaatccgtgcctaaaaatggatgctgcaagtaaaccttgccccggagttattccgttttcagcacattaagctctttgcctaccttgataaaggcagcgatgcacttgtcaagatgtgctttctcgtgtcctgcagagatttgcacacggatgcgtgcctgatctttcggcactaccggataatagaaacctgtcacatagatgccttcctcctgcatacgtgcagcgtaaatctgggacaacttcgcgtcatacaacataacggcacagatagcgctttgtgtcggtttgatatcaaatccggcagccgtcatcttatcacggaagtagtttacattctcaacgagtttatcatgtaatgcattgctctctttcagcatcttgaaaacttcaaggctggcaccaatgatgcccggagccaaagaattcgagaacagatacgggcggctgcgttgacgaagcaaatcgataatctctttacgaccggtggtgaaacctcccagtgcaccgccaaaagccttacctaatgttccggtataaatatctacccgtccatgagtcttatacaactcgcttactccatgccctgtggcacctaccacaccggcagagtgtgactcgtccaccattaccagtgcatcgtatttctcggcaagatcgcaaatctgatccatcggagctacattgccgtccatagagaacacaccgtccgtcacaacaatacggaaacgttgtgcctgcgcttcttgcagacatctttccaagtccttcatgtcagcgttagcataacggtagcgttttgccttgcaaagacgtactccgtcaatgatagaagcatgattcagagaatccgagatgatggcatcctcttcagagaaaagtggttcgaatacaccgccgttggcgtcgaaacaagcagcatataagatcgtgtcttccgtctggaaatactccgagatggcagcttccagttctttgtgtatatcttgcgttccacaaatgaagcggacggacgacattccgtagccacggttgttcatcatttcttgcgaagccttaatcaatcgcggatgattggataatcctaagtaattatttgcgcagaagttcagcacttccttaccttttacagtgatggcagcttgctgcgcactttcaatcagtcgttcttctttataaagtccggcttccttgatttcagccaatgtttggcagagatattcttgcattttaccgtacatagtgtttgggtgattaagttatattgcaaaggacacaatttttcttggaataacaatgtctttttgattaaaatctgaaaaaaaagtgcttactttgcgcactatttaagcttgatattctaagtcagaagaaaaaatggaacacattttgattattggagctaccggacagatagggtcggagctaacgatggagctacgtaaacgttacggaaatgcaaatgtagtagcaggttatattccgggtgcagagcctaaaggggaattaaaggagtccggaccgtcagcaattgctgatgtaacggatggagaagcgatcgcatctgtggtaaaagagtatcacatcgatacaatttataatttggctgctctgctgtccgtagttgccgagtcgaagcccaagctggcctggaaaataggtatcgatggattatggaatgtattggaagtggcacgcgaacaaggatgtgcagtgtttactccgagttctatcggttcgtttggcgctagtacgcctcatacgaaaacaccgcaggacactattcagcgtccgcgcaccatgtatggagtcaccaaggtaacgaccgagctgctaagtgactactattttaataaatatggtgtcgatacacgtgctgtccgttttccgggcattatttcgaatgtgacccctccgggaggaggtacgaccgattatgctgtcgatatttattactcggcggtgaaaggagaaaaatttgtgtgccccattaagcaaggcactttgatggatatgatgtacatgccggatgcgctgaacgcagcaattacgctgatggaagctgatccgacaaaattgatacaccgaaatgctttcaatatcgcctcaatgagtttcgacccggagacgatttatcaggctatcaggaagcatgtgccgcagtttgagatgatctatgatatagatcctttgaaacagcgcattgccgatagctggcccgatagtctggatgacacctgcgctcgtgaagagtggggctggaagccggcctacgatttggaaagcatgacggtagatatgcttgaaaagttaagagagaaactaaaataatgaaaaaactaattgtaggggtcatgttgctcggtatactgggtgcttgtggaaacaagaaaacaaacattgaccccttcgcatctatcacaaaagaagtggattctatccggcgggtagccgattctattcactgtgatgaatcgccggaagatccgcaacctatacaggcagatgaatctttcgatgattttatctacaattttgcttccgatgacgtgttgcagcgtcagcgtgtgaaatttccgttgccttactacaatggagataaaaaaacgaatatcgaggagcataactggaagcatgatgacttgtttaccaaacagcattattatacgcttctgtttgatagagaagaagatatggatttagtaggagatacctccctcacttccgtacaggtagaatgggtgtttgtgaaaacacgaatggtaaagaaatactattttgagcgtatcaaaggtgcatggatgctagaggcaattaatctgcgtcccattaagcaaaatgataatgaaaatttcgtggagtttttcggacactttgccgcagatagtctttttcagagtaagcgtgtgtgtgagcctctggcttttgtaaccaccgatccggacgatgatttctctattctggagaccaccctcgatcttaatcagtggttcgcttttaaaccgggacttcctgccgatcgtctttctaatatcaattacgggcagcggaatgacgatgattcgccaacgaaaattctggcgttgaaaggtatcggtaatggtttttccaatatcctctatttccgtcgcaaagccggggaatgggaattgtataagtttgaagatacaagcatttga

SEQ ID NO: 492 - DNA, 23234 bp, unidentified
  source 1..23234: mol_type = unassigned DNA
  misc_difference 14105: note = a, c, g, or t
  misc_difference 14106: note = a, c, g, or t
  misc_difference 14107: note = a, c, g, or t
  misc_difference 14108: note = a, c, g, or t
  misc_difference 14109: note = a, c, g, or t
  misc_difference 14110: note = a, c, g, or t
  misc_difference 14111: note = a, c, g, or t
  misc_difference 14112: note = a, c, g, or t
  misc_difference 14113: note = a, c, g, or t
  misc_difference 14114: note = a, c, g, or t
tgttcctcacgggaacattgttagccggtgtcggttgtaaagactacgacgacgatatcgacgacctgaaaggtcagatcaacgacttgaaaggtcaagtcgagttgaaggccgacgcttctgcccttcaagttgttaccgacaaattgaatgggatagatttctcgtctttcgttaccaacagcggcctccagacagaactcgacaaaaggctggcagactatgccaagaagtcggatctgaaagattggctgactagcgatgaggtgttaaaacttattcaggctcagggatatcagaccaaagatgaagtccagaagctgatcgatgaggcgaccaagggtcagttgactgccgctgatgtcgagaagatcttcgagacgatgatcgcttcggaggaaaccatgggtaaactgcaagccggaattcaggagatcatcaagcaggctctgatcaagggtgagtatgttaccgaggagcagatgaggctcttcgtcgagggtaaaggttacataaccggtaccgatcagttatcggcgactcagatcgatcagatactcacggctgttgccaattccgtatcttcggagacggccactgtcaccgatgccatcaagaaggttctcggcgacaacttcgctacctatatggctaactacctcgacgacgagacggttaaggccgagatgggtaaggccatcaccgatacgatcctcaaagagctgaccgatgccaatgtaaccctgaaggcggctatcgagtcgatgattcaggacggtatcaacgacgagctctatgattcagaaggtaaggccatctacctgaaagaagccgatctgaaggagcgtttcgaaaattatgatgcgcagatcaagaatctctggagcgctgtcgagaatctcgccggccgcatccagtcgctggtttatgttcccaagagcatcgatggcatcgccaacttcggcggtatcgttgttaccgcaggctcggagaccatccgtctgacgacgggcgccaagagcgagatgaccttccttgtttcgcccaaaacgctggctacgcagctcgccgctaagcacaatgcttcgaaggatgtattctcgttcgttcccgaaaaggttacgcgtgccgaggcacccaagttcgagatcgaaggcgatgttgtcggctccgctgacggtaagatcacgatgttcgtaagcacggattatacttaccccgccgcagctccttcggatgctgccgagacctatgctatcgcgctgaaagtaaccagcaaatcgtcggttgctaaggatgaggatacttcggtcgataccggtatcgaatatactaccgcttacattccgacggtaggtgacgactataacgctatcgccaatatcgttctggccaaagaagagggcgaaggcgatgcgaaaaaactcgtcgagatccccgctagcggtgccgagtacgagatggtctacaaccagacagaaccgctcacgatgctcagcgagtactcgttcgcctacaagatgggcaatacgatcatttcgctcgataaggctgccgagcagggtaactgggatgtcgagcttgatgctaagcccgtatacacccgcagcagttggactgttgcttcgggtatgacgaaggttgttttcgatcccgccgatccgatgaaggatgctgcggccaagagccagctcgtcaagatcacgatccaggaaggcgttcccgccaacgtagacaaaacgatcgtagatgaggtgacaaccgctatccacgctgtcggcgagacggagaacgttgcgacgaacggcgccgctgcctacaccgcaaagactacacttacgcgcttccagctgcctgccatcgaaaacctcaatgccagcgctacatggaattactcgatttactcgacgaatggcgcttatcttatccagaacatcgtctttgatgctgccggagctaataaactcaccaaggctcagtacgatcagttcaaagcatcggttcaagccgacaacacatggaccgtcacctacggcgacgaagccggaacgcttaaccagggcatccagattcagtctgtaaacctcccgacgatcaacaccaatggcgacgccaagttcttcgactattggattggtggttacaagggtggttcgggtacgctcgatatcgagaagaccgtaactctcggtcaggccgaggagattacgctgaagggtaagatcaccctcacgggtctgccttctgatctcaaatacacgctgaatatgcccgaggccaagatcagcaattatggagcacaggtactgacggtaatcgctcaggaaaactttgcggaaaaagccgtttacgaactgctgcccgaagatcagaccttcttcgccgatgccagtgaattcctcgctttcatgcgtcagagcaccaaccccggcgaaatgaagaacaacgagcagaaaaacgccacgacgcaggctctcgaagcagccgttcgttacaatggaatcggtaaggcagggactagttacgaccgtctgtgcgtagacttccagcgcagctatgtggacttcgacaatgccgagtcctataccttcacggcacctgagggcgcttgctacacgatcgccgatgcagtcttctcgatcgcaatcgaaggcagtgtaacgatcaacaaggatcagggcttctatctggccaagggtaccagcgtcaatgccgagggcaacgtagtagtcatgggtacggcagacaagaccggcaacagcttcacggtcgaaaccatcaccctgaccaatgcctacaatgcggcttatcccgacggtaccgatgcttcgaagatcggtctgaagttctctctggctgcaacgacgcctacggtaactccggtaccgacgattaccaacggaactaacgttacgtcggatgcatggacgatggattggaacggctgcggtctgaattccgtaggagtagttgccgagatgacttacgaggggctgcccatcgcttcgaagactttcgaggttatccttaccaacccgatcgacatcgcaagctggggtacaaacttcaatgagcttgcaacgccgatagctgtcaagacggctgcaactgtcaacgtttacgagaaggtactggccgctaaaaactacggcaatccgaaacatatgctcccgcgcgacatcttcggtaatgatttggttgatgcaagcggcgtaacgactttcgctacgggtgcatacggcttcgaggttaagttcggtgacgcatcgtattcgagcgtcgtatctggcacggaggacttctcgcgcttcaagttcgatccggccaccggtgaaatgactgttgctgcttccgacgacctgctgggcggtaaagtaacagctcagattcaggtaaccttcacctacaagtattcgctggatgcaaccaagcagtacgcagagaaggagtacccgatgaacatcacgctgacgttcgagaacaaaaaataattattgaatccctttcccgcggaatccggcgctgcctcgcagcagcgccgggaacccgggaaatactccctaaggcaggggtcgcacatcccaaatttttttggtaacaacaactcccactttcaagtaaaactcctgcctgtggcagaccgaagaggcgcggtctgccgctttttttatgcccggaagtttccctgcgttctctcgatccgcattgtgggttcgttatcctggagcccggttttttcggggggaggtttttgtacggctcccgtttcttgtgtggttcgcggttctcgcgcggattgcggctttcgggcgatcgctaggctgcaggcacggaatgcccgggcatcttatggaatatccgtcgttgcatcgggcagcggcggatattcctgccttttacgggcggttgtttggcccatctggagactgatggacgaaaaacagccgggatcctcggatcccggctgtttcgctattcggttggtgtgtcgtaaatttttcttttgcccgttattttgcctttgcggcctttgccgccacagccttgtccagttcgatgatgaaatccgagaggacgttcatgtagttgatgaaagcgtcgtaggccgaatcgtaggggttgaaataggagtgtacgtcaccgtccgagagccatttggtagccatgtagtagaaatggtcggaggtctgcatgaaactccacacatagtcgaagtcggggcttttcagtgccgcgatcttctccttctgggcgtaaagcttcgagaacgcttcgttctgcaactcgttgccgagccatgccgtcacgtcgcgctcctcgtcggcccacgacatcacgtgcggacagtggagtactgctacgggctggtgtttcttggcggcttcggtgacggtcgcgaactccagaccgtttttcttggcgaggattgccttcggcagcgcgcgcatgaactcgaagattcccgtgtcggcggtctggtgttcgccgaaagtttcatagtccatgaagaggttgatgacctcgcccggagtctcgtccgaagcgagccattttacatatttgtccgccgtcagcggccattcgttccaactgcggttcgagaagcggaaggcgatgtcgtccgagagtttgtagttgcgcagcagcaggcgcagtttctggttgacggcgttggcgtatacatagttgggcgatttccagcccagcacgtgcttggcaccttcggccagcatcgtacggaagcccatttcggccactgcggcgccgatgtcgtcggagtagatcagctctgtgtttcggaaggcggtcggtttcaccccgaattccttttttataagtgccgtgtggagttttacctgttcggtgaaatcctccttcgaagccagcgaggccagcgagtgggagtaagtctcggcgaggaactctacgcaacccgtggcggccagttccttgaacgattcgaggacttcgggcgcataggtgcggaactgttcgatggcgatgcccgtgatcgagaacgagcagcggaacttacccttgttttcccggatgagcttcagcaacagggcgttcatcggcaggtagcattgccgggcgactttctgcatgatggagcggttcagcaggtcgtccagatagttgtgatccttgcccatgttgaagaagcggtacttcttcagtcgccagggctggtgtacctgaaaatataagcagacggttttcatagggtagctattttattgttttttattctcttcgatcaccgcttcgtatacggttttgattttggctgcggcatcgttccatttcaggttcgtgacctcttccaggcctttcgaggcgaacatccccgcaagcgccgggtactggatcagcccgtagatggcatcggccagggcatcgacatcccagtagtcgaccttcacggcatagtcgagtacttcggccacgccgctctgcttggagatgatcaccgggacgttcgaacgcattgcctcgaggggcgatatgccgaacggctccgagaccgacggcatgacgtagacatccgacaactggaacatcttgtgtacgtcctcgccgcgcaggaatccggtgaagtggaacctgtcggcgatacccagccgcgccacgcggcggatgacatggttcatcatgtcgcccgagccggccatcacgaaacgtacgttggggactttcttcagcaccttggccgcggcttcgacgaaatagtcgggccctttctggtaggtgatacgccccaggaacgtgacgatcttgtcgtccacgccccgttcgggcattttgcactggcctgcggcgaaccgcacggcattgtgtaccgtcacgaccttgtcggccgggacgccgtagcggttgatgacgatgttgcgcgtgaggttcgaaacggcgatcacccggtctgcggcatgcatgcctgcacgttcgatggcgtagacctgcgtgttgacgttctcgccgctgcggtcgtattccgtggcgtgcatatgcacgaccagcggcttgcccgatacgcgcttggcggcgataccggcgtagtaggtgagccagtcgtgggcgtggatcacgtcgaactgcccttcgaggtctttggccacctgcgccgcgactacggcatagcgggcgacctcctccataaggttggcgccgtacttgcccgagaaggtatagcgttgtttccaggcatcggtcgtcgaccagactttctgtccggatttgacgtagcgctcctggtactgttcatactcttcgggggagatataaggtaccatgttcgagtcgatgtggatgaacgacatcttctcgagaatatcgtccgcgccgcttcccgtagatccgtaaagcgcctccacgtcactggcattcaggacgtgcgtgaatcgctgatcctcgtcgccgtaggcatggggtactacgaatgttacgtcgacatcgttgcgtgccagcccgcgggtcatcccgtaacatgccgttcccaaaccacccgcgatgtggggcgggaactcccaaccgaacattaaaactctcataactatatccttgttttgcaatttttacctttcctctcacaggaacgtcccggctcacggccacaagccgcggttgcaagtccggacgccccggaatcccgccttggcaggattttcctcccgtcacagcctgttatttcccagtctttgtcttttttgtcgcggcctttgttgcggccggctttttttccgtcggtttcttctccgcactctttttcgctgcggatttcttttctgcggcctcttttgcgatggccgtctttgccgcagttttctttggcatattgtccgttgcggttttctttaccgcagcttttttggcaatgcttttcgccacgggcttcaccgccttcgcggctttccccgcggttttgctttcccgggcctcctcctgcgtgcgctcgcggatcatgctgtggatattgagcacggccccgacgctccacgcctgcgagatagccccgcgcgatgcatagggcgggtcggcatcgtagagctcacaaatcgacccgatgccgtagctctggatgtcctcgtcgaaattggcgagtatctcccgggcctgcggcaggaatacgtccctgtcgatatcgaaacatgccttgacgtagaattgcagcagccagggccatgccgaaccgttcttgcccgcgaaatcgcgttctgcgggcgatcctccctccagcgaacctttgtagagcaggttgcggggcgagagtgtccgcagccccttgggggtgagcaggtgctggcgcacggtgcggatcacctccagttgcagctcttcgtcgagcatcttgtaatccagcccgcaggcgacgatcatgttggggcgcgtcgatttgtcgggcccgtccgtccctacgaaatcggccagataaccttccggcaggcggaacagttctacgaacgacgcctgcgtgcgtgccgggagcgactcccaggccttgacgaaggctttgtctgcgtgtttgccggccagttcgagcgcataacatacggcgttgtaccacaaggcgttcacctctacctggtaaccgttgcgcggagtgacggggcggccgtcgatcacggcattcatccacgtcatcgggatgtcgtccgcagcggcccacaccagtccgttgtcatgcagcgcgacgcggccgccgactccccggcggtagctctccagaatatctttcatggccgggccgtaggctttccatatctgcttgccgcccacttcccgttcgagttgctggagcgtccagaagaaccacagcggggcatctgccgcgacggccgccgaggcgttgcccgtgaacataccgtcgcgcatttcgcgcaccagcgtgtcgagggcgtcgatacagtcctccttatgcccctgttcgagcgtgatgcccgggagcgatacgaaggtctggcgccctgaaaccccgtgccacggatagcccgacaccacttcggtgcggtcgccgggacgccggatgacgaattgccgcgccgaatgctccaggcagctgatgaagtcgatcttgtgcgtgcgccgggcgatggatgcggcgaatacctcttcgatggtcttgaccgaacccatttcgtcgagcgaagccgagaagatgatgctttcgcccttcttgagttccgtttcgaaatagcccgtcgtgagcaggtcttcgtaaccgtcgtaaccgcgcgccagatcctgctggtattcgaatccgtagtaccagtcgggtgcgggcacgaactccgcgccgggcttgctggtttgcaggtatagccacgggaacgacccgtagaggcggcatttcacgccgttgaccgccgggtaggagtgcccgtcggcatccatgttggcatgcgtcagcgcatgtttgtcgcgaaaggcaaggaagggccgcagccgcaggtacgtttccgaatgcgcatcgacgagcgtatagcggatcatcagctgtgtgcgcttgtgtatccacagcatctccttccgcaggatcacgccgcccacgcggtaggtgatcgtgggggtcggcgtatatttgaaatcggtgatatacttgtgtccgcgcggctcgtatacccccttgaagcggtgcagggccaggttgaatgtctggtcgtgctggacgatggtttcgtcgagcgacgagagcaggacatacgtcctgtcgctgtcgtcgatgggcgctaccatcaggccgtggtagcggcgggtgttgcagcagacgatagtcgtgctcatatatccgccgatacggtctgtggagagcatttcgcgctggagcgaatactccaggttgcccaattcgcttttgtcgaaagtaagtgctgacatgtccttcaaaaaaatacggttcgttctataaagatagctgaattttcatgaaaagacaatcgcatttccgaaaattcatatcttttttacattattaggcccaaattcgctaagcccattttaccaatgcaaaatccatgcgatggggcaggtgcgggttctccgggaaaatacgcagcgccacgtcgaacgtgccggcttcgtcgggcgtataatccagtgcgtaggtaacgcggctgccttcggtcttggtgtgcttgagcccgatcgtgcgcatcacgttggcattctgcccgccgacgatctgctgtgcgatgaccatctccacgccgatgtcctcgggacgcaggctgacgatgtccacggtcacttcgaaatggtacttttcgcctacgaagatcgccttgttgtcgattttcacacgctgtacgtcgatcacacggatctgatcccataccgacgagaccttgcgtttccatgccgcgatctcgcgggccagcttgtagccgccttcgacgatccggtgcttgcgtgccgcgagcttgttgtagaaccgctcctcgtagtcgttgagcatgcggttggtcgtgaaattcgatgcgatgtcggcgacgcatttcttgaccgactccacccatgcgtggggtacgccgtccttgtcgcggtcgtagtatttcgggacgatctgctcctcgatggtgttgtagatcatttcggcgtcgagctcgtcctgatagtgctggtcggcgaaggtgcgctccatgggcagcatccatccggcgccctccttgtagccttcgacccaccatccgtcgagcaccgagaattgcagcacgccgttcatgacgcacttctcgcccgacgtccccgaagcttcgagcggacgggtcggggtgttgagccatacgtcgacgccctgcaccatgcggcgtgccagctccatgtcgtaattctgcaggaagaggatcttgcccacgaactgcggcatggcggccacctcgacgatgcgtttgatgaggtcttgccccggcttgtcgttggggtgggccttgccggcgaagatgaattgcacggggcgctccttgttgttcacgatggccgagagccggtcgaggttcgtgaagagcaggtaggcgcgcttataggttgcgaagcggcgtgcgaaaccgatggacagcacgtcgggcttgatgccctcgatgacctgcaacatctggcgcggcgagtcgagccgcacctggctggggtcgctgtaacgcttgcggatatgcttgatgagcttgttcttgaggtgcatgcgcccggcccacagctccccgtcggggatgttgtggactttctgccatgccgggatgtcgtaggcgtgcccctcgaagccgtcggcgaaatagcgggcgtagaggcggcgcaggttcgtcgcgatccatgtcgggaagtgtacgccgttcgtgacatagccgatgtggagttcgttcttgaaataacccggccacatgttgcccaggatctccttcgacacttcgccgtggagccacgatacgccgttgacctcctgtgagaggttgcaggccagcaccgacatcgagaacttctcgttggggtcgttggggttggtcttgcccaggttgatgtactgctcccaggtgatgcccagcacgtcggggtagtgcgacatgtactggcggatcatcgactcggggaaggcgtcgtgcccggcgggcacgggggtgtgcgtcgtgaagagcgacgaggaacggatcacctccagcgcctccgagaaggagagcttcttgtggttcaccaggtcgcggatgcgctcgatgccgatgaacgcggcatgtccctcgttgcagtggaacacgtcgtgcttgatgcccagtgcgcgcagtgcgcggataccgccgatcccgagcaggatttcctgcttgaggcggttctcccagtcgccgccgtagaggtagtgggtgatctggcggtcttcctcgaggttggcctcgaaatccgtgtcgagcaggtagagatccgtgcggccgacctggcatttccagacgcgcgccgaaagcgtacgccccgggaaggcgatggtgaccgtcagccagttgccggcttcgtcgcgcacgggcgagatcgggagtttatagaaattctgtgcctcgtaggtcgcctcctgcgccccctgtgccgaaaggcgctgcgtgaagtagccgtaccggtaaagcaggcccacggctgccatcgggacgttcttgtccgaggcctccttgaggtagtctcccgcgagtatgcccaggccgcccgagtagatcttgagcgacgagtgcaggccgtattccatcgaaaaatacgaaatcgtgggggtcttcgggtcgggtttttcgttcatatagtcgcggaactgcgcatatacggcgtcgagctgcccgaggaaggcctcgtcgcgttcgagccccttcatgcgttccacgctcagtttgtcgaggaaagcgatcgggttgcgctcgcattcggcccagagtgccgggtcgatgccttcgaacaggtcgcggggcccggggttccagcaccaccagaggttgcgcgaaagttcttccagggcatgcaggcgcttgggcagggtcttgtcgaccatcatgcggttccagttgggcttctcggcgaagagctgctggcgtacgaaattgatctgttcgttgcgggcgttgctctcgtcgagcacggcgcggttggtacggatcaccgaactttcgacagcctcggagtaggcctgttcgtaggcggcgaaaaggtgctcccagagcgcagtttccgatatctcgtaggccgaaacgcgcatctcggagacatgtttctcgtccagcgcgctgaagcgcagcagcgagtcggcgatcttctcctcgacctccttgtcgttgtagtcgtcgcggcggatgacctccacgcccaggtgctcgcgctgcttgtcgacccacagcccgaaccctgcgagggtcgtggtgatggtcggcaccgagaatgccaccgattcgagcggcgtatagccccacggttcgtagtaggaggggaataccgtgatgtccataccgacgagcagttcgtagtaatccttgttgaagatgccgtcggccttgttcaggtaggtcggcacgaagatcaccttcaccttcgaatcgtcggtcgtgaggatgctgccgttcagggcgttcacgatcgggtcgctgttctggtattcgaggtaatgggtcgaatacttgtattgtccgccgtcgatcgggctggccgggtcggccaggtgtgcctgcaagtccgcacgcgggccgcggttggcggccggaacggtgacataggccaggacttcgcgtttgagacggtcggaggcggccagctttttgagcgactcgatgaatacgtcgagccccttgttgcggaattcgtagcggccgctggtgccgacgatcagcggttccttccggaacttgtgcccgaggcaggcttcggctaccgagatcatcgccgtgcgggcttcggcacgtttggcgtcgtactcctcgcccgtccatacgaagtcgttttcgaacccgttgggggtgatgccgtccggttcacgccccagcaggtatttgcattcgttggccgtgatgtcgctgaccgtgaggaaggcgtcgtggtacgtggcggccatcttctcgatcgagtgtttggccacgacgttgaactgccgggccagttcgtcggcattgaatttcgccaggtcgttgtagagcggcaggccgttgccggcgatgcagcgccccatgaccgtggcgtgcgtcgtgaagagcgtggccacatagggggcgtgtttgcgcaggtggagtccgcctgcggcggtcatccactcgtggaaatgcgcggcgatcttgtccgtcgcgttacagaagttgtcgacatacgaggcgatgaccatgcccgcggcatagccgaagagcacgggctcgatgtagtcccactgtcccgagagcgaatccacgtggtacgtctcccagagtttcttgagtatttcgtctttgcgggggatcagcgaagtaaagtccaccaggatcaccgtcggctcgcccttgatcttccagtgtcccacgcggatccggaggccgtcgctgtatacgctctggcgccatgccttcagcatgtcggggtcttcctcgaattcggggttcgccccctcgtgctggaggtcgggcccgatgaggatatagcggtcggcgaatttacgggttacggtctgtgctttggtcgagatgacggtatggatgccgccgaccttattgcagacctcccagctcacctcgaaaaggtagtcgggagtcagttttgcattactcatatttgtcgtgcttgtttgtaatttactcgatgaatcggttgaaaaccgctgcaaaggtaatacttatatttatataaaacaaccttgttcgattaattagtaaaaatatttaataataacttaacatttctgtttcacatcgttgcatgtcgtgttatgtttcgaaaagtgccccgatcacggcatccgaaatcaggaatttttccggcgggagggccatccgcccccgggctatgcggagcgtacccgaacggaggaacggtgctgcctcttcctgcatccgcgccagccgttttgctccgaaacgtgccgcggcctcttccagatcgatcccctcgaccgtccggagcgccgtcatgacatattcgttgaaccggtcgcgtcgggtcagcacttccttcccggcgggagcgcctgctatgtatttttccactgaactggcgttccagtgcctttcttcgccgtcgaacgagtgggctgcgggcccgatgccgaggtatttcgtcccatgccagtaggaggcgttgtgacgggctcgaaatcccggcagggcatagttcgaaacctcgtaatgctcgaatccggcggccgtaagcgtatcgtgcaccgtgaggaactcctcctcgctgacctcttcgtccacggcgcggaactcgccccgtgccgcacggcggccgaaggccgtatcgggttcgatggtcaaatggtatgccgaaatgtgctgtacgccgagcgacagcattccgtcgagcgatcttttcagcgaatccccgccgaagccgggaatgccgaagatcaggtcggcggtgatgttcccgaacccggcgcgttgtgccgcccgcaccgcaccgatggcctgtgccgccgtatnnnnnnnnnngcggttcatcagcttcaggcacccgtcgtcgaacgactggatgccgatcgacagccggtctatgcccgcttcgcgcagcccgtcgaggtaattttccgtcaggtcgtcggggttggcctcgagggtggtttccgtggtgccggagcagtcgaacagcagcgcggcatgatccagcagtcctttcagcgcggcgggtgcgtagagcgaaggcgtgccgccgccgaaatagcgggtcgtgaccgcttcgccgcgcaggtaatcctgccgttcgtccagttcgcggtgcatggcggctgtcacgccgtccatctgctccagccgggcgctcttgtagaagtcgcagtaggcgcagatgcgtttgcagaacggtatgtggaaatagagtccggccatggcctatccgagttttcggggagcaggagtttccgccggttcggcggcgagcgcctttatcgcctttacggttttccgtccgtatctgttgaacgtaaatattccccctgcgatgttataccacggatcgtagaccagagcccaccggatttcatcgtttctccagctcaagatcagcaagtcgcagtccagataggggatgccctttcggtttgtggcctgcaaataacgctgattgtcgtattcgatcctccatccctcgtcggacagcagtttccggatctgatctttcagtccgtcgggttgcccggagagcgggatactcttgaacttcagtttcctgcgttgtaacacatggagagcaaagcccgcgccgaacagcaggagcgcggccagccaataccgatcccgaaatccctgaatgaggtcgcggataaaataacaggaaaagaatatcccggaaataattaacaggatggagaaacaatggtagtttacccattcgatcgaaaacggtttcaggcagatcctgtcgtggcgtatttttatcgggcgcattataatgataacgatgttttgtataagggctgattaatcaaagataggaaaaattcccggatgtcgtccctttccgccccggttttttcggtgcccgtgcgtcgggtctggctgccggatcggatttacggaaaatacctccggtttcctgatttcgatgcggttgctccggaagcgccctctcccgtcattgtttttgtccgggcggcgttccgtcgggcgggagtgccgtgcgccgtcgatgggcatttcgaccgaagtgcggcctgtgcgtccgcctcgaattccatcctgcggagccccggtgcggattgcggccgtatgtttgcagcaggatatggagccgggttttcctgcggctttgggggatacgatagctgcttataaatgaatcatatacaggcatcgggaaaaataatggatattttttgcttttttcactgttagttttttcacaagtgtaaaagtttttctacctttgtgcggttaaagtccggtcttgcggattttcgacgttaggttaatcaaggatttgatgttttattaaaataacaattattatggacaaaatggatttgaaaaagtatgggatcacgggtgtgaccgagatcgtgtacaatccgtcgtacgacgaacttttccgcgaggagaccaagaaggggctccgcggtttcgaaaaaggccagctgaccgagaccggtgccgtgaacgtgatgaccggcgtttataccggccgttcgcccaaggacaagttcttcgtaatggacgagaccaccaaggatacgatctggtggacttccgatgaatataagaacgacaacaagcctgttacgaaggctgcctggaaggagctgaagaaactcgctacccaggagttgtcgggcaagaaactctatgtcgtggacactttctgcggcgccaacgagaattcgcgcctcaagatccgtttcatcatggaggtcgcatggcaggcccatttcgtaaagaacatgttcatccgtccgaccgacgccgaactggagaaatacggcgagcccgatttcgtggtgctcaacgcttcgaaggccaaggtcaagaactataagaaactcggcctgaactccgagacggccgtcgttttcaacctcaccgagaaaatgcaggttatcctcaacacctggtacggcggcgagatgaagaagggtatgttctcctacatgaactacctgcttccgctcaagggcatggcttcgatgcactgctcggccaacaccaatgccaagggcgagaccgctatcttcttcggcctgtcgggcaccggcaagaccacgctttcgaccgacccgaagcgtgagctgatcggcgacgacgagcacggctgggacgacgacggcgtattcaacttcgagggtggctgctacgccaaggtcatcaacctctcgcaggagaacgagcccgacatctggaacgccatccgccgcaacgcgctgctggagaacgtgacggtagacaagaagggcaagatcgactatgccgacaagtcggtaaccgagaacacccgcgtttcgtacccgatcttccacatcgagaatatcgtgaaacccgtatcgaaagccccggctgccaagaaggtgatcttcctttcggccgacgcattcggcgtgctgcccccggtttcgattctcaactccgagcagaccaagtactacttcctgtcgggcttcaccgccaagctggcgggtaccgagcgcggtatcaccgagccgactccgactttctcggcttgcttcggcgcggcattcctttcgctgcaccccaccaagtacggtgaggagctggtgaagaagatgaagaaggccggtgccaaggcatacctggtgaacacgggctggaacggtaccggcaaacgtatctcgatcaaggatacgcgcggtattatcgacgccatcctcgacggttcgatcgacaaggctccgaccaagacgctgcctatcttcgacttcacgatcccgacggagctgccgggcgtagatcccaagatcctcgacccgcgcgatacctacaagaacgccaaggattgggacgtcaaggccgaagacctcgccaaccgcttcgtgaagaatttcgtgaagttcacgggtaacgaagagggtaagaagctcgtagccgccggcccgaaagtgaaataatctctgaataaagttttgaatggtagaaccccgcgccggaaggtgcggggttctttattttgcggcattgcgtatgctgcgatgggagggggcttccgtatgccgcggtgcggctcggggctgcttacggtgatttccggtcgccgcctgccgcgattccgggttgcggcctggtcgggcgggcttgttgcgggtgtgcctcggaagggcccgctgcaatttaccccgggtttaggttcccgggccggccgctgtttccggttgcccgcattccgggagtactgctccctttggttccggagttgcggactttccgtgcatggctgcctgccgcagtccgcaactgctgtttagcgcacgtccgctgtccgctgtttgttgcggggcgtgaagatgcgatacccgatcgagacgccgatcttgttgggataccactccgaagagccgttgaacgggtcgggatgttcgggttgtacggggcggtgggggtacatgtcgacctggccgtcgaaactgtatccgttgtaatggctgtccatccatgcccaacccaggaaagcgtcgagcagccagcgtttcccgaactggtattcataacccacgcagaggccgatcatcatgccgtatcctttgcagtaacggtcttcgaatttcagtttccacccttcgatgtaaggtttcgacatgtcgaaggccatcatgccgatgtttgcccccagataccagccccggttatgctccttgaaatagcggcggtattcgcccatgaagatggcgaagagcatgtgcttttcgttgatcgacttccatggcgagatgacgatgtcggtctgcaaggtcgatttgggcgagatggcgaactccacggcgggattcaccacgcccaccagggcataggggacattgagcttgacatatccctgcggggatgcctgctgcgtgcagaacagcgcgaacaggaatgccgggatgcaaagcccgaagcggatgtttttcataggcggatcgttacaacggacaaagatatgaaaaaatccggccaacatactgtgctggccggattttaactatggggcggacggatttataccgtcatgatctccttctcctttttctggagcgcctcgtcgagggtcttggtgaatttctccagcaatttctgggcctgtgcttcgccgtccttcgactcatcctcgggcataccttctttctgggctttcttgaatgcctcgaccgcgtcgcggcgggcattgcgcaggctgatgcgggcggtttcggcctcgttgcggatttgtttcaccaactccttgcggcgctcctcggtcaggggcgggatcgacaggcggatctgctcgccgttgttcgagggcgtcagcccgatgttcgagtcgatgatggccttttcgatcgcacgcagcatgttcttgtcccacggctggatcaggatcgtcttggcgtcgggtacggtgacgctggcggcgcccgatatgggcacctgcgagccgaaataatcgaccattacgccgttcagggcattgggcgacgcttttcccgcgcgcacgttcaaaagttcctcttcgaggtggtcgatggccttctgcatacggccggaggcatcgttgagaatcgtcttggtatccatattattcgagtattttttcgatggttttgatcatttcgtcgaactcttcggcgtcgtaacctactgttgccagcacgactttaccatcggcgccgatcaggaaattccgcgggatgtaattcgaggcataacggtcgtaaatggcctgcgaggggtcgaggcccatcgggaacgtatagcccgtcttttcgcggaacgccgccacgtcttcccgcttttcaccgcgcgatatgggcaggaatacgaagttgcgaccggcgaaacggtcgatgatgtccttctgcacgcgggtcagttcctgccggcagggcgggcaccaggtggcccaaaagttcagtaacacgactttgcctttgagttctgcgagggaggtttttgtgccgtcgaacatctccacggtgaagtcgggggctttgtcgcccgccttgaccagcgtggtcgattcggtatccgcctcggctttgccgccgcggctgccgcacgagggcagtaacaggattgcggcgatgatcactgcgatcagcgccagcatgatccatagctgcttgttgctcttttttgtggccataatcttatttttttacaagtgtcccgatcctctccccggcaagcaccttgccgaggttgcccggcgtgtccatgtcgaagacaatgatctgcagtccgttctcgcggcagagcgtgaatgccgtgagatccatgactttcagccggcggtcgagcacctcttcgaagcttatttcatcgaatttgacggccgcagggtctttttcggggtcggccgtatatacgccgtccacgcgggtgcccttcagcatcacgtccgcctcgatttcgatgccgcgcagcgccgaagccgagtcggtcgtgaaataggggttcgacgtgcctccgccgatgatgaccacataccccgcctcgaggtattcgatggcacgcgccttggagtagtattcgccgatgggctccatgcggatcgaggtcaggactttggccttcacgccgttgtcctccagggccgattgcagggccagcgagttaatgatcgtggcgagcatgcccatctggtcgcctttcacgcggtcgaagcctttctttgcgcccgtgaggccgcggaaaatgttgcctccgccgatgacgatgccgatctggacgcctgtggccgcagccgccctgatctgttcggcgtaggactggagtacttcgggggagagcccgtatttctgcgaaccttgcagcgattcgccgctcagtttcagtagtattcgcttgtatttcattgtacgatggggtttaccgtaacgcgaagataaaaatttttattgaaaaaaacgcaagaatgactatctttacagaaaataggcggtatggcggctatgccgggaaaaaacggcgccatgtccggtctgagctgttttacggaacacaggcttcgccttggcaatgtccgaataaatttggcattgtgctcggcttgtgctatctttaacctcgtttcagataggctgcggttcggacaaactcaaacaagtttggtttgtcgcgctccttgcgctatctttgtgctgccatgacgttggatgaatacaaattactccgaaaaataaattctccccgcgacctcaagcaactctcggcggaggaactgcgtacctactgcgacgagctgcgcagctatatcatcgacgagtgctcggtaaatcccgggcatctggcgtcgagcctcggctgcgtggaactcgccgccgcactccactacgttttcgatacgcccgcggacaagatcgtctgggacgtggggcaccagacctatgcccacaagattatcaccgggcgccgcgaggcgttcaagaccaaacgcctgctgggcggcatcagcggtttcccgcgcatgtccgagagcccctacgacgctttcgggggcgggcatgcctcggtgtcgatttcggcggcgttcggcatggccaaagctgctgaaatgcggggcgagaggcaccaggtcgtggccgtcatcggcgacggttcgatgaccggcggcctcgcgttcgaagggctcaacaatgccggggccagcaaacgcaccaacatcctggtgatcctcaatgacaacaacatggccatcgaccaggccaccggcgcattgaagaactacctgctcaaaatctccacatcggtgcactacaaccgtttcaagcagcggttgtggggcatcctttcgcatacgccgcgcctgctgcgcctctgccagaaggcgggcaacgccgtgaaacagggggtgctgaacaagagcaacctcttcgagagcttcaatttccgctatttcggccccgtcgacggccacaacctcaaggagttggtgcgcacgcttcgggcattgcgcgacatcgaagggcccaagttgctgcatgtcatgaccgtgaagggcaagggctacctgcctgccgagcacgaccagtccacgtggcatgcccccggacgtttcaatcccgatacgggcgagcggatcgcctcgccgggcgccgcggcgcgttaccaggatgtcttcggcgagacgctcgtcgaactggccgggctcgacccgcgggtcgtgggcgtcacgcctgccatgccgtcggggtgttcgatgaacatgctcatgcacgccatgccgtcgcgttgcttcgacgtgggtatcgccgagggccatgccgtgaccttctcggccgggatggccgctgcgggcatggtgcctttctgcaacatctattcgtctttcatgcagcgggcttacgacaatgtgatccacgacgtcgcgatccaggatctgcccgtggtgatgtgcctcgaccggggcggcatcgtgggcgaggacggcgtgacccaccacggggtcttcgacatggctgcattcggtgccgtgccgggacttacgatcgctgcgccgatggatgaactggaactccgcaacatgatgtataccggtctgcaatacggccatcccttcatgatccgctacccgcgcggcaacggtgcgggacgtcggtggcggggcgttcccttcgaggcgctgcccgtcggccggggacggaggcttcgcgaaggtacggacgtggcgttggtgacggtcgggacggtcggcaacgctgccgcccgtgccgcggaacgcgccgcggcgaagggcgtgagcgtggcgcattacgacctgcgcttcgccaaaccgctcgacgaggccctgctggccggggtcggtgccgagttccgccatgtggtcacggtcgaggacggttccctgcgcgggggcgtcggcgaggccgtcacggcatttttcaatgcccgcggctgcgaggtggccgtacactcgctgggcatcggcgacgagtgggtcgagcacggaaccccggctcagctctacgccctctgcggttacgacgaggagggtatcctgcgggcgctgctcgccgcggggaaataaaaccgtccagccctgtttgccgtgctgcggcataaaatctgtcacatgctccctgaaaaccgttcgggaagtgaaaatcgcgatcgtattattggcctccgcgctgcttgtcatcggcgtggcatacggccgtgccgccgaccgtaccgaccgcactccggtgccgtcgttcgatcaggcgtgctacatgggctcttggcaggaggtcgcccgctacgaccatccgttcgaacgggggctggccgaacgacgcggttaccggacggacaggctcctgttcgtcgaccaggggcaatgaaactgagccggagggttcttcttcggtttcctgcggccgtgttacatcgtgaacgtccagtcgtcgccccggctgagcgcggcgtcgaaccggaacccttcccattcgaattctttgagcatttccggatccgcaatccggtttctgatgaggtggcgcgtcatctctccgcggcacattttcgtgtagaccacgatggttttcagacggtcgccttcacggatgcggaattcgggcgtgatgatacgcgcttcgcggcggatgcgtttccagtcgaacaggcgcttcatctcgctgctggcgaggttgaccaggatgccgtcgtcggcatggattttttcgaggaaggcctccgtcagccgtccctgccagtacccgaacatcgtttggtcgtcgtgccccggcaatacggcgtccccttccagccggtagcggcggattgcgtccagcggccggagcagcccgtagaggaacgacgtgatgttgaggtgctgctgtgcgtattcgaaatccccgggggtgaatcgctccggggcgatatgcctgaatacgacgcccgtgtaggccagcagcgcggggagggcctcttcgccgtggaactgccggtaac

SEQ ID NO: 493 - DNA, 16283 bp, unidentified
  source 1..16283: mol_type = unassigned DNA
  misc_difference 2501: note = a, c, g, or t
  misc_difference 2502: note = a, c, g, or t
  misc_difference 2503: note = a, c, g, or t
  misc_difference 2504: note = a, c, g, or t
  misc_difference 2505: note = a, c, g, or t
  misc_difference 2506: note = a, c, g, or t
  misc_difference 2507: note = a, c, g, or t
  misc_difference 2508: note = a, c, g, or t
  misc_difference 2509: note = a, c, g, or t
  misc_difference 2510: note = a, c, g, or t
acaggaacatcatatttcgtctgtaccgtttttcttttcataaacctataaaattacgacttgcgagaggacgcttatatctgcccctcacaacctataaaagcactgcagaatctgcgacactacatccgttaaactccggttatgcagacagtgcatttttcttgacctgagccaaagcctttgcaacaggcggcagactgatcacaatcaaagtagcaatcgtttccggtacgatataagttgcattgtaagttaaggagtacacaatggcaggtgttccttccggggcatatgcaccgaagaatacaacaccggagataacggcaaatacatagcgtccgaacacggcaacgatataaccaatctgaagtccgtgttttttgtttgcaaaaaatccggcgagccctaaagcaccaaatgccagagggtagtctaaaatcatctgcggaacggtatagaaaattggctccataacaaactgaacaagaccgtaggcaacggcagtcataagaccaacataaggaccgtaccagtaaccgatcagtgcgatgaacaacatgctgaataaagtaacggaaccgcccattggcagattcgcaaacttaatcatggagcatactactgcaagcgcgatcgcaacggcagagtagacaagctgttttgtggtgagaattgtttttttctctgcatttctgtggcggatcactgctgcgacaacaacgagaagtgcgataatgactactacaactgcgattccaggtgcagtaagacgtacagagccatcatcccaggctccgatcgtggtagtaaaaaattctttcataaaataaaatcctccttgcgtttcagatcttttgcgccaggaggaaaaaactctatattctatcgtctgatgagaaatatcataaaagcttccttacgccggtattatccggttcaagtaataagggttgatgaaaaatcatctctcagcgttggaatgtctggtaaatgcagcattttttgcgcccctagcgtttttgattctgttataaatactgttaaggtctatgatgccttaacgagtatcaatatagcaagatgcagcgggaaagtcaacatgaaattttcataaaagttcttgaaatcacaaagactcacaaagatcacaaagattccaacaatttgtgggcaaagcaaaagccgcagaacaaaatctgcgactttcttttcagatataaagatcgatattacttccaagatatggtgtgacggaattctccatcatctgaaccatgccggcacctaatgtctgtgtcatatctaaagattttccgagcattgcaactccgatatcttcctgtaatgtaacagggcttgtggaagaaccgatgtcatatgcagaaaccgtacttaatgctgcgtctaaacctgtaatatccataaatcctacctcactttcatttccaatttttgcatataaaatgcaatcattcatgactcattgaagcacttttaatatagcacagatcggtcgttctgtatatagaaaagaaaaatgttactgttcacgcagcagtaaaacacttgctgttttgctgcgtaagaaagtgattcagaaaaatcctcttgacaaataaaacagaaacgcatatactttgcctatcaaatagtttgacaatcaaataattagaaagtcaaacaaactaatatgaaaaacaacaggcgaaagccaggaaagaatgaggaaaagcaaaatgttagaaaagatgaaaccgattattgcagaacagttaaatgtaaatgaggcagagatcaagccggaaacaaaattcaaagacgatctgggcgcagattccttagatttatttgaaatggtgatggctctggaagaggagttcggaatcgagatcccatcagaggatcttgagaatattgtaacagtcaacgatattatgggctatctcaaagaaaaaggtgtggaagcttaagaccatttacaaatattcaaagagaggcaggaaacaatgaaaacgagaattacggatttgcttggctgtcagtatcctgtgatccagggcggaatggcatgggttgcagagtatcatcttgcagcggcagtttcagaggcaggaggaatcggactgatcggtgcagccagtgctccgccggaagtagtcagagaacagatcagaaaaacaaaagaattgacggataaaccatttggagtcaatgtgatgcttttgaatccaaatgctccggaagtcgcaaaagtggtcgtggaagagggcgtaaaaattgtgacgacaggagccggaaatccgggaaaattcatggagatgtggaaacaggcaggcgtcaccgtaattccggttgtagcaagtgttgcgatggcaaaaatgatggaacgcgcaggggcagatgccgtggtcgcagaggggatggagtccggtggacacattggttcacagaccacgatgacgctggtgccgcaggttgtggatgcagtgaccatcccnnnnnnnnnncagaggaatggcggcagccataatgctgggagcggaaggtgtgcagatgggaacacggtttgtggtcgcaaaagaatcgatcgtacaccagaattataaggaacgcattatcaaagcaaaagacatcgattctgaagtgacaggtatgagtaccgggcatccgatccgggtactgcgaaatcagatgacaagagattatctgaaattagaaaaggacggtgcctcttttgaggagttagagcagttgacactcggctctctgcgcaaagcggtgatcgaaggggatgcagttcatggaagtctgatggcaggacagagcgccggacttgtgaaaaaagagcagacctgtcaggagatcatagaggaagttgtcacagatgccagagcgctgcttacaggaagaaaatgacctgacatgcgcagatttgaagatttgagaaaggtgtggttatcaggatgggaaagacagtatttatgtttccgggacagggatcccaatatattggcatgggaaaagaattttacgaacagatccctatttgtaaagaagtgtacgatcttgcttcagaggtgactggattggatatcccggcactgtgttttgaggagaacgaaaaaataaatatcacagagtacacgcagatctgtatgctggctacggaagctgcaatttatatggcgttggaacagaacggttatcagccggatgtcacagccggattgagtcttggtgagtatggagcgttgatcgcatccggagtcatgactgctgaggaagcatttgaacttgtgcggaaaagaggcatttttatgcaggaagctgtcccggccggtggagcaatggcagcagtgctgggactggatgcagcggcaattgagcagatctgcagagagacagcagagcagacagggagcgaggtttccatagccaattacaactgccccggacagatcgtcatttccggtcaggaggaagcagtgcatctggcaggagaaacatgtaaggcgtctggggcaaaacgcgttgttccattgaaagtcagcggcccgtttcattcgaaaatgctgcagggagcaggagaaaagttaaaagaagaattaaaaaaagtagagatcagtgattcatttgttccttatattgcaaatgtaacggcaggctatgtcacaaaaaaagaggaagtgaaaccattgcttgccagtcaggtatcttcttctgtgcgctggcagcagaccatagagcggctgcttgcagatggtgcggatgaatttgtagagatcggaccgggaagaacattgagtggatttgtgaaaaaagtgaaccgggatgtaaaagtgagcagcattgataaaatggaagattttattcagtttatcggaagtcatgtggaggcaggagcatgttaacagattctttgaaaaataaagtggcacttgtcacaggagccggccgtggaatcggaaaagagattgcaaagacactggcatcatgtggagcgtttgtcattgtcaattataacagttcgccggatgcagcagaacagactgtaaaagaaatcataaaacagggtggaatggcagcgcctgtacaatgtgatgtttctgattttgatgcctgcggaaaaatgatggaaatgatcataaacaactatggacacctcgatattctggtcaataatgcagggatcacaagagatggactgatcatgaaaatgagtgaggaagattttgacagggtccttgatacgaatctgaaaggtgcattccatacgatccgccatgcttcacgttatttcctgaaacagaaatccggtaagatcattaatatttcttctgtttccggtgtcatggggaatgcaggacaggcaaattacagtgcaagcaaagccggagtgatcggtcttaccaaaagtgtggcaagggagcttgcgtcgagagggatcacatgcaatgcagtggcacccggatttatcgaaacagagatgacagaggcgatgccggaggctgccagggaagcggtaaaaaaacagattccgcttcagcggacagggcaggtgtcagatgtggccggtgtggctgcatttttagcatcggatctggcagattatatcaccggacaggtgatctccgtggacggcggcatgcacatgtaaagaatatatatcatgaggagaacaatatggcaaaaagacgcgtagtggtaacgggaatgggagcagtcacaccgatcggactgagtgtggatgaattctggcagaacgtaaaagcacagaaaaccgggttttctgaaattacaaaattcgacaccactaattataaatgtaagcttgcagcagaagtaaaagagtttgatgcaaaaaattatatggatgcaaaagaagcaaggcgcatggaactattcagccagtatgccgtggcggcagcgaaggaggcaattgaggatgccgggcttgaaatggatcaggaagatccgtatatggcaggctgtgccattggaagcggcgtgggaagccttcaggcgatcgagcgcgaacatacaaggctgatagaaaaaggaccggggagagtgggacctttattcgttcccatgatgatctctaatatggcagcaggaaatgtttccattcattttggattaaaaggaaaaagtatcaatgttgtgacagcctgtgccacaggaacgaatacgatcggtgaggcattccgtgccattcagtatggtgaggcagacattatggtttccgggggaaccgagggaagtatctgtccgaccgcaatcgctggttttacgtcactcacagcactcacagcagaaaccgatccgaagagatgttccattccgtttgataaagaacgcagcggctttgtcatgggagagggcgcagcggtggtcgtgttagaggaattagagcatgcaaaacgccgtggcgcaaagatatatgcagaggttgtgggttatggctgttcttcggatgcgtatcatatcacatctccggcagaagatggcagcggcgcagcaagagctatgttaaatgctattcaggatgcaggaatcacagtggatgaggtcggttacatcaatgcacatggaacatccacgcaccataacgatctctttgagacgcgcgcgatcaaacttgcatttggtgcgcatgccggtgaaatgaaggtcaattccacaaaatccatggtcggacatatgctgggagctgccggagcgatcgagtttatcacttgtgtgaaagagattgaggaagactacattcatgccacagttggctataaagtgccggatgaggaactggatctcgattattgcaaagaaccggtttcgatggaggtgcagtatgcactgagcaattcccttggatttggcggtcataatgcaagtattctattaaaaaaatataccattgtatctgacaaagatatcaatggctgcagataaggaggcagcgatgtcagtattaaacatcagtcagatcatggaaatcctgccacacagacagccaatgctgctcattgattcggtagaagaaattgagtatggtgtccgtgcagtggcgaagaaatgtgtcagtttcaatgaacctttttttgcaggacattttccggaagaaccggtgatgccgggggtgctgatcgtggaggcactggcgcagaccggtgcggttgcaattcttggaaaagatgaaaaccgtggaaaaacagcttattttgcgtccatcaattctgcaaaatttaaaagaaaagtagttcccggagatattctcacgctggagacggaaattataaaagtgaaaggaccgatcggggtgggaaaagcgacggcaaaagtcggagatgaaattgcatgcattgcagaactcacctttgcagttgagtaacagaatagaaaggcattacatagaagctgtaacagaaaggaaatattatgccagcaattttgagaagaagaaagctgatatccataaaacctgaaagaaaaaatgcagtaacttaccgcaatgaggaagtacaggcggaagttatgacaccgccaccggcagcggaacagaagaaaataccgggaagtacagtggtctgccccgcatgtaagagagaagtgaacaaggcggaagtggaaaagaataagtatgtctgctatgagtgcggaagctatttccgcgtgcggactaaaaacaggatccgcatggtggcagatgcaggaacctttgaaccatggtttgaatatctggaatcagaaaatccactggattttccggaatatacccagaaggtggaggcagcccgggaaaagaccggactgcatgaggcagtgaccatcggacgatgcaaaatatatggggaagagacggttcttggaatctgtgatgccagattcctgatgagcagcatgggacatgtggtcggagaaaaaattgcgctcggtgtggagcgggcgacagatttaaagcttccggttattttgttctgctgctccggtggggcgagaatgcaggaaggtatcatttccctgatgcagatggcaaagacttccgcagctttaaaaaggcattctgatgcagggcttttgtatgtgccggtattgacagatccgacgaccggaggtgtgaccgcaagttttgcaatgcttggagatattatcctggcagagccgggcgcattgatcggttttgcaggaccccgcgtgatcgagcagaccatcggacaaaaacttccggagggatttcaacgtgcggaatttcagttagagcatggatttgtggatgccattgttgagcggaaaaatctgaaaataaccttaaaccgtattttaaaaatgcatcacagcagggaaggttttgctgattttgatccattgcgcatggatgataactacgagccgacagagttgatgcgggagcgtgcagcaagggcaaaaggactgacgccgtgggaaaaggtaaaagccgcaaggaaagtagacagaccttctgccactgattatatggaaaatatttttgatgaatttatggagttccatggtgacagatactttcgggatgatccggcaatcgtaggtggagtcgcatatctcgacggccagcctgttaccgtgatcggaatccagaaaggaaaagattttaaggactgcatgaaacacaattatggaatgccgtcgccggaaggataccggaaagcgatacgtctgatgaaacaggcagaaaaatttggacgcccggtgatcacatttgtaaacacagcgggagcatattgcggaatggaggcagaagagcgtgggcagggggaagcgatcgcccggaatctctatgagatgtctgcattaaaagtgccggttctctgcatcatgatcggggaaggcggaagcggcggagcgcttgccttagcagtcggaaatgaagtatggatgatggaaaatgcaacctattgtgtgctttcgccggaaggatttgcatccattttgtggaaagacggaaaacgtgcaaaagaggcaagtgagattatgaaaatcacggccatggatttaaaatcgctgggtgtcattgaacagatcattccggaatatggtgtggcagacgcaaaagcctgtgaatcaatctcacgctatctgaaaggaaatataaaaaagtttcttgagaaacaaaatggcaggacaggagaacagtttgcgtccgagcgctatgcgagattccggaaattttagcaaaatcacagcggctatgtgcacagagagtacgaatcgttttgtgaccggacagagaagagaggaatattatgaaggtaaaaataacaggaacgggaagctgccttccgaagcttcgcgtgacaaatgatgatcttggtcagatcatggaaacatcggacgaatggatccggtcgagaaccgggattattgccagacatattgcggtagaggagacaaccaccggcatgtccacagaagcagcagacaaggcgttgaaaaatgcagatatttcagcggaagatgtggatatcatcattgcggcaactgtttccgcagataaatatcttccgggacttgcctgtgaggtgcagaaaaatatcggtgcagaaaatgcagttgcgttcgacatcaatgcagcgtgttccggttttctttttgcactggatactgcggcgctgtatttagaacatggcggatatcagcatgcgcttgtgattggagcggaaacgctgtcaaaaatgatggactggacggaccggagcacctgcgtgctttttggggacggtgcaggggcagcagttctttcagcaagtaaagaagatggcattttatccatggtgcagggctcggatgggttcaggggcgatgttttaaactgcatggcgagaaaagtgaacaacccttataaaaaaagtgacacggcactttcctatgtttccatgaatgggcaggaggtgtacaggtttgcagtgaagactgtgccaaaggcggtcacagacgcagtggaacaggcaggcttacatctggaagagattgatttattcctgctgcatcaggcaaattacaggatcattgaagcagtttcgaaaagacttggtcagcctatggagaaatttccgaccaatctggaggaatgtgggaatatttctgcggcgagtgtgccgattttgcttgataatgtcaataatcatggtatgatgaggaaaggaatgaaaatcgtgttggcaggatttggagcaggcctcacctggggagcaacggtgataaactggtaaaatcaggcgctgaccgcagaaataggagtagatcggatgacaacagatgaaacattaaacgaattattggtcagattgtttaaagacatcatggagatcgagggaaaatgcctcgtgacagaagaattcaaagatctcagttacaatgatttccatgtgatcgaggcaatcggagtcaatgaaccaaaaactatgacgacagtggcaaaactgatgaatgtcacaaccggaacgttgacaaaggcaatggatggactgaccagaaaagggtatgttatccgtgagcgcagtacgcaggataaacgtgtggtatgggtttatctgacagacaccgggaaagctgcttacaaacatcatgaagagtttcatcacgagatgatcgctcagatcaaaagccagcttaccgagcaggagacgccgatcctgatttatgcgttggcgaaacttgccgattattttcaccttgtatacaagggtgaaaaagaataaagaacagaggtcattgcatcgaaaaactatttttttatgcgatgacctgttttgatataagttgaaatgataataattataacctgaaaatataaaaagtaaaattcattgattttttttatgcaaaatgaataatttgaagtcgaatcctgcaaaaaaatagactaatcattagaaaacttcactaaattaaaggaataaagaaaaaaatattgcgtccgccgtcattttataataaaatgtacgtgttgatgagaaatctgcagccggaatcaatgccggagcatttaaaaaatgccggatatctgatttcacatggttgtaaatatatttttaaaggagaaaaaaaatgggatacgttgatgaagtactcgcaaaagtaaaagaaaaaaatgcttcagaacctgaatttttacaggctgttgaagaggtattagagtctttaagacctgttattgatgcaaatgaggaattgtacagaaaaaatgcaattcttgagagaatcacagaaccagaccgtcagatcatgttccgtgtaccttgggtagacgataacggacaggttcaggtaaacagaggttatcgtgtacagttcaacaatgccattggaccatacaagggaggtttaagacttcatccttctgtaaaccttggaattatcaaattcttaggatttgaacagattttcaagaattcccttacaacacttccaatcggtggtggtaaaggtggttctgacttcgatccaaagggaaaatctgacagagagatcatggcattctgccagagctttatgacagaactttccaaatacatcggagcagatgtggacgtaccagcaggtgatatcggaactggtgcaagagagatcggatttatgtttggccagttcaagagaatccgtggttctttcgaaggtgttcttaccggtaaaggacttacatacggtggatctcttgcccgtacacaggctacaggatatggtttattatacctgacaaatgcattgtggaaagatcacggcatgagccttgaaggcaagactgctgcagtttccggttccggtaacgttgcgatctacgcaattgagaaagcacagcagttaggtgtaaaagttgtaacatgttctgattctacaggatggatttatgatccggaaggaatcgatgttgcattattaaaagaagtaaaagaagtaaaacgtgcacgtttaacagagtacgctgctgcaaaaccatctgcagaatatcatgcaaaacagaatggtgagcacggtgtatggcagtacaaagtagatttagcccttccatgtgcaactcagaatgagttagacattgaggatgctaagatgttagttgcaaatggtgttacatctgtaacagagggcgctaacatgcctactacattagaggcaacaaaatacttacaggagaacggcgtattattcgtaggtggtaaagctgccaatgccggtggtgttgctacatctgcattagagatgagccagaactctgagagacttcactggacattcgaagaagttgatggaaaactcaaaggaatcatggagacaatctatgctaacatttctgatgccgctaagagatacaatgcaacagtcggcggacagacagattatgttgctggtgcaaatattgcgggatttgagaaggttgtggatgctatgatggctcagggtgtgtgctaatcaataaaaacgaaccccggaaattcaatgtttccggggttttattgtgcgtatttttgaagaaagtgttcgttggtttgagtagatttttgatagtaatatgcgtacaatacacgcgtaatatacacgcaagatacaactcattttgtataatatacgcataatatacttggattttgagcatatttatacagaaaaagggaggcataacctcccttaaattttattgacttcatcaatgagctgttgtatagatttgtgcgtgtaggttccttttgtaatatcatttttcatgctatgccccattatcagttttatgcaaacatcatttgcaccaacatcatccatcagtgaggcaaaggtgtggcggccgtcatgtgggagatgctgcataccaagtttgttcataacggtgttgaaatttgcgctcacatacgatccgtaggtgtagtggttcccatacttgttgttcacaagaaatcttctgttcggattgaaccggttctttattagtggcaaaattttgtctgcgattggtattgttctgtctgtgccggcctctgttttcattcccccaatcatgtattgttcatccagatgcacattatccgtggttatctccaaaagttccgtaggtcttaggccggtgtagatcgtaatgagaatgaggtccacattgtttatcacatacagtttagaccaaagggttgcaatttcttcattggtatatctgctatggatttgttctgtcggatcaacccatgagtatacaaagaactgagacaaatctttttctatatagttgttcatcagggcatacttgtatagattgttaagaaccgtgcggatattagagacagtagagtttgatttacaggtccatttgttgatacactcctggacctcatcagttcgtagggcattaaatttcttgtggtgcaaatctgataagtggttgaaagcaatctcatagttccgccaggtgtttgatgaaatcttatccggcagagcctttcgataatttttccactttccatacatctctgcaaaagtaggtgtctcggcgtatttaatatgttccgcaaccacatcggcattattcaattccgacagaaaagcataggcgtgttcctgtttggcgaagtattcaaggtatttgaacgtttgccggtaagctatggaatactcatagccctcttcttgcatcatagtctcagcgaactcacagatggcatctgaggaaatggcagcccacatctgagcttttcttttccatttgaagttataccggttgagttcccggcggatattagacggcggatctttcggagcatcaatctctacaaattccgcaatttcagaagttcggacggcataaggcttacgcctcttaccttttagtttgattacactaccgtaaccgtttggcagacgcataatatcatcctccttttcctaaaaatgggcgtaaaaatgcccggtatattgtttttctaccgggaagatgatataatgcaaggtgttcagacaaacattcatcggatctttccggtgtgtgtttatagatgccgtctctgttagcagcaggggcggttttctattttagtatttctgccgattttcaacgactctaccaatgattctcactggtttgttttcaatctcttcatttgagtagaagagtggttcgtatgcctgattaaaagggattagcctgataccactcggatattttgccaatttcttacaggtagcactatctccatttaccaatacaatgacgagatctccactttctgcataattctgtttacggacgattactacatccccattacatatgcgtggttccatagaatcccctttgattttcaatgcaaaaaaatctcctgtatgggccaattcctcagaaatttcttcatagtctatgacgttctcgatagcctcaatgggtattccggcagccacattaccaagaacaggtacacggattgctttcttcacaatcttcacttccggtttgtcgtcaacgatttttatatcatcgtccagattagtcataacctcgtcaaatgtcataaacatacccttagctgccttgcgaatagtctcaacagatggtcttggcggctcaccggtttttggattgacattattttcgagttgagatatgtagcctttgctcaaaccacttgctttcgcaaagttatccatgctcatgctattttcttctctatatgcccttattatctgccctaacgtcatacgaaaacctcctttcgatgtttagtccattatacaatgcactgtacaaaaagtcaatttttttgtaaaatgtgcttgacaataaatgtttagtcggctatactcaaattgttcagtcgaacaaacatcggacaaagaaaggaggcgcagtaatggcgtatcgaatcagagaacttagagaaaagaagaaacttacccaggaacagttagctcaaatgtctggcgtaagcagaacaaccatagttatgcttgaaaacaacgaagagcatgaggctatggtcggtactctgaaatcgttggcggcggctttgaatgtccctgtcagcaaactttttacccaaaaagtttagtcgagcaaacacgaaaaggataatccacaacgaactaaggcacagcaaaacgaacagattgaggtaagaagcaatgaacaatgagagagtgacaccaaaaaatgcagcgaaagagttgcaaatggatgtgattacgctccgtgaacttatgaaaagggagaaattgcctattggatatgccataaagcgagagggtaaatccaagtggggattttacatatatcgccaccttttggatcaggagaaagaacgacttggtataggttaagcatccgcaaggattgtttaatagatattttttgaggaaaggagacgcaccatgagaaaaggtacagttaaatggttcaacgccgcaaagggctatggtttcattacaggcgaagatggagttgacgtgttctgccatttcagcgcattgcagatggacggttacaagactctcgtagagggacagcccgtagaatttgatgttgttgacggaaccaagggaccgcaggcatccaacgtaacagtaattcagtagcggtttaggggtaaggcattgccgaaccccataaacagagaaaggaaaatccaccatgaagatttcaaaaatcacgataaagcaactcttcgggattaaggaatggcagggggacggaaagaacattgagcttgtcggagacaacggtactggaaaaacatccgttattgacgcaatcagatatgctcttacaaattcctccgaccgtgaatttatcgtaaaaaacggagagacagagggagagatttacatagaaacagataacggtctctccattgacagaaaagccagaacggcaatgacagattacaaatctgttaaacagaacggcaatgtaattccaagtcccgagtcgtttctgaaaacaatattcacaccgttgcagctttcccctatggagttcatctctatggataagaaaacccagaacgcaacgattttggatatgattcagtacgattggaaccttgacaccatcaaggaatggttcggggagattccgagggatgtaaattacgagcagaatatcttggctgtcctgaatgatattcaggcagagaacggttactactttatgcaccgtcaggatgtaaaccgtgatattcgtgcgaagaaagcagttatcgcagatattggcagttcacttcctatcgactatgacggagagagatgggaaaaggaaaacctctcagaactctacacagagatcgagaagatccgcaagaacaacgagactattgaaaaggcaaaacgccttagagacagccacgatggaaaaatccgctcatttcaggcagacaaggaaatcaaaattgccgcacttgatacggaaatggctcagcaggaaaagaacattgagagtgagttggcacagcttgaagagagaataaaagccctcagagagaagaaagacggccttgctggtgtaaaagcggacaaggtaaaggtaattcagtcggagtatgaggcaaccgtgtctaagtatgaagctgagcaggcatcctacgcagaatacgcagatatggaaaccacacctattgatgatcttatggcaaaagccaatgagactgagaagatgaaaggccatatcaatgagtggcgcagaatgttgaacatccagaaagaggttgatgagttgcagagtgagtcaaacagtctcacagagaagatcgaactggcaagaactcttccgggaaccattctggaaaccgcagagattccgattgagggtctgaccgttaaagacggaatacctcttatcaatggattgccggtaagcaatttgtcagagggagaaaaacttgacctctgcattgatgtggcaattcagaatccggcgggattacagatcatccttattgatggtactgagaaactgtctgaggaaaaccgcacacgtctctatgagaagtgcaaaaagaaagggttgcagttcatagcaaccagaaccacaagcaacaatgaattaacagttattgaactgtaggaggaaacactatggcaggaaagaatgataactttgacgcacttatggcgatgatggcactcaaacacattatggatgatacgaaagatattgaaatccatccattcacttgtgaagtgaccgtaacgcctacatcaatcagttgcagttcttctggaaataaggcatttctcgaagatattgacgggggaagggagtgggcggaggaaac

SEQ ID NO: 494 - DNA, 5793 bp, unidentified
  source 1..5793: mol_type = unassigned DNA
  misc_difference 4186: note = a, c, g, or t
  misc_difference 4187: note = a, c, g, or t
  misc_difference 4188: note = a, c, g, or t
  misc_difference 4189: note = a, c, g, or t
  misc_difference 4190: note = a, c, g, or t
  misc_difference 4191: note = a, c, g, or t
  misc_difference 4192: note = a, c, g, or t
  misc_difference 4193: note = a, c, g, or t
  misc_difference 4194: note = a, c, g, or t
  misc_difference 4195: note = a, c, g, or t
ttactcagcaggggaggggacgtcctctatctccggctccgtccattccaccatggtggccacgcatcggttgatgctcttgccctcgccgtagaacttgcgctcatagtcggtcatcacgcccaccggcccgtccgcgtgcagatcccgcgtcacctccgacagcgcgaacccgaactgtgggatctcctccagcgaccactcaaacagcttgtcgttgtcggtcttgaagtggatctgtcctccctcagccagcacctgccgatactttttaagaaagttcccgtgggtcagccgccgttttttctggttgctcttgggccatgggtcgcagaagttgatgtacagccggtcgatctcccccggggcgaacatatccggcagcagcgcagcgtctccgtccacgaaccacacgttccgcagcgccgcgtcccgcgccttctccatggccaccaccatggcgtccggcaccttctccacggcgatcagcagcacctccggctctgccgccgcggtccccacggtgaagccgcccttgccgcagcccagctccacccgcagctcccgcgcctccggcatcagctcccgccagcgcccccgcagggcgaacgggtcccggatcaggtacgcgccgcaggcttccatccggggcgccagattttttttcttccgcatccgcatattcatgtcctcgccattttacgattttctcccatcataccccatcttgcgccgggatacaagcacgtttttccctgatatccctgtttgctgcgcccctgcccgaaaaagtgtgcaaattccggtgcccacttttgtggaaaccgctaaaaaagtaaaaagccggtgggttggacttgataaatttctaacgggacactataatgtgatatgtatgaggaggcgtatgcccacctgccggccccgtgccgtttccgggcgctgcgcccacggaaaggaaccataaggaggaacttgatatgaccaacattctgctggaaaagaagggcctcatcgccgtggcgaccatcaaccgtcccaaggcgctgaacgcgctgaattccgaggtcctgaccgacctggacgagctggtttccgccgtaaaggcggacgcggatatccgcgctctggtcatcaccggcagcggtgaaaaggccttcgtggccggtgccgacatcggcgagatgagcaccctgaccaaagagggcggcgaggccttcggcaagcacggcaacaacgttttccgcgccatcgagacgctgcccatccccaccatcgccgcggtcaacggcttcgccttgggcggcggctgcgagctgagcatggcctgcgatatccgcatctgcgccgacaccgcggtcttcggccagcccgagaccggcctgggcatcacccccggcttcggcggcacccagcgtctggcccgcctggtcagccccggcatggccaagcagctgatctataccgccaagaatatcaaggctgacgaggcctaccgcatcggcctggtcaacgccgtttatcctctggaggagctgctgcccgccgccgagaagctggccgagaccatcgccaagaacgcgcctatcgccgtccgcgcctgcaagcaggccatcaacgagggccttcaggtggacatggacaaggccgtcgtcatcgaggaaaagctcttcggcagctgcttccagtctgccgaccagatcgagggtatgtccgccttcctggagaagcgcaagcacgagccctatcagaataagtaagttaattgacaggcacaccgcctgataattaagcaattcatgtaaaaatttaagtaggaggaactatcatgaaagtagcagtattcggcgccggtacgatgggcagcggcattgcccaggttttcgcagcgaagggccacaccgccctgatgtatgcttccagcaccgccagcgcacagcgtcataaggacaagctggccgcctccctgaacaagaaggtcgccaagggtaagatgacccaggaagccgcggacgatatcatgagccgcgttctggtcgaggaggttgacgctgccgccgatgccgatctggtcatcgagtgcgtggccgagaacatggccgtcaagaaggaactgctgggcaagctggacgccatctgcaaggacgagaccatcttcgcctccaacacctcctctctgtccatcaccgagatgggccagggcctgaagcatcacctgatcggtatgcacttcttcaaccccgtgcccgccatgaagctggtggaggtcatcgccggcggcaacacccccgccgacctggtggactatatcaagaacctgtctgtggagatcggcaagacccccgtggtggtcaacgaggcccccggctttgtggtcaataagatcctgatcccctactgcaacgagggcgtttgcgttctgcaggaaggcgttgcctccgcggaagatatcgatattgctatgcagctgggctgcaaccatcccatgggccccctgcatctgggcgacctcatcggctgggacgtggtgctgaacattatggacgtgctgttcaacgagactcacgatagcaagtatcgcgcaaacgtgctgatccggaagatggttcgtgcgggcaaattgggtattaagtccggcgaaggcttcttcaactacaacaagtaaaatcagaaaaaggagaaaaaagtatggatttccatctgacgaaggaacagctgctcgttcgcaagatgtaccgcgatttcgcggagaacgaggtcaagcccctggccgctgagatcgacgaggaagagcgcttccccatggagaccgtcgagaagatggccaagctgggcatgatgggcatttacttccccaaggagtacggcggcgctggcgctgatgtgctctcctacgccatgtgcgtcgaggagctggccaaggtctgcggtaccactgctgttatcgtttccgcccacacctccctgtgcgccgcccccatcttcgagaacggcaccgaggagcagaagatgaagtatctgcccgacctgtgctccggcaagaagatcggcgctttcggcctgaccgagcccggcgccggcaccgatgcccagggccagcagaccaccgccgtgctggacgagtccggcgagaactacattctgaacggctccaagtgcttcatcaccaacggcaacgtagctgacaccttcgtggtcatcgccgtcaccggcaagaccgttgacaagcgcggccgcagcatgaaggagatctccgcgttcatcgtggagaaggacgacaagggcttctctcagggcaagcacgagaagaagatgggtattcgcggcagttctacctgcgacctgatcttcgaggattgcgtcattcccaaggaccgtatgctgggtaagaagggcgagggcttcaagatcgccatgaagaccctggacggcggccgtatcggtatcgcctctcaggccctgggcctgggcgagggcgctgtcgaggaagccatcaagtacaccaaggagcgcgttcagttcggcaagcgcatctcccagttccagaacacccagttccagctggctgagatgcacacccgtatgcaggccgcgcagttcctggtctactccgccgctatgaagaagcagaaccacgagccttactccatggacgccgccatggccaagctgttcgccgccgaggccgcttccgatgtgacccgccgcgccgtccagctgttcggcggttacggctacacccgtgagtatcccgtggagcgcatgatgcgtgatgccaagatcaccgagatctacgagggcaccagcgaggtccagcgcatggtcatcgccagcaatctgggcgtgaagtaaggtaggaggtaaaaggaaaatgaaaattctcgtaactgttaagcaggtccccgatacctccggtaaggtggccgtcaatcccgatggcactctggaccgtgcgtccatgcagaccatcatcaaccccgacgatctgaacgccgtcgaggccgccctgtccctgaaggacgagctgggctgcaaggtcgtggcgttcaccatgggtcctcctcccgcagagggtatgctgcgtgagctgatggccatgggcgtggacgagggtgttctggtcaccgcccgtgagttcggcggttccgatacctacgctacctcccagatcatcgctgccgctatnnnnnnnnnncatcatcctggctggccgtcaggctatcgacggtgataccgcacaggtgggtccccagatcgctgagaagctgcatctgccccaggtcacctatgccggcgagatcaccaaggacggcgacaccctgaccgtcaagcgcatgctggaggacggctacatgaccatcaaggtcaagactccctgcatgatcacctgcatcaaggagctgaacaccccgcgttacctgtccgtgggcggcgcgttcgagtgctacagcaagcctctggttactatgacctacgagaccctgaaggatcaccccctgatcgacaagagcaccatcggtctggccggttctcccaccaatattctgacctccttcacgcctcctcagaagggcgcgggcatgatgctcgagggcgctgacaaggctaccaccgacaagctggccggcatcctggccgccaagcacatcatctaaggaaggagaaaagaaaatggcttttaatagtgctgataccgctgccttcaagaacgtatgggtgttctgcgagcagcgccagggcgtgatgatgcccaccaccttcgaactgatctccgagggccggaagctggccaatgagctgggtgtcgagctgtgcggcatcctgctgggcgacaacgttgacggcatcgccgccgagctgggcgagtacggcgccgacaaggtgtacgtgtacaactcccccctgctaaaggacttcaccaccgatgcctacaccaaggtgatcgtggaggccgttgaggagctgaagcccgaggtgctgctgttcggcgcctccaacatcggccgtgacctggccccccgccgcgcggcacgcctgcacacgggtctgtgcgcggactgcacccacctggacatcgacatgcccaactacaagggcttcctgaaggaagcttccaccctgcccgaggagcgcatcgagaagctgggcaccgtgatgatcaaccgtgagccccacgatgtgtcccgcgacctgaagatgacccgtcccgctttcggcggtcacctgatggcctccatcatttgcccccgcttccgccccgctatggcgaccgttcgccccggcgttatgaagaagcgcgagtgcaagaagaacgtggagatcctgcatcccgcgttcgctctggaagccgctgacatcaagaccgaggtcgtggataccgtcaaggccgccaagaagctggttgacctgatcggcgctgacttcatcgtgtccgttggccgtggtatctccaaggacgtggagggcggcatcaagctggccgaggagctggctgaggttctgggcggcgtcgtgggttcctcccgcgcctgcgtggacgccggctggatctccgctgaccatcaggtcggccagaccggcaagaccgtccatcccaaggtctacatcgctctgggtatctccggcgccatccagcacaaggctggtatgcaggactccgagtgcatcatcgccgtgaacaagaacgacaccgcccccatcttcgaggtggctgactacggtatcgtcggcgatctgttcaaggtcgttcccgagctgattgagtccatcaaggctgccaaggccgccaagtga

SEQ ID NO: 495 - DNA, 41822 bp, unidentified
  source 1..41822: mol_type = unassigned DNA
aaatatctttacgattaactttttttttgttaaaatgagcttggaggaaaaataatatgaaagttaaagtaaacgaagatgcttgtatcggttgtggagcttgtgctgctattgcaccagaagtttttgaaattaacgatgagggtctttcaacagttatcgttgatgaagtagctaaggaaaatgaagaagaagcaaatgatgctatcgactcatgtccaacaagtgctatcgaaagaaaaaattaaagtgacatctgtcacttttttattatgaaaaaaaagagaataactacttattctctaactatttcttatttgatttatataactattaattttagaaacccaagtattactttgagcatatcttggtccaatagattctactgtagttaatcctttagcatagaaattattatataagttatcaatagcacctttaattccttcatctattgtactatatcccttatagccaccactacaattagggcttcccttttgtccagcaacattattacagctacggaccaaagcactacacttccatttgcaaccagtttcatgaagcattatagctgttaccaaatatggacttactcccttagaaagagaatatgtagcaataagttcaccttttccagcaagcaaatcttttcccaagcttctattaagcttatcagttaactcttccaaagtaaggccatcaaaaacttcagcccttaaagtcttagcttccgctatttctctatcctcagcaacgataacagatgtattttgaacattactatttactaaattattatttaaagacacacttgtctttgtagatgctgccatcatttttgtattaactgaactagataaaatatttttatcaagcttaatttctgtattactatttaacattaccattgctactaaaatcatcgcaaatcccaaagttgaacatactgcagcaacataattactttttttcatttttcacctcaaacttattaaaaataagtatagcacaataataacataaacacctaaagttgtcaagttgtgtaaagatagcactcccaagtaaaaaaacatacaactataaaagtcatatgctttttacaatactattttattgatttaataacaaaatcataaccaaaattacttttagtaacttcaaaggtaacagtatatttattaccttgaacaagtcccaacgatccattatcattaatatatttcatttgaaacgtagtatttttttcattaacaaatttataatttctatatgtatatgattgattcccctgtgatgcaaaaccaacagtacctatctcagtcaaggtaaatgaatcagtatgtgttcccactgaatataatccaattttatctcttaattgatcttctgttgaaactctacttatatccttattatttgatctaataaatatcttgtaatcaacaatagtaatttcactaccctttttagcataatatatatttagcttaatgtaatctttataattacttaataccttaataaaatcgcttttactattttccaatatataattagtagtattgccagttttatcctctatagaaatactacatttagaattaaaacaagaatacccttgcacactaacatcttctaccaaagttccagaaacatcagttattctaatatcaaaattattagtatgaagcgattgtctaacaatatcaccaattccaagtaacttaacaaaaactaatacaacaactgccataactatttcaacagctatccctaaaaatatcctaggtacacttgttccacccttagaagaacaaatacttttcaattcatccacacttttaagattatttttagattttatagtagcaatcttttttttcgcataagacaaataaattttatttatgaataaccccacaaccacattaaaagcatacgttactaaatagttattggcaaggcatagtataactaaattaattaaaaaagctaataaaccatacaaaaacatttttctataaaacatatataatgatgtaaagaaaaaaccagctagattaaaaggacttctagttattttttcataattattacctataaaggcttttaataaatcctcatcattataagaattattatttatattctgctgatgtgaaacagtactaacactttgaactgattgcatcaatgcttgattttgtatactctgattggaatttgaaacagaaaaataatttccatatacgttaatgcaatttaaatgttttaaaagactttctctttattaaatataatattattaataaataaatcatggtaacaacaaccattacaaatgttagtaaataaagtgaaactttaactctactaatcataagtaatataacactcactaataaattactaactaccaaacgcatatctttaatctttgactccctatcatatggttgaactaaataataaatagataaatgataaagggtaaatataatagatgaacttattaaaataatcaatacatatattagttccaaaaaattcattcctaaataaattttaaaaataacatctataaaaatacctaatatcaatataggaaataaatttaaaagaataagacttttaagtctttctttaaataaagaaaaaacactttcacttttacgataaaaatcatattccaaaagactcctatcacaattaataaacataatctgagtaatttgtgatgtcttatttaatgaaaatattattaaaaatactagcataaagtatctcataaataattttgcgaaactatatccaagtcttttatcaacaaaagatatcaaacatactaaaataccaataccaaatataactactacctctctaagaatgggcctctttaatataagactatgtcgtcttataaaaatatcatttaaataacgataaggattattagttatcattttattagttttcacataataattgcctcttttaatttcaattaattcatcccttgtaaaactactaccatcaaagtataaataactgttcaaaccattaatcattttatacatcaatttataatcttttactttaaacatatataaaatacttaaaatagcgagtaaacaaaataaaatatcaaggaaaaatattttcatattgcttatattgatttcatttttgagaaaataaactaacaatatagtaaataatcctaacaaaataaaatataaaaagctattatttaaaagtatatcttttctttttttataatagagtaaattaaccccttctcccaccagtctcgtaaataagaagaaaatcatcataagaataatagttataatcttaaagtttaacagtgaatttaaaagtaaaaaagaaattagtaaaagaaaagaatcacttattgaattaagtaatatatcacatattatatactcttttgcatcgattccaaataaaataatactttgatatattttcttactagtctttaatattctagctttaaccaatccccctaatagtgttaaaaaaataaacaccacgacaaagtaattagtctgataattcttacaaagaatcttcactaataaataaataatatataaataaaatcccttgataataactttacccaacatatctagaaatatttgaagtaaaagtaatactttttttatgttagaagaaatattatttttctttattaaacctacttttcttaagcgatataatagtaaatttaccccagaataagattctatcttcatagttataaaaaaattagttaacattttcacactctaatgactgaataatttttttcttatattcattatcatttaaatctttcttttctatcaaattaaatttaccatctttaagtattattatttcatcacatagttctatagctatttctaatatatgagtagttatcactattatcttattctttttaatttctcttaataattttttcatttgttcctgtactaaaatatcaagtgaagtaaaaggttcatccaataataagacttttttatcactaattatatttactagtgtttgtattttacttttcattcccgttgagtattccttcataattttatcttgatcctctaaagaaatattaaccatttcaaagtattcagaaacacttttcatattttttatcttttttttatttatctctaaataaaattctaaaaattctcttcctgtcaaaaataatggtacattaggagtagttggtactaatgaaacatcactttctaatatcttatttttatctaatataacctctccaccatcactttttatattttgatctaatatattaaaaaaagtagttttgcctgctccatttttacctataattccataaatcttattatctttaaatgtaaaatttatattatctaagataattctattattatattttttggttaagtcttttatctccaacataaaaattatcactccacagcatcaattatatcacatattttaaaatgatgtgttatacttatagaagttggtggtattgtgaaaagtaaatcaaaattaattttaaatatattaactatcataggaattgtagctgtaatcttttttatttattttgcagttaaagaaaggtggtttttagataatgaaattttactaacaaaaattaaatctttcggactactagcccctctttgttttattcttattcaaatggttcaagtcgtcttaccagttataccagggggagccagttgtctagttggtgtaatggcattcggtgctgttggaggttttatttataattatgttggtcttgttctaggatcaatctgtagttttcttctttcaagaaaatttggaatgagtatcattaataaattatttaaagaaaaggatataaaaaaggcccttgataaaataaataatagcaaatatgatttaattttctttttaataatacttcttcctggattaccagatgacctattttgttatatttcaggaattactaaaatgagtttaaaaaagtttaccctaattattctaataggtaaaccattaacacttcttgtgtatagtatatgttttcagttttttcccattatatttggcaaatttctataaaaaaatattaagactaaacttaatattttttatttattaaaagaatttaacttgtctattttctcttttaaaacatcaataaactgattaatttcatccttcgttgtaagatatgaaatacttattcttatactatgttttgcatataattcactcttcgtaagttctaaaacagaagtacttaaatctcccgctttatgacacgctgtttgagtagaaatataaatatcatcttcttctaaagcatgaagaatagtttctggtttaacatttaaaatgcttatattaacaatatgaggaagagaacaacttgtactatttagaataataccatctataagctgaagtttttgcttcaaataattactcaactctaaaacatgtgcatacttttcttcaaaatcttcatatgcaagtctcaaagcttttgacatagaaacaattaaagctgtcgctggagtaccactacgatagattgtagtagactttcctccatatattataggttcaatttccaaactcttattttttaataaagcgcctactcctttcatcccataaaacttctgactagacatggaagccatatcaacattccataaattaagttttaccttcccaatagcttgtgttatatcagaatgaaaaattacttttggatacttttttaataaatttccaataccatctaaatcttgcattaaacctatttcgctattaacagcgcatattgaaactaatattgtatcatcacatattaaactttttaaatcatctagcttaactcttccgtcaccatctatttcaacatagcttactctaaatccttctttttctaactcattaaaacattcactaacagaagagtgttcaagtcttgtcgtaataatatgctttcccctattcttatattttctgcaaactccaaagattgctaaattattagcctcacttgccccactagtgtaaattatctctttttcttctatatccaatatcttctttatttgtctagtggcatcatttataagcttactactttctaatcctaacttatgtaaagaattaggattaccaatatagttttttgtcaccttaacataagtatctaaaacagaatcattaactggtgtggttgcactataatctaaatatatcaagataatcacctctaaaattcaatatcattataacaaaaaacaaaagaaaaaactatttcaaaataaaatagttttatctaagacccttttttaatgttagcattttgttttctatacgtctaaattcttgtgcacattcacgaagttcatcacgttctcttttggtaacacttccattactcttatattgtagttcatgttctagtgctgcccaagcatccatcgccaatgttctaacctgaatttctgcatctataaactcaatatcatctttaaatgaaaccggaacttttactataatatgataacttgaataccctgattccttaggattttcaatatagtctttttcatgacacacttgtaataaatcactagacttaattaaatcaaccatctcatatacatcatcttcaaatggacaaacaagtctaactccaaccatatcatgaatatgttcctctaagttttcaagagttatatcatagtttcttttctctaatttgcctaacgcactatcaatactttttatacgagcatttacatgttcaacactcttagtatgatttgacatatcataatccttaattaatatttccaaatgggtctttaaaacctgtaatgctgcttcatatttaaattgcagcttcttgaggtcctcctgtgaaaaattatttgtgcttttattcaaaatattcaccctttcaattgtattatatgtattttaaaattattactacttatcatatatccctcatcagaggaactacattataccacatatcaataaaaattgcaaattttttctttaatagcaacaaaaaaatgagttattttaactcatctatatatttttttaattgttttgaatcaggtccaagtattatttttaactggttatcaatctcaactatacccctagcccctagcttttgaattccttctttattagccttagttacgtcttttaactcaaccttaaatctcgacatatctgtctcagttgaaattatattatcttttcctcctaaatactccacaagcttatttaaatcaatactggcatctttcttactagcttttaatacggctaataaaataattaaaagtacaattcctataattacatattccatcaatttatcacacactaatatttattagttcctttctattaacaacatctattatatattactttcataaagttgtaaatatttcatttttatatcatatattttaataggttaatacctacacaaatttatttataattcatattgtatattagaaaagaataaagaggtggaaatatggtaaataatgatagttgttgttttgctaaaattttaaaagtaattgaaattttacaaaatagctcgactaatcctgcttgttgtgaggaaggctgcgacaaaccatttctaggacctaatcaaaatttcatatgttacaacactagacctgtacagttctatacaagagctggaactttatttagtgcttcttatacccaagatgaagaagttttaaatagcaatgtatttcgtgtagaaaaggtagacgattgttgttgtaaatgtaggatattacaaagaggtgctaatcaagatgaatttgttgcgactaacagtttcattacaattaatttaaaatgtatgtgtgtattaaagtgtcttaacgatgttgcactagaaaacatatagaaaggagaataattatgtgtgaaaaaagtaataacacaaatgaatgttcttgcctacatgatttattgaaagaaataattagattacaaaaacaagataactcttgttgtaatgaagatggttgtgataaaccttatttaggaccaacacctagtttagtttgttacaatacaagaccacttaatttttataactgtcaaactgctgctttatggtcaatagaatatacttataatggtaacacttcaacatcaacagtatttagatgtgaaaatttagatgattgttgttgtacatgtagaatattaattgataatggtaataatgactatacagcgaccaaccaattctttacaatcaatttaaattgtgttagcgcaattaaatgtcaacctgatgcttacgttgaaatatgctaaataaaaagcgatcacaaatgtgatcgtttttattttctttgaatactaactatatcactaattttaattatatcctcagttaaagtatatagtctatcagtactttttctaataatagccgtatcatatgttttatcttttgttttaataattaaaggtttattaaaaataaaaccatcttctttaaataaatcatcaataaacttttctatatcactattaacagacatatcatatttaaaattactagtatttccagcataaacataatccttattattagaaaaatttttctctattttgctccgataaattttaggtaactcagacattttttcacctcaataaattttatgtaataaatggttaaaatttacaatattttagcataataaatataggagatgatttaatgattaaaaaacgaaaaattgatttaaatattattataccaattatttgctttttcattatcagtcttataagtattaaaagtgcccttacttacacctctcctgatttaggaaatcttgttttcaaacaatgtatttggtattttctaggtacgatattaataatatttattctgcattttaaaaataattatttatatgaaaatactatttttttatatagtctaggatgtattttattactattattacttttctttggaacacctattaataatagtaaatgttggtttactatcccaggtattggaagtttccaacctagtgaattcatgaaaatatttttaatgttaacccttgccgtcatgattaaagaatataaattacaatataaaaacccatccctaaaagaagaatttatatttattttaaagactcttctcattgtcttaattccagcaatattaacctttctagaaccagatacaggagccgttattatgtatcttataatttatttttcgatgatgatcctatctggcgtaagacttagatggtttatcgttttagccctaataacagtagctattgcgacatcaatcttactactttactatttaagtagtgaaaattttattaaaatatttggaaccaaaatgttttatcgttttgatagaattctagaatggaaaaaaggttctggattgcaattagaaaatgccttggcatcaataggttcaggaggcctactaggtcacggttttaacaaaactcctgtctactttcctgaatccgcaacggactttatctttgctgtttttgcttctaattttggttttataggttcaataaccctagtccttatcatcttttattttgacttctatataattaaaatgatgaaaaaacctctgcctttaacagatcgctttattttagcgggcattagtagttgtctcatctttcaacacatagaaaatattggcatgactattggtctagttccaataaccggtataactcttcctttcattagctatggtggatctagtcttttatcgtatatgattatgttaggaataataattaatataacaaaagaaaaagaaacatcatataaacactaaaaaagatgtctattgatataaactctcatagacatcttttaattttttacctattattttcaaatccctttcttcagcaatctttcttgtattattttttaaagaaggaagttcattttctaaaattaattttattttttctgtaaactcttctatatttttagctttatatacatttactccatcttctaccataccatcccaaataggaatatctctcactaaaatattacatttcatagcgcaggcctctattaaaggaattccctcggtttcttcataagttggaaataaatataaatcacatccacctaaagcctctcgtataagttctttttcgccatatcctggaaaaataatatttttaggtaagtttttaaaggcctctcgtacatcactagttgccgcttttaaagaactatatccataccaaataaaagtataatccggtaatctacgtgctaactctataaaatcaactataccctttcgtcttatataaagacctattcctaaaactatcttagtattactagaaagattataacgctttcttaaattctttctataatttttattttctttaaagaaagaaatatcaattccattagaaatatctactatctttttatctttaagttcatcataaccttctaatattcttttagaataaggtgtaggagtaacaattatatctcctaatctataacatttacaaatccactttttaaaaagtttactagttgcatgtcccattataaaaccatctctataatcttcctctgttgaatgggcatgataaactatttttttgccctgttttttggctctcttggcaaacaaatatgacttaggaaaataagtgttaatatgtaaaatatcataactatcatgaggatttgtagtatataaaacattctcctcatcaagagctatcatttgatgcttaatagccttcccaagaccacttttaccgataactttttctccttctgtataaagcaataccataaaataactcctaaacttcttgaataactgtaataatcattggttttgattctgttttctcatagaagaaatgtcctaaacgctcacggacctcatttttaattttactataatctactctcttagtgttttctaatatattatcattaataattaacacacataactctcttgtttgttccaataactcttgattatcttttacatagataaatcctctagttaatatttctggtccaccaacaatttttttagtagctctatctaaagtacaactaacaataacaataccattttctcctaacatctcacgatcttgaaggactaaattaccaacatcttccccgttgttaccatctactaatatttcatcaacttttactttatcaaaacatttcaaattaagttttccatcaataaactcgcaaacatcaccattttgttttaaaataatgttttctttagaaactccaatttcttctgctactttagcattagctaattgataacgatattcccctttaactgggaaataatatttaggattcattaaattaatcattaacatcaaatcttctctagaggcatgatgtaataagtgttttttactagataaattaatagcgtcagccccaagcatagctacttcatccataatttcagcagttactttttcaataccatcatatgttggttctgtaataaagacagtatctgtttcttttattttaatatacttatcaaacccttttataattctttgtagattagcaaaaggactttctttagcgtctgaaattaaaacaacagtatttttatcatttaaatttgttaaatcgcctactattctcttatcaaaattaatatagccattttctcttgcataattaatagtttcttgtaatctttttcccattattacaacttttctgtgagttttacttacttcattcaataactcctgaattctataaaaatgggctggaaaaacagttgcgattattctatcttcactttttgataagacatctctaataaatgatgccgccctattattaggactagtatgtccctcacgttctgcataaatagattcactaagtaaacataaaactccttgtttaccaacataagctaatttaccaatatctgttttatatttttcaggtacagtagaatcaaaaacaaagtcccccgtataaacaatcgctccatctttagtatataaaacgtataatagtgaatccggaatagaatgggtaacactaattggaaatactgataaacgtccaaaattaatcttaacatgaggtttaatttcaactaattttacctttttcaaatcctcatcagacatatccttctttaaaatatccaaagttagtttagcaccataaacacttaatccaggaatagccctaacaatatcaggaagagccccaatatgactttcatgtccatgtgttaaaaatataccaactatattctttttattttttactaaataatcataattaggaataatataatcaacacctaaattatgttcattatcatattttagaccagcatcaaaaacaaaaatcttcttatctacttcaactacatataaatttttaccattttcatttaatccgcctaaactaaaaattctaattttactcattttcttcatcctttcttaatatttaaaaacttacattccaagaaattattataattaaaataatatttatctttcaaaatattaccttcacataatcaaattttaatcccgacacaaataaatttaaatataatttcttaaaagtaaataacgtagatattataccattatataactaatttgtctagggcatcttttgccgctatttgttctgcctcttttttacttttggctgttcctacaccatatgatatattatctattctaacttcaaaggtaaatgttttattatgagcaggtccactttcttttattaaaacatattcaatactttgtttattagtttgtacagcctcttgtaaagctgatttataatcactaaagaaagttacattatcattgatatatggtgtaataatatttaaggctactctccttgctgtagcatatcccaaatcaatatatatagctccaattaaagcttcaaaaatatcagcaactatagctttcttatatgtaccagaagctttcatttcgccatgtccaacttttatatatttagtcaaacctaaagccgtagaatattgatataaagcattctcacatacataacttgctctaactttagtcatttccccttctgtttctttaaaatttgcatacaaatagtcggcaacaactaaatccacaacagcatctcccaaaaactcaagcctttcataatcttgtcttgatttatgttcatttgcgtaactagaatgtgaaaatgctctctcataaagttttaaatctttaggatttatttttaatttgttaaataattcttccataaaatcaccattttcattatatatcattttctattttatgaaaagaataaatatttttattacaagttaaaaatcgatattgaaagataccaatatttttagtaaaataagactaggaggttttatgaaaagggtattaattttttttattaattgttatcaaaaaatacccggaagctttcatcgtgcttgcaggttcactcctacttgctcagaatatgccaaaatagctattgaaagatttggcgctattaaagggagctttctttccataaaaagaattctaaggtgtaatccttttggaaaaacgggatatgaccccgtacctctaagaaaggaaaaaaaatgaaaatatcaaataagaaaattttattatgtcttctctcaatgtttatattgttgtcagttactggttgtcgccaagatgatatggaggatattgatattatagttacaaattatcctaatgagtatatagtatcacagttatatggaaaacattctaatattagttccatatatcctgatggtgttgatatagataattataaaattactaataaaaggaaaaaagatatcagcaaaaaagctcttttcgtttacactggattgattgaaaaggaaagaaaaattgcagttgacttattagacattaatggaggacttaaaataattgatacctcatacgtcttagaaacgcaaaatagcatcgaagaactatggcttaatccttcttatcttctaatgatggctaaaaatgtagaactaggattaaatgaatatatatctagtagttatttgaaaaaaggaatcaaggaaaactatgaaaaattaaaagttagtctttcagaacttgatgccgattatcgactaagtatagaaaatgcgaagaaaaaaacgcttatcgttaacaataataacttaaaatatctagaaaaatttggtttaacagttattgtcttagatgatgatgcaatggacaaaacttataatgatgtaaaaacattaatagatagtggacaaataaactatatttataaatttaaggatgataaaaatagtactagaattgaaagtcttataacagaatatcctaatcttaaaataacagaacttcacaaaatagataatattacagataaagaacgtgatgataaagaagattatatatcactaatgaacaaaaacttagaattgataaaacaagaactatatcaataaattacaaaaaaaagattgaaattactcaatcttttttagttaacagaaatcttttctataaacttatgaaacgaagaagttgatctacttaaagtaaatacacctagataagtaaacattcccataactgcacagataatatcttccattgtatcccttaccccggtatctatactatgttgtaaattcattcctaaggtattatctccaaagaactcaaatatctcccaaaaagcagctattgccatacaaaatcctacgatatatgtgtattttagtattttattatccttctcttttttagcaagataattatataaaaccattccaagtagagccgtagaaaaaccagatacaaaatgcataacaacatcataataagtcgttttattataaagtcctacaacacaccctaaaaagtccgcaaaaaacataaataaattatagacaaataaagcattaggatttaagtttaaaacttttaattttctaagaataaaagggattaaaagcacaagaggtaatgccaaacaagtaagtatcatattattgttttcttctaccaacgccctactaaaataaacaccatctccacataacattattataactaaaaaataattactatactttaacttcatacaaaacctctactactgaattattctaattaaactatatttttgatcaactacactactcttataatttttatcacttaaatcaatattaactattttttcttttttgtctaatgccgtagatgtatcaactacttgtagtgtgttgttgtttattaactccatatcagacaaaacattataacgtgatttataaattccttttactttgccattatcatttacataaacatagttatcagtataatagtaatatttcttattagaaataactaattttttaacattacttacaatctctccattattaccatttacaatattatatccataatatgtataatttttattatcagaagttgatgcatataacaaaacattatcagtaattgaaagatttatactaccgttaacattatctaaaaccttagttatttccccattagcttcatttactgcatataaggaattatcagcctgataaaataacttttttacagtatcactatgcgtaatactagaatacttattagaattaaatgtactaacattaacttgttttccctttttcttatagttaaaaccacttattccacaacctgaattattaaagtaaatgatcttatctgtaaccaaaatattagaagtaagaccactagagttatcactacataaaacaggtgtataagtatattcctcttccaattcataaactccattaccttcatttaaagaaatagaataaatattattacttccaaataggaaataaagtttcttatcataataagtataatctataaagtctcccaaattaccagttccctgagataaattataaatacgcctattatatccattcttctttaaagcaacaatataatccccctctttagcgaaactatatgttccatcaagttcactattcaaactaacaatattatcatcatctgttgttttcttatcttttttagtattaatatttcttacaagaataattaccaaaaagattactacaattaaaactaataatattcctcctataattaaaaatggtttaaaagaaaaactcttcttacctgattcttcagtttgtaacccgttcatatcatttctcctctactataatctaacattagtttaacacttttatatgaaaagaaaaagtactaaattaatattaaaatttttaccaatttatacattttctaactaaagcaaaagaaaaaatgactatttaaactattaaaatcaacctacttaagcatcttttcagactaaatttttctaattggctcttttacaagtatagtttttcctgctagagtactcatgaaaggaggttttatgaaggaaaataatcataagaaatttttctctcttcttagtgatactacttttaagtacttatttaaaaaggaagaaaacaaaccattttttaggaaaactatcctagatgtaacaggtattgatattaatggttatactcttattgataatgaaattaatagtggtaataacaaaaaagattatcgccttgacattttactaaaaaaagatgatagtatcataaatattgaaatgaatcagtttattagtagaaattattacaatcctacttctttaaaaaatagaaattatttatattccctagcttcttctacatatactagtggtgataaatttaagataaaatatattacccaaatcaactttaataactctttatgccctactgataaacacattacaaatgttactttcaagttagcggatactaaacataatgtttatttagatgatatcaaaatccatgaaatatacctagaaagttttaaacattcatgttatactaaccttggaaataaagactatcgtcttttaatgtttaccgctaaaaattttactgaaatgaaagcattagctggtaccgacaaggaggctttaaatatcgtggatgaattagaaaaactaaacaaagataagtattttggtggactttatgataacgaagttattcaaaaaaagttaaataattcttatcatgatgaaggctataatgaaggttatagtactggctatgacttaggaaaaaaagaaaccaacaaagaaattgttttaaatatgttaaaaatgcaaatagatattaagactatttctgaagttactaatttgtcagtcgacgaaataaagtcaattattgaaaacaaaaaaagttaggacatcctaactttttaattttttatttgaaaattatcatctttcggtacatagcacacaatactattattacttaaatcaagactattactaacctttaaaagatcctcatatttaagttgtctaattaaatccaccttattagtaataatcttattataattaattaaatcctcatatagagaatctccaaccgcatcaatataacaactagcctttattttattcgcaatcattacttttttacttctaataaagtcatcttcattgattatattttctttatcaagtaatgtttctttaataaaagataataactcattttgttttttagattcgccataaaaatttaaaaccaaataatcatctgtactatcaaaattataataaaattcagaatataagtcttgcatctttgccttctcactaaaaatagaagtactgccaaaaagtatttttaaaagtatagctaaatataaatctaaaatataatcatcctgaatattaaaatcctttttcttcattttaaaagaataagttaatttactaacatcaatattaaatttaactacttcacatcttttcgcaacagcatatggttctttttccttttttatttttggtaacactttatatttattttctctattttccactctttctcgaataacatctaatgccgtttcaacactaaaatttcctactattaaaataaacatattgtttggttgataaaaattgtcataacaagaatataaatcttctttagttatacttttaacctcatctacttccccaccaatatcatatttgtggtgatctttttgaaaaatgcattttcttgtagtatcatcgatggcgctatcaaccatgtccttatacatgtttacttcttcaataataattcctttttctttttccacattttcatctgtaaaatacggactattaacaaaattaagtaaataatctaaattttctctaaacttagtgttaccagagcaaatatatctagtactctcaaatccagtagaagcatttacgtaacatccactttgactataaaaactaaatggatcaattccactttcttgttcaaacattttatgctctaaaaaatgagcaataccattaggaactttcacatttttacgactaccattaggacaaaattctgtaattaaagaaccatattttgtcgcataagttgcataataccgtttcatatttttaagaggtaccaaatacacttcaaacccattggcaaatttctcactatataaatctatatctaaaccactcaatgtatcctttttcattctttgacaccttctaacatatatattgtatctatgaaaacctttttactaacttttataatatcatcacgacttactaacatcatttttttcttctttgtctcaatgtcatctacaccaagtaaatccatcatataataagaatcaataatatcactttgactttcttctatttcatctattgcactaagatatatttgtttagccttagctatatcatcatcaaggaatttacccttcttcatttgattcatttcctgccctataagtttaacaacagaatcaaagttatctcttgtaatacccgctcttataagcattatattatctaacttattaacaactgaagaaatataataagccattgaatgtgcctctcttacttctttaaataacttcgaatcagttccaccacctaaaattatattataaatagttaaagcataatttctttcataatctgtcaaaccaactaacctacatccaactgcaagttttgattgattagaatcgttttcttcaagcttaataagttttttactacgactattcttttcttctaaacgacaaggtatcgtaatctttttgaatattttagttggaaaattagctcttattatatcttctatttctttaaaatctatattaccaattacaaaaatatccataatatcccgttctatcatatttttataataatcataaagaatagttggagtaatctgttctaagtcttctaaataaccagctgctcgataagataaaggactactactatccatttcctctaacattctgatgagactataattatctccgttttcttttagactactaagagaaatcaacgcatcacttttaacaatttgaaaaaccttttcatcaaacatattagaagaaacattaggtttataaataatatcactaaaaaatcttaatgcctcctctaaattgccatcttcactatatttgtcttctaaaacatttaaagaaaaacataaattactataattaccaaatctagatatattataaccaatattacatgaatacaaatcttgacactttaaagctatatctcttctagtcttgtatttttcgtttgttgccattaacatagccgctaaaaaattacgaatagtaatttcattcttttttactggagcattgaaaaaaactttagttcttattgttttaaacttatcattcttaattaaatgtagcttataactccctaaatcctttactttatattccatcatttcacctctctttttagtatgaacaattttaaagtattttataaaatagaatcaagagctagtgtaatcatttttgtaaaagaattttgtctttcttcacttgttgcttcagcaccagttatcaaattatctgatactgttagaatacaagcagctttcttatttaattttttagcatttaaaaacaaagcaaaactttccatttctacacctaaacatttgtgatcattatataatcttgttggattttctaattcactataaaaaacatccgtacagtaaatattaccaaataatatttgatcacctctagcatcagcgcattctaatattttattatttaattctatacttccctctgaataaggaacattttctccattcaaaatatcatcataggcagaattagagtatgatttatctactaaaatcaaactgtacaaatctaaatttttagtataagctccacaacttcctatcctaattattttatctacatcataaaatttaaataattcatatgaatatattcctatactagcatttcccattccagatgaaaagacagttacttcctttcctttataagttccagtataagctaaaatatttcttactgaatttactaaccttgggttatctaaatatttttccgcaatcattttcgctctaagtggatccccaggcattaatacaacttttgctatatcttcctttttactttctatatgtggtgttggcataatttaatttcctccttttatacttctaatattagtatagcactacaaaatcattataaaaagaaaaagagttaaactttacactaagtctaactactttataaattattagatacataattaacttgaaaatctaaattaacgaaaacatcattttgaggtaaatctataggattcaaatcatccctatactttacttcaacaattaatgttttaacgcctcctgctgcaattacgtcgccacgtttaagttttttattgttactataaacaacttcatatttcaaaaacttcttcacagaatcacttaactcggtcattacaatattatcaacttttaacatcttcattagaagtatttataacatcaatactaaattgatagtaatctcctggaacatcaagattaacatcatatgtaaatttgcatttaccatcatcaatcctcaaaggaatagtattattacttttaacattagtgcttaataatttaacattatcaaagtaaactcctaaatcttcattttgacttttagtggtagttaacgctaatgtattaggaacataacataatgctccacatattaaaacagatatcataaaaacaataatttgatatttctttttcataattactcaaccgccttttcttttatagtattccccctataaatgtttattattataacatattttttaaaaaaaataaagaaaaaactgcaaaaagaaaagacataaaagattatgcctttataaattattgttgactatcaacattttcttctaattttaccaatacttctcttggcttagaaccattcgaaggtccaataattccacgttcttcaagtaaatctataattcttgcagctctattataacctaatttaaattttctttgtaaaagtgaagcactggctttttgcgtactaataacaaattcaacaatatcattatataatggatcatcatattcttcagtctgattcatatcttctatttgagaagcactcttatcagaattagatacttctaaattcatcattgaatcatcatattgagccttttgttgagaaactgtataatctataattcgttttatttcatcatctgtaataaatgaaccttgaatacgcagtggagaattcattcctattggtaagaaaagcatatcccctttacctaataagttttctgcacctgtttgatccaaaattgttctagaatctattccagaaccaactgaaaatgctatacgtgatggaatatttgctttaatcaaaccagtaattacttcagttgatggacgctgagttgcaactatcaaatgcattccggcagcacgtgccttttgtgtaattctaagtattgaatcttctacttcctttgccgcaaccatcattaaatcagctaactcatcaatgataataacgatatatggcattttatcctttttagcttcaatatccgtaattttagcattttctttatcaatataatcattatatccttcaatattcttagtcttagactcactaaatacttgatatcttctttccatctcagcaaccatcctagaaagtgcaattgatgcttgtttaggatccgtaacaactggtcttaataaatgaggtactccattataaacagaaagttctactacttttggatcgaccatcataagtttaacttcatctggttttgctctcattaaaattgaacaaattattccattaacacaaacagacttaccagaaccagtagtaccagctattaaaagatggggcatcttattaatttcacaaacaccaatatcacccataatacttttaccaagtggaaccattaatttcttattcatattactttgcatctgtttactactaataatttcataaaaactaaccggtgttggagtatcatttgcgaactctattccaactgtattctttcctggaatgggtgcttcaattctaacatcctttttagcaagtgctaaagatatttccctattgatacttgtaattttattaactctagtaccactagctatttcaagttcatactgaacaacagttggaccaacatgaacttccactaccttaccattaatcttaaagtcctttaaaacctgttccaaagtaacaatatttttttcaataatactattatctgttgctttatttttcttcttaggtttatctaaaatatcaattggcggtaaaacataattcctattttgttcactatgtgatacatgccctactatattatcactatcttcaacaacactcatttctttaactgtattattttctttcgcttcatccttatgtgttaattccgcaatagatgtaataacctttttattatcaggttgttcttcttcatcttccccattactaataataacatgtgacatagtctcttctaaatttttatcagatttaattttattattcgctttctcttcctttttatgagctcttttttctgccattttttcttttgaagtattaagtttttccttaacaaattcaaatacagaaaaaccagtaaataataacacacctaatccaatcatgacacaagaaacaatttccattccagtaaacgagaataacttatcaaaaataatagagaatactcctccaactattccaccgcctacaacaaaaacatcatctatctttcctgtattcataataccattaaaagacgcaattaattgattcatagtctctttaaaaataagcatcaaattaccatcattttgtgaaacaaattccttatgcattaagactaaaaaaccaatcacagctatgtaaataccaattaatttagttgtaaacaaatctggcttttcacgatttactatcatgtacaatccaacaactaaaaaaacaagtaataataccatatagatagatcctactaaaaaaagagaaaaagaggctatcgcacgtcctactataccatatttacctattccaagtatggaacacaaaattaaagcaataccaattaattcttctttatgatcaaaagtttcttttttttctttcttcttttttttctttgccatactaacactccctagaataaattatatcattataattttttatttccaattataccatagctattttaccgaaattttacataacttaacttatctatcatctaaagaaattataacattaagagttaaagttgtaaattaaaagaaaaagagcattcctgctcttaatttaaaaatttctattttgtaagaatggtggtaattcaaatccatcatcacttgaactatcatctgtagaagtataagttgtttctccacttctacgacgaggagcttctttttctacatcacttggtgtaggaatcttaacgctttctttttctttagccaattgacgagctctcttatcaaatcctgtcgcaataacagtaacaattacctcatcagttaagttttcattgataacagcaccaaatattgtattaatatcattacctgatgcagctctaacaacctcagcagcttgttctgcttcaaataaagtaaggttaactccgccagtaatattgattatagcatcagttgctccatctatacttgtttctagaagtggagaagaaactgcatcctttgctgcttcaatggctctatcttcgcccattccaataccaattccaataatagcattaccagaatctttcataactgatttaatatcagcaaaatccaagttaacaagtccaacaacagcaatcaaatcagaaatagattgtacacctctatgaaggacattatcaacttccttaaatgcttgaagcattggagtagttttatcaataatttctcttaatctatcatttggaattacaattaatgtgtcaacatgtttctttaattcctctaatcccttaagagcattctccattctttttttaccttcaaaagagaaaggtttagtaacaatggcaacagttaaagcgcctaatgcttgagctatttcagcaactacaggagcagcaccagtaccggttccaccacccataccacaagtaataaaaaccatatcggctccagataatgaatcttctaattcttttttagactcaagagcagcctcttttcctatttctggttttgcaccagcaccaagtccatctgtaagattagctcctatttgaatctttacatctgccttagaattttttaatacctgtaaatcagtattagcaacaatgaactcaacgcctttaactccagactcaaccattctattaacggcatttcctccaccgccacctaatcctataactttaatttttgctaactgatccatctctagttcgcctatcataccttatcctccttattttgtaaaaagctaccaagcatcctatttaatacagaatcattcctactttttactgtaattattttttttagatcttctaactcgaacatattacactctgtatctcgaagagtaagtttattatcaaaatactttaatagtccaaatacactagtatagctattatttctaatacctatcttattattgttataaacataagctaaattaccaaaaacactatctaaaacataactaaatcctgcaatttcgcttagtccacctactacgattatataacttatttttctatttgttaagttttttatttcttttttagaaacttttaatatttcttctattctagcctctactacttttgaaacatcaagttgtgtaacattatactttgtaccacctgttgttttaagttcaatcttatcgtttgcatcagcatatctacttgccgcaatgacaaaattttcttttaaagctctagcatcttccatactaatattataaatatatgataaatcatgatcaacataataactaccaacatttataacactatttttaatcataatacctttattgtatactgaaacattcgtagtatcttcacctatatttatgatagccccaacttgattatctaagctatcatttctaaccgcaaagtaatctcctgtcgtaccaaacgctatatcaactacctctagtccacataaatctaacacggctaaaaacttatagagttgctctttgggagtctcagtaattactaattttgtttctagtactttaccacatcttcccttaggatctttaacattaaggtttccatctatcttgaaagttattggcatagctgtaactaattcataatcttgattaacttgtcccataatggcatctctaaaaacttcactaatatcttcaccagtaatacaatttggatcaataacatctctcttaccacttacaatattaaaaatacaattcttagtagaaacacaagcaacaatctttttcaacttaatatcaagttttccttctatttcatcaacagccattttaacagaattactaagttctctagcatcaactacttcacttcttttaattcctctagatttaaccttacttgaagctaaaagatgaaactcacccttaattttttccaacacgatgattttaacactatcagtacctatatcaatacctgcataaatcttcttcaaagctccatctcttcctttccatcctactctacatataaattatactataaagaatttaaaaataaaagaataagtttaatataaaacaaaagattatccttttagataaccattagttaattttgggctctagattaacaagttttaacatacattccacaacttaggtattttctttgtatttttttatttgttattttatagtttttaaattttattggtaaaccacgcgctgtagaaaagtcatatcccgcttgtacttgataatgaatatgtggtcccatagtattacctgagtttcctactaaaccaataacatctccggcacataaaaagtcaccaattctacatttaaaactattcaaaagaacatgacaaattaaactatactcattatgttcatgttttattaaaatgtaattacctcttacgtctttacaatcgcaaatagccttcctaccatcaacaatcctagtgtcatcatattcattaactaagtcgacaactacaccatcacaaggacaaataatttcttgcttataactataaaagttattacactcatgataatctccaaaataaggtttatcctcttttcttatctcaaagtcataagcataacgttgcgaaattatatcccaagaatgagaagtttttttcgtaacccctccaaattctatataccactctcccttaaaaggaagaacatatttattcttagacattatatatcaccctattaaatattatgattacatcctactctaaaaacatttttctagtaacaaaattaaacaccattaccaccatagtcgcaattactttagctaacatataatagatatttaatttatcaacacataaaaacataattaaatcattcaaaagaagacccaaagcgctaaaaatcataaatattacaaattgttttttagcatctttttccttattaacatcaaaaacccatttgacactagcaatataattataaattaccgaaatcaaaaacgataaagtattagaaactattgtatttaatttaaagaattccttaaatatataaagaaataagaaatcaataacagttgccactaccccaacaattgcaaatttaaatatttgtacaaataaattttccgttttctcacttacttcaatatgcaacaattttaaggctttttttacaaactcctttgacatatctttttgcttcacttcattacttttactagacttcattttatcacctctaaagttcactttttaacatataaatatcaaaatccaaaatactatctacttttttataatgttttaaaaaatattcaagagtataaacatctaattgacttccagaatatttatcatattcattatataattttggattaaaaacgtaaatagtatttttatctaattgcctcatttccttaattggattaatactgcctaagcgaccaaaattaccattatttaataaatctaaatatttataacttgtatagtcattagttagtttataatacatcgaattagtatcaaaaataacaatattagaagtattatatttttttaaatatgtcgctaattgattattcttttgtataatttcttttgggtgataaaagtaatttaaatatttaatattattaggatagatagcttcttctttaaaatttgttataactatatttccaagtaaaataaattgaaaaacaagaataatcatttgaatagatactttactaaatatcttaaagcgtcgttcttcaaataataatacaaaagcataaaaggaaagtaaaaaatgagcacaatcataaagtggaagtgcaatgaacatataagctaataataaaaagcgttccaaacttttattttttataacataaacaattgaaacaccaaatattatcaaagtcaaataaaaataaattcctcgatgataattattttctttttcaaaatttactaatccaaaaaagcattgatcaaaaaaatcatataacgaatttgttaaaataaagtaagcaaaaaatattaaaaatactataaatattcctaataactttttaaaaaatgttttctgtctaaatgaataaataagatcaacaagaataaataaaataccaatattttgttttgtaaaaaaacttaaacccagtactattccaataattaaaggattaactttcttcctttcacataaaataagtataagcaacaaaagaaataataaaaagttataattacatgatgacataaagattggtaaaatattaggtgaaataaacattaaagccacaactacaagaccatttttaccatatagtacatctaataaatagcaaattaaagttaaaatcaaagaataaaatattatataaatatgaattccttttccaaatataaataaaaaaagagcaaacagcatctgcgtaaatggtgttgtaaccatattaaaatcacgataagccactaatccattagccagtttaagactaaaaccataactccaaaaatagtcatacattgtttttccagataataattgccatgaaataattaatataaatattgttaaataaaataatattttttttacatttttcataatctttattccatgatcttaaagtgattaccactatctaaatataaaataccacgtcttccttctaactgtcctaacacttcattataataatttatcatttcaaatttagtcaatgtaagataaacactatttccatcatccattaataataaaaatctatctttatcaaactcattaggttgataactaatttctgatatttttcctaaaatactcttatcaacacttttcatgttttcgataagactactatattttttatcaggagtataattaactaatcttggcactctaaattctaaatcactcgtaatttcttgtttattatctaatacatacttattaagtgtatcatttttaaataaaacatcatattccttaatggttatttcaaaagtatgataaaattttcttcttactttaacacttttaatatattgattttttgctaattttttttgaattttagaaggcatagttagaataaaactaggataatttttaagatcagtttcttgaagtacttcttcatcacttatataattatttccctttataattatattctgcgtattagtcgtaacatataaataaacgaaaaaagatattattgctattacaaataacaataataatagtctaaatactcttagtttttttcttttgactatttttttcgccataccctattctactcccaatttacaaattcttgttctacttttaaatcaatattcttattatccttaactgatttttttacatacataattaattcttttatatcatcagcactagctccaccggtattaataataaaattagcatgttttaaacttacttgagcaccacctttagttaatccttttaaacctaattcttctataatcttgccagaaggcatgtcaacagacggatttctaaaaacactacctgcacttggatattccaaaggttgtgactcaagtcttcttttttttctatctttcatgactttttcaatagcgctcttttctccttttgaaagggaaataatcgcttccaaacaaatataattaggatgagtttgtaaaaaagaactacgataatgaaaatccatttctttattagttaaattaataatttctaactcatcagttaaaaccttaactccctttaccacatatcccatatcgctcttataagcaccggcattcatgaatatagctccacctacagtaccaggaataccagcagcaaattcaagcccagtaagagaattcttcattgctactaaactaagtttcattaaagaataccctgcccccactatcattttattaccaactatctctaatttatcaagattattaagtttgataataactccatcaaatctcttatcactaaacaaaagattagacccattaccaatcactttatacttaacattatatttttttattaattttataagttgaaccaactttgaaatatccttaggataaataacacatttagcaagtcctccaactttataggttgtgtatttagataaaaatacatcttcttcaatcttaccaatgttttgatccttaacttcctttaaaaaaacatccattttatctgccctctactacttttttgatttcattatataccctagttgcactatcacaaactcctaattttttggtacattgaaccatctttttatatttttcatcatcatttaagacttcatcaattaatggtattaacttttccttagaaaaatctttttcttctaaaataagacttgctccagcttgctctaattcttgtgcattttttaattggtgattatttgtcacataaggagaaggtaccaatatagatggtaaccctatagccgtaacctcagcaatagtagaagctcctgctcgtgaaacaattaaatctgtcttttttaacacattaataaaatttttaaggaatggaacaacctttacattactcggaacatcaatatttttataatccgcaaaataacgttctcctgttacaagcaaaacttcatactttttatccttaaatgctggtactatttctaactctttttgatttatagttgcactacctaaagatcccataactataacgaccaactttttagatggtgttaaccccagttcacgtttattaacaggactaatagtagctatttcttcacttctaggatttcctgtataaactgtctttgctttattaaaataatctatcgttttaggaagagaaaccaatatcttatcaacatatttttccaaatgtttattagaaactcctggtattgagttttgctcatgaattacagtcttataacctgccttatgagcagcaataataacaggtgccgtaatatagccacctacgcctaaaacaacatcaggcttaaatttttttatttcttctttggccttcttaatagcttttctatacatcaacaaaactttaacattatctaatattttttttctattgatacccttcatttctattcccacataaggaataccaagttcaggaattatatctttttccattctatctgtagtaccaatatacaaaaaactactgttaggttctatgtctttaatcttattgattatagcaagtgctggataaatatgaccaccagttcctcccgcagaaataactaccctcatatcctacctcctatataattttttataaaaaaagaactaagagtaaaacactctactcactaacattatactcgtaaagttcaaaaatgtaaacaaaactaatctattcattcataaaattagctttattatttataagtttctttaaaataataacaacataaatacaaactgctggagttgttataatatgacctgaatgtagagacaaaataagtaccaaaataaggcttaaatattccatcaattgtttaaaatcaattttcttagctaaatttttaaagactaaataaagagaatatatatatacactaaaataaacaataaaacccaaaataccatgattatagaaaacatcataataatccatttctatagccttatactccttaccatttttattgacataaccaattccaaaaagtttattttttaaagaagctttattatacctattagatgtattttttaagaaagtaatacgttgactaaatataaaatgatcaaaaacatagtcattttcgaaaatatcatctacactgtctaactttaaatactttacatgaatcattatatttttataaaaattggttttaggaacaactaaaaatgaagtaactgtaacagaggtaagaataataagcagtcctgtaaaaattttataatttttctttttcaaacttcttatcatgaaatatataaaactcactaaaaaagttattaacaaagaaagtactggtgtttttgttccaatttctccaattacaaagataaaaattaaagataagaccaccttaataactatatttttcttattcataaactgagccactgtaataggaagaagaatacttataataccactaatctcattagtagaattaaaccaacccaaacttcccttttttgcgatatcataactattaaaaccagtattagtaacaacagctataaaaatcaaaataatataaataaacattgtcataaccaaaatcttattatcaatcttaatatctttaatatttaagaaaagtattaacattaaaggaaaataaaatattcttaatagtccatgtaaattagacatgaaataattactatccaacgctaaaaaatatcctaaactataaaacaacaaaataaaaaagtaaacaagcaaatattttctttttccctttataaagaaaacaacataactcataaaaactaaaaaaagcattcttacaatcatccctaaatttaatcccacatgaaaaacatttaaagataatgatacaactaaatctagtattggttgtatgataatgaaaatagttattattaaattcaaatttttatttataaacccatttactttctgcataattcctccaaaaaaaatacctttaacatatattatcataacatatatcaaagatatttaataactattttttatctactgcattaactatttttttcttataattaatttgttgtgccaattctttatttgcttcttcaagaaattttattgctttttccaactcgcttatacttatactatttaatactctatctaccttattatttttcatcctaatcacctgcaactatttctttttaagattataatattttttcaatccttcatcttcattaacatatgtagacatctcttctaataatactgcaatcattttttgatttaattgtgcatttacttcatttaatttatcattctctttttttaaattcatatatctttctaataaattcttcttataattaattgcttcatttaaatcatggttttcaatttcaatgttattaatttgagattgaaataactcttcaccattacctacttttattattttttttctattctttatactttcattcttaagtaaaataccataactatgtattctatttataacttcttctaatgaagaagcacctaaatttctaatacgttgcaattgataaaaatccatttgtgaaagatcatataaattttttacttccactctttctagagcatgaactattctcgcattaaatcccatatcatatatagtaacgttatcaatatatataacttctctattattaactttctcatctaattctgcttgtaaagccataaattcgctaggttcatattcataaaaaaacttataacctgcagcatgaactttatctactacttcttttgatgaagctttgctaaatcctaataaagatctgtctaaggctaaaacatccttaacaaaaaacacttttttatctaatagcacagcattcacccttggtgaaaaattaaaaacttttatttcatcttctaaatccaacatataaatccccctcatttaatgcctacgattatatcacattttaatcctttttgcaacatttaccctatttttctatttttttaaaattctttgttgtaatattttagcatcatcttttgtataaccaagtaactgattttttaaaagtaaatttcttaattggataaacttatctttattaattatttttgctaatctttctctatctgttagtatagcctttaattgttttaattgatcaagttgcaattctactggaaaattacttaattgtaataatggctcaataaaataattttccgtaactacataattgtctgatcttacactttcatcaaataaattaggtgtaagattcataataggatattcctcttctttatcactaattaagtcaattgctcttctatctttattgactaaaaagataatccctcttacatatcttagctcattagtcttatagactctataatttagaccatctacagcctttccatcatacattatattactagcctcaaatgtagcattttttgttaaaataccaaccctaatcttactcattaatatctttttatctctaaacatcttctactccttaaaaatgactgttatgacacttattataactagcaaatataattttgccaacatcattttttatttttttacacataaaaaatcataaattaaattatgatttcttaataatttatttatttaagcttttactaacagcaacagctattgaaacggttgcaccaaccattgggttattacccataccaataaatcccatcatttctacatgagcaggaacactacttgaaccagcaaattgagcatcagaatgcattctacccattgtatctgtcataccataactagcaggtcctgcagccatattatcaggatgtaatgtacgaccagttccaccacctgatgcaacagaaaaataaggtttatttaattcaattctttcttttttataagttccagcaacaggatgttggaatcttgtcggattagtggaattacccgtaattgaaacatcaacgttttcatggtgcataatcgcaacaccttctctaacatcatcagctccatagcatcttactttagatctagctccatcagaataaggaatttcttcaactatctttaattcaccggtgtaataatcaaatttagtttgaacataagtaaaaccattaattctagaaataattttagccgcatccttaccaagaccatttaaaattactctaagtggtttttttcttactttgttagcattattagctataccgatagcaccttcagcagcagcaaaagactcatgtcctgccaagaaagcaaaacaatcagtatcttcagacaaaagcatagatgctaaattaccatgaccaagtccaacttttctgtcactcgcaacactaccaggaatacaaaaggcttgtaatccttctccaatagattttgctgcatcacgcgcttccatatccttcttctttaaggctatactagcccccaaaatatatgcccagcaagcatcctcaaagcatattctctgtacatcttttaccatgttataaacatcaatacctgcatcatcacaaatcttttttgcctcttctaatgaggaaatatcatacttttttaaaactttattaattccatctattctttgttcataattttcaaacataatactctcctattcctcacgtggatctatctttttaacggcttcatcaaatctaccataagttccacaagatttttctatagcttccattggatccataccctttttaatattttccatcattttaccagtattacaatatttataaccaataatattatcatctttatcaagacccatttctaaaatgtatccttcagttaaatttaaatatcttggtccttttttcttagtagaatagattgttccaacttgactacactttccttttcctaaatcttccataccagctccaatagaaagaccaccatcagaaaaagcagattggcttcttccatagactatttgtaaaaataactctctcatagctgtattaatagcgtcacataccaaatcagtattaagtgcttcaagaattgtttttccaattaatatttctccagccatcgcagcactatgggtcattcctgaacaaccaacagtttctactaaagcttcttcaattattccattttttatatttaatgttaacttacacgctccctgttgaggtgcacaccatccaataccatgagtaagacccgaaatatcttttatttcttttgcttgaatccattttccctcttcaggtataggtgccggaccatgatcagtacccttgttaacataacacatgttttctacttcttttgtgtattccattttaatccctcacaatcaattataactttgattatcctttctttattttcataaattaataagtacatcaggagataactacaattaatttttatttttaacttctaacctacttcgacaatacttacaagtgccaacatttgtagttaatatattatctgcaccacaatgtggacaatataccactgtcatatttttagcagcctctatcttttctttcattatcaaatcatttttagaagaaatttctctattaactttttcttctttctgaatgtatgatttcaaataagcttgaactctatcaaacattcctctaaaaatagctattaaaaatagaaatataattcctactataaataaacttttactataatttataagattaacactataaaaactatcagtaaatatactagtaatttttgaaggtatattaaaattagtcattttagctaattctaataaacaccctggcataagtatcaaagctcctactaacattaaaataattggtactaaaatttttttcttttcactatataaaaagtatcttaataaaataagacaaacaccaacaaatggtataaaatataaaaataccaagattataggaatgctacataacaatcttataaatggattatatttcataattacctcctataaattttattataacacttcattatccgactgtaacatttaatttatatttttatacatttttaattatcataaacaaaggataacaccaaaaaattttcaaactaaaactattagttattcactaatagtcttttgtggttttaaaattattttaattgcatcatctgtaccgcttgtaagtctctcgaaagaatgttgagcttcacttaatggaactttatcatctatatattttactacattaattattttttgtgaaattaaatctatacacgtatcaaattccttttctgtataagcaatagctccttgcatttttacttcacccataactgacataacgctaggaatactaataggttccatagatacaccaacaagaactattgtacctcctggttttacagccataatagcctcactaactgcagcactagaaccacaacattcaattacaacatcaaaaccgccatttttttgtaccaatgaaggaataactttagggtcttttgcatcataaaatttatctactttaccaaattttaaagattttttacctctcttttcatttgtttccagtaaagtaacgttactagcaccatttaattttgcaaattcactagccataagtccaatgattccgccacctattattaagacactattacctactttgatatccgctaaattaatagcgtgtaagctaacagctgagggctcaaccattgctgcttcatcatcactaatactatcaggaattttacgtaccatatcaccacgacacttaatatattcactatatgctccaggtcttgttaaagaaagccctaaagcatcagtccatgttgaacgacagtattgtggattaccactcttacaagcatcacatttaagacaaggagaaataggtaatcctgtaaccctttgtcctatctttaagtcatttctatctcctggatctaaaacttcaccagcaaattcatgtcccattactaatcccttaggctcaccactaacaaaataatgaatatcagaaccacaaataccacacgaattaactttaatgattacatcacttctacttctctctggcatttccatttcttctacttttaacttctttgcaccagctattttcacacactgcatataaatacctcctattattactataattgtacacaaaaaaagataaactttcaatgtttaccaatatatttattttttaccctttctaaagtcttattacgagggggattagaattactctgtttattactctgctttgtattttcactcttagttttagtagaaacatataaagttgtatctcctatcacgctaattttattatttgaaacaattaattgttccacatcaactaaagaagccctatgtccagagaaagttatttgaagctttagaaaactgggaatagtattactagcattttcgagaacaatatcacttaatgagggaacataaatatttaaattacccgtatttgaaacactaaatttatgcaaatgaccattaagtactaaaaatgaagaatcattttctaaattactgttattagattgttgcgatttaattctatgcttaataagtatactttcacccttgacatctatttttccagaagcatatcccaaaggaacaatatcatgtctattataatatagaatcttagctaaatccaatcctgatgagaaaagagaatcagcatcatgattacctaaagtgacaaaatttaaaatatttttatcaaatggataatttttaagaagatatcttgcctgttcctcataactacaaatattattagggcatccaaacataccattaaccaaatcaccagcattaattattatatgaatatcattttttatacaataatcatacattaagttaagacaatcaagtctttctaaataagaacctaaatgtaaatcagacaccactaaagcctgaaaaacattattatcattatccataattattctattagtcaaatcatcatcattaaaagacttgtttaaaatatattttatatctccattataataatactgtctagaaaatgaatatccattaacagataagttcttaattctttggaatatttttttattacttatattcatatctaaagaaatttgatttacagtttgttcttccttaatattctttaataatctttcattttcacttgtcatatacttctcccaaaccaaaaattattataacataatactaaatttccaaaatttctgataatttttttactatttcttctactatcttatccttattttcatgtctcgtcttcaataatgctctataggtaaaattataatatttatcggtatctttatcataaatactaatataaactaagttatcatcaccaaatttattattcttatcaactctatttagtttacctgttacaccaactccataattagaatcagtaaataaagaaatatttttactcatctcctgagctgtctccatactataaacactatatttatctattacctctttagaaacacccatcttttccttaaaaaaattactatatgtaacagctccaaacttaaatgtttcacttgccccatcaacatttgtaatactattactaacagcgccacctgtacaagattccattgtactaatcgttttatttaaactaattaatttattaactatttctttcataattttcctccaccaatattatttatctaatactaatttttattcattttatcatattgcttatataaatactgcacaccattctctaatttaaaataatgaattatataaaatataacaaatatcattaatataaaacctattattaaaaatcctataaaaacattccctaaagcaaaaaatattagcatcataagtacataaaataaagtaactactaaatgaataaatctctcatgttgaaaaaaacttatctttattaggtgttcattaatacacttatcgtctatcttaccatctcttatttttctatctatattttctatgtaatcatataagtattttctcatgatatcaccattataattatacatcataaataacataaaaaaatagtatttctactattttataatgaaaaaatataacaacacaattattcctaatgctattctataatatccaaatactttgaaatcatgttttctaatataattcatcaagaacttaattactaaaatactaactataaaagcaacaaggcaaccaattccaagaagtgctaactctccagcttgaaaagctacgcctactttcataatatattttaaaagtttcaataaagatgctccaaacataacaggaatagctaagaaaaatgtaaattgtgccgcaacacttctctttaatccaagaattaaacctccaattatagtagcaccacttctactagtaccaggtattaaagataacaactgaaatacccctacgcctaaagcttgtttataagtaatatcgttcaaatttttggtttttccttttcctatatttttagattcaactactataaatataataccatagattattaacattaaagaaaccacaatactattatataaatgagcatctaaccaatcatctaataatatcccaataatagcggcaggaacacacgctactaatattttgccccataaattaaaagtttctttcgtctctttttttgttttgccaaaaccaaaaggccatatagttttaaaatacataacaacaacagccataatagcgcctaactgaataactacttcaaacaaactataaaaatccttactaacattcaaattaataaattcatttaaaagtatcatatgcccagtagaagaaataggtaaccattctgttattccttcaactataccgaataaaattgctttaataatttccatatcatcatctcctagaattcctctaaattttacttcagcaacaataaaattataccaaaaaaaaagtgtttttccactctttttaactatttatttatactttacacttttttagtcataacaatattttttctcttcatttcatatatatcattttttccatctaaaatactattagattgaagtgacaaatcattattaacaaaatcacttgtcattgacatgttaatttggttttttacgtcagtaagtaaattaatattacactgaacaaaatcagctaaatatatatcatatttctgaataaaatcaataatgaaatgattaataccatactctaaaaaatcatcttttcttggaaatttagagtgtacattcttcactatatcattaataacatcaaaggaaaaaatatctttaagcattttccttgcaaaaaacatctgttcagtttttttggtatattcactaagtataaaaacaaaaccaagaccaatttcatcactcatagtagccatttcttcatcttttgttgcatcttcaatcactaatttttcatatttataaataatattcaaaaaattattataagttctttttagactagaatttttaaaagaagt

SEQ ID NO: 496 - DNA, 19168 bp, unidentified
  source 1..19168: mol_type = unassigned DNA
atgttcaacaaacaccctaaaggtctgattgccgcatcctttgctaatttgggcgagcgtttcggcttttataccatgatggccattcttgtactttttttgcaagccaagttcggactggatggaaaagaggcaggtttgatctactcaacattttatttttctatttacattcttgcattgataggtggtattattgccgacaagacccgtaattacaaaggtaccatttttgccggtattgtcctgatggcggtaggctacttgatgcttgccatcccgtctcctacaccggttgccaataaaaccttgtttttggtgattacttgtgcggccttgtttgtcattgctttcggaaatggtcttttcaagggaaatcttcaagcgctggtagggcagatgtacgacaatccccaatattccagcatgcgtgattccggtttctccttattctatatgttcatcaatgtaggtgccatctttgctccgtttgccgcagtaggcgtacgtaactggtggctgtccacattcggctacaattatgatgccgacctgcctgccctttgccacggacatctggcaggaacgctgactcccgaagctgtggacacttatagtgcactggcaacgaaagccactatttccggaacacccgtaacggatatgacggtatttgccaatgaatatctgaacgtgtttaccaccggtttccattatgcattcggtgtagctatcttggctatggttctctctttggtaattttcgtcatcaacagaaagaaattccccgatcccagcaagaaggtggctgcaaaagcgggcgatgccactgcagtggagatgagcgcacaagaggtaagacagcgcatgtatgcattgtttgccgtattcggtgtggtaattttcttctggttctcgttccatcagaatgggttgacactgacgtattttgccaaggaatatacagatttgaatttgttcggcatggctatttccgctgagctgttccagtctttgaacccgattttcgttgtatctctgacaccggtcatcatggctgtctttgcagcacagcgtgccaagggtaaagagccttccactccgcggaagattgccatcggtatgggtattgctgccaccggcttccttataatggctatcggttcttatgtaagcaacttgccgatgcacaaggatataatcgctttgggtacctctccggtgaaggtgactccgctgttgctgatggttacctatctgatattgactgttgccgaattgtacatttctccgttgggcatttcattcgtgtccaaggtggctcctcccaaatatcagggtatcatgcagggcggttggctcggcgctactgccattggtaatcagttgctcgttatcggtgctatcctttacgaaagcattcctatctggatgacgtggacggtatttgtagtagcgtgctgcatttccatgttcaccatgctgttcatgctgaaatggcttgaaaaggtggcgaagtaatcggaaacgaaagataaaactaaaggctgcgcaatgttcgtaatgaactgcgcagcctttagtttttggagggcttttaatgccgggactcagatttccagtcccatgatgtagtcattcatgtaatatccgtttcctatcgggaaatccccttcacggagtttccgcattcccatatgttcgtaaaactgcagtgccttgttgttacggttcacattcaattccatcagacaagggccgggatgcactttcttgatgtacttgatggcttcgcgaaagaggaaactgccgcaatgtgcaccctggtaataggggagcacataaatcttttgcaggtggaataaatcttctccttgctgctgtacggacacatagcccgccgcttcacattcttcgtaagccaggaaatagacgtggccttcctcttccatttgtttacggatattgtccaatgaatacatccattccatcatgtagtcggtctgctcgggagtaaggatatccttatacgtgacgggaaatatttgctgcgcaagtttctgaatcagtgcgcagtctgctgtcgttgcttttcttatggtaaacatatcggttgtatttatactgtttggggtgtaaagttaagccttttttgtgaaacaatcgttatctttgcagaccgttaccgaactaactaattctgattttaaaaattatggcatttacgagcaacattatgattgtccgccacagattgctgaaggaactggtaaagctgtggaataacaacgaacttgtggataaaatagaccggctgcctatcgagctgagtccgaagaggtccaagcacgcgggacgctgctgtgtgcacaaagagcgcgcggtgtggaagtacaagtcattgccgcttctgggactcgatatggaggacgagacggatgagctgacccccttgtcggagtacgctgcccgtgcactggacagagcggaaaatggcaggccgaaagacaacatcatgtgtgtgattgacgaagcttgttcggcatgtgtgcagattaactacgagattacgaacctctgccgcggatgtacggcacgcagttgccaggtgaattgtcccaagaaggcagtgcacgtcaaggagagcgggcaggcatggattgaccatgatgcgtgtatcagttgcggcatctgccataagagttgtccctaccatgccattgtttatattcccgtaccttgtgaggaggcttgtcccgtgaaagccatcagtaaggatgagaaggggatagagcatattgacgaaagcaaatgtatctattgcggaaagtgtctcaatgcatgtccattcggagcaattttcgaaatatcgcaggtgttcgacgtgttgcacagaatccgcaagggtgagcaggtagtggctatcgtggctccgtccatcctggggcagttcaagacgactattgaacaagtgtatggcgcattgaaacaagtcggttttacggatgtcatcgaggtggctcagggagcgatggataccgtcagcaacgaggcgcacgagctgattgagaagctggaggagggtcagaagtttatgacgacttcctgctgtccgtcttatatagaattggtgaacaagcatattcctgccatgaagccttacgtgtcgggcaccggttcgccgatgttttatgctgcccgcattgctaaagagaagtatccggatgcgaaggtggtcttcataggtccttgcgttgccaagcgcaaagaggcgcagcgcgacgaggcggtggactttatcatgactttcgaggaggtggcttccgtgcttgccgggttggatattcagatggagcaggcaaagccctattccatgagtttcacttccgtgcgcgaggcgcatggttttgcgcaggcaggaggcgtgatgggtgccgtgaaagcctatctgaaggaagaggcagataaaatcaatgccgtacaagtggctaatctggataagaaggctatcggtgcgttgcgtgcttacgccaagtcgggcaaggctccggggcaatttattgaagtgatggcttgcgagggcggttgtattaccgggccatgttcgcataatgaaataactgccggaaagcgccagctgacgcaggagttggcaaagagaaaagagacgtattagccctttgtccgtttatatgaagcatttgattgacaaactgcggagcaatcgcaggctgggtgccgaagagtataaagccttgcttctttgccgggacacagaacttgcagcctacctgcaggagcttgcccgggaagaagcgcttgcccgctttggcaataaaatcttcattcgcggactgattgagataaccaaccgttgccgcaataactgctactattgcggcatacggaaggagaaccggaacatagtccgttatgagctggcgcaggaggagattctttcgtgttgccatgaaggctatcggttgggcttccgtacctttgtgctgcaagggggcgaagcgccggcggtgaaggatgaggggatggtggagacagttgccgccatccggcaatccttcccggattgtgccattaccttatctttgggcgaaaaatcgcgggaagcctacgaacgtttcttcctggcaggtgccaaccgctatctgttgcggcacgaaacctgcaacgaagggcattatcaccggcttcatcctgctgagatgtccctttcccatcggttgcaatgcttggactggctgaaagagataggctatcaagtgggaaccggaatcatggtgggcagtccttaccagacggtggaccatttggtagaagacattctcttcatcgaacggtttcagccggagatgataggcatgggaccttttcttccacatcacgatactccgttttcctcttttccgtcgggagatatggagttgacgttgaagttgctttctatcttccggttgatgcatcccgcggcactgatacctgctaccactgccctgggcacacttgctccggacggacgggaacggggaatattggctggcgccaatgtcgtgatgcctaatctttcgccttctcatcagcgggcgaagtactccctctatgataacaaagcttctgcgggtgccgaagcggcagaaggtttgctaaaattggaggaacaactgaaagggataggctatgaggtatcaagagagagaggagattatgagaatggagaattgaccgttgataattgataattttcaaatcttcattctttattttaattaccaattatcaatttacgaagtgtataacataaagtcaagacaagcagaagaattcatcaatcaccaggagatattggatacattggagtatgcgcaggcaaaccgcaacaaccgtccgctcatcgaaagtttgattgacaaggctgctttgtgccaggggctttcccatcgggaggcggccctgctgctggaatgtgacgagccggaactggtgcagcgcatctatcatctggcatgtgaaatcaaacggaaattctatggcaatcgcatcgtgatgtttgccccgctttatctttccaactattgcgtgaacggttgcgtctattgcccgtatcatgccaagaaccgtaccattccccgcaagaaactctcgcaagaggagatacgccgcgaggttatcgccttacaggatatggggcataaacgccttgccctggaagccggagaagaccctcgaaacaaccctatcgactatatcttagagtccatccgcaccatctacagcatccaccacaagaatggggccatccgtcgggtgaatgtcaacatagccgccactacagtggaaaactatcggttgctgaaagaggcaggcatcggcacttatatcctttttcaggagacttacagcaaagagcattacgaagccttgcatcccacgggaccgaaaagtaattatgcctaccacaccgaagcgatggaccgtgctatggagggtggcatcgacgacgtaggtatcggcgtattgttcggtctgaacacctatcgttatgacttcgtaggactgctgatgcatgccgaacatctggaagctacctttggcgtgggtccgcataccatcagcgtgccgcgtatctgtccggcagatgatatttcgaccgaggattttcccgatgccatctcggatgagatgttctgccgtattgtggcggttacccgcattgcggtgccttatacgggaatgattatttccacccgtgagtcggaagccgtacgccgtcgggtgctcgaactgggcgtttcgcagataagcggcggttcgcgcaccagcgtgggaggctatgccgtgccggaagccaaagaggaagattcctcccaattcgatgtgagcgaccggcgcacgctggatgaagtggtgagttggctgctcgacctggggcatatccccagcttctgcaccgcctgctatcgcgagggacgtaccggagaccgcttcatgtcgctcgtcaagcgcggacagatagcaaactgctgccagcccaatgcactgatgacattaaaagaatatctggaggactatgcctcctccgaaactaaggagaagggcatacagctgattcgtgaggagatggagcatatcccgaaccccaagatacgggcgatagccgaacgtaatcttcaggagataggggaggggaaaagagactttagattttagatttcggatttatgaataatacacctcgttccaaccgcctgcacattgccgtctttggacgacggaacagcggaaagtccagccttgtcaatgccttgaccgggcaagacacggcattggtatccgcaacgcccggcactactaccgatcccgtaaccaaagccatggaagtatatcctttgggcccgtgcctctttatcgatacccccggttttgatgacgacgaaggcgaactgggcggtatgcgcgtggagcgtaccttaaagacggtggagaaagcggacatcgccctcttgctttatgaagctgacggaacgctggaacagcaatggctaaagctgctggcagcgcgcgaaatctccgtgatactgatactgaataaagccgattcccgtcaagacaccgcttccgtggtgcttcggattgaaaaggagtgcgggcaggctcccgttgtggtcagtgccaaagagggtaccggcattcaaggtatcttcgatgctatcctcgaaaagcttcccgagaattttggtgagcagactatcacgggcgatttggtgcgtgaaggagatgtcgtcctgctggtgatgccccaggatatacaagcccccaaaggtcgtctcattcttccgcaagtgcagaccatccgcgaactgttggataaaaagtgcttagtgatgagctgcaccaccgacaagctgcaagcctccctgcaagcccttgtccgtccgcctaagctgataatcacagactctcaagtgttccccatcgtctatcaacaaaagcctgccgagagtagtcttacttccttctcggttctttttgccggttacaaaggagacatcaatgcctttgtagagggagctgccgctattcatagcctgacaccccaatcgcgtgtactgatagccgaagcctgcacccacgccccgctgaccgaggacatcggcaccgtcaaaattccccgcctgctacgaaagcgcatcggcgaggaattgcagatagactttgtatctggaaatgactttcccagagacttgtcccgatatgatttaattatccattgcggcgcttgcatgttcaaccggaagtacgttctcaatcgtatagcccatgcccgcgcacagcacatccccataaccaactacggagtagcaattgcgagtctgaccggtatattggataaaattgttatccatcggtaaatatccctctccctctttgttcatgttactgatgtaatagagtagtgtgaactactttttttgttaattatacttaatataaggtactttgtaatgcaaggtactgatataatacatatatttgtgccatacaaggaacaacaatagaatgaatgaggacactcattactctattgcgcagccaaatagtaaatcgtaaattgtcaaatagtaaataccattatggatgtaaacaatgtaaagtcgcaaatgcgcaagggcatgcttgaatattgcatcatgctgctgcttcacaaggagccggcttacgcttcggatatcattcagaagttgaaagaagccagactgattgtagtggaaggtacactttatccgttgctcacccgtctgaagaacgacgacttgctgggttatgaatggattgagtctacgcaaggtcctccacgtaaatattaccggttgacggaaaaaggagaagtctttctcggtgaactggaaatgtcctggaaagagttgaacgagacggtgaatcacatcagcaattcttgaaatgaccacagagaatatgctgcattcgccgaatggtaaatagtaaatcgtaaatagtcaaattgtaaataaatagtgtgttatgaaaaagacattaactgtaaatttaggtggaaccgttttcaatattgatgatgacgcataccgtcttttggataattatctgagtaatctcaagatgcacttccgcaaggaagcaggtgccgacgagattgtagatgatattgaacgccgtatttccgaactctttgccgagaaattgtcggccggttcgcaagtaatcacgatagccgatgtggaagaggtgattgcccgcatgggaaagccggaagatatggaggcggaaggagagagtgctagtgccgattccggcagcacgagtgccgggggcggctatggtgccggtgcttggaacagcaataccgcttatggcactacacgccgtcgtctataccgcaatccggatgacaaaatgctgggtggtgtcatcagtggaatggctgcctacctgggatgggatgtaactttacttcgactgttactgcttgtcatcttgatttgtggggtagggacattgataccggtctatatcgtgtgttggctggttataccggaagcccgcacagcagccgagaagttgagtatgcgtggcgaggccgttacggtggagaatatcggaaagacggtgacggacggttttgagaaggttgccaatggggtgaatgattatatgaggtcggataaaccccgtactttcttgcagaagttgggagatgcattggtgatgattgtcggctggttcttgaaaatctgtctggtgatattcgccattatttgcagtccgatactgtttgtgtttggagtggtattcgtggcgctgttgtttgctgcgatagcggtggctgttggtggtggtgcagctctcatttcccttttcccgatggctgatgtggtactgcctacttctccgctgtctgccattgtgatgtacattgcaggtatcttgttggtaggaattcctttggtcagccttgtgtgggccatctttagccagatattcaagtggcagccgatgaactccggcttgaagtggacgctggttatcctttggattgtaagtgcagcttgcttcggaatctgttttgcagtgcagggggctactttcccggaattgggtatctttaatttctgagaatagtaatttcttttttaattgatatcgtgtttgtggaaatcagatttctataaacacgatatttttttattgggtgtaattggttgttatacagtgaaatattgcgtttggaaaaggcgttttttaaacgttcgtttaatgaacgcaaagataacgtgtatttttgaatctcgcaaaatgtttaataaaaatattctataaatttctttttagtgagtataatactttgtcagtaagcctattgcattgtatttctctaacttcttccttttactaatttttaagtaatcttccctctttaattttcttaaatattgacgttcaaaaaacgaacgtctattgaacgctttttgcttgcaatagattcgtttacagcattttacctgtcaggtaatgaatgactgcaaaaaatctgttgacaagaagggcataaagcttgtcgtattctacataaagtgtccgcaagtaattgaatttcaagtgtatgcaagaggttcaaagccccaggagaacacccttgtctgaacaaaagcataaaatgggaatagagaaagaggccgaaatctggtatgctatgcgtgccacctaccgcagagaaccggatgccatgcgtctgctaaagaaagaaaatttgggctgtttcattcctatgcaatacaagatatgtataaaaaaagggaaaaaagtccgtgctctggttccggtcgttcataatctgctttttgtccatgcccgtccttccgatgtgcagcgtgtcaagtctcaagtcacttatctgcaatatatcaccgatacccgcagtgggcagaagattattgtcccagacggtcagatgcagcgtttcattgccgtatccggcacttacgatgatcatcttctttattttcaaccggatgaattgaacttgtccaagggtaccaaagtccggattaccggcggtgaatttgaggggcaagaggggatatttctgaaggtaaagggcgcacgtgaccgtcgcgtggttatcgaaatacaaggtgtcatagctgttgccatggccactatccatcccgatcttatagaagtaatcggctgaactttaatttttaatttttaattctataattgcttatgtctctttccgaagaagcaatcactcttcagcgtgctgcgcacgaactgatgtatttgggtatggacggcagtcccgtctatagcgatgacttgtcacggcggaacggtgaggtctaccgtcttaccatggctttgtaccggtcgggtgtaaaaggcactaccatcgaagagcaggcaaatgtctgtcttgcccttcttatgggttacagcgcctcttttgtggaccatggcgaaaagcagcggcatgtccagaaagtgctggactgttgttgggatgtgctcgatgcccttcccgcttccttactgaagctccgtctgcttaccgcctgctacggtgaagtgttcgacgagtctttggccgacgaaggccgttccatcatcgcctcctgggattccttatcacttactcccgaacagcaggaagcggttgatgagtttcagaatgtgacagacaatccctatccgtgggaatatatcgatgaataaaacttttcattataatgcttaacaataaatccgtattgattaccggaggaacgggttccttcggaaagaagtttgtggaaaccatcctccgtgattatccgcaagtaaagaaaatcattatttactcccgcgatgagctgaagcaatttgagctgaaacagaaatatcccggtcataagtatccgcaactgcgtttctttatcggtgatgtccgtgacctcgaacgcctgacgcgggcttgcgaaggagtggacgtgattatccatgcagccgccatcaagcaggtggataccgctgaatacaatcccgaagagtgcatcaaaaccaatgtacacggtgcgcagaatgtgataaaggctgctcttgccaccggtgtacagcatgtggtggccctttctaccgacaaggcatgtgcccccatcaatctttatggcgccaccaagctcacttccgacaagctgtttactgctgccaacaatatcagcggttccaagaacatcaggttctccgtagtccgttatggcaatgtgatgggttcccgcggttccgtaatccctttctttatcaacaagcgtgacaacggggcgaaggaacttcccataaccgatatgcgcatgacccgtttcaacatttcgctggaagccggtgtcgctttggtcatgtatgccatcggacatcacctgggtggtgaaatctttattcctaagattccttcctatcatatccaggacgtggctaccgccattgcacccaatctgccgcaggtggaagtgggcatccgtccgggagagaagctgcacgaggagatgattactgtaaccgatgctcttgatacaatcgatttgggcagatattatgtcattcttccttccgtatctttcaagcacagtcgcgaagagttcatcagacatcacaatgcagtacccgttcccgacggtttccactacagcagtgacaacaatacggagtgggagacagtagagactatgcgcgagaatataaagaaatacgttgaccctaatttcgaggtgaaatgataagcaagcctattccatacggtcgtcagcatatcacagatgaggatatccgggcagtcatcgataccctgaaaagcgattacctgacacaaggtcccaaaatcagggaatttgaaacgaaatttgccgaatatgtaggtgcacaatatgccgtagcggtgaacaatgccacttcggggcttcatcttgcagctaccgcactgaatgtaaagccgggcgacaaggtgattgtcactcccatgacctttgctgccagtgccaactgcatccgctattgtggcggcgaggtggtattctgtgatattgacaaggatacttacctcatggatattcgtaaactcgaagccatgcttaaagcttctccccgcggtacttacaaaggtattgttccggttgattttgcaggctatcctttggatctggaagagttcagaaagcttgccgacgagtacggcttgtggattatcgaggatgcctgtcatgctcccggtggctatttcatggacagtaaaggcaagaaacaacattgtggcaatggttgttttgccgactgtgccgtattctctttccatcccgtgaaacatatcgctacgggtgagggaggcatggtgaccaccaacagcaaggagctctatgacaagctttgtctttaccgtacgcatggcattacgaaagaccctgctttattgcacgagcatcatggtggctggtattacgagatgcaggagttaggctacaattaccgtctgactgattttcaggctgccttgggtatttctcagctggagcgtgcgaaagcaggtcttgaccgccgccatgaaatcgtgagacgctataatgaagcgttttccggaatagatggtatcaagactccgttcaatgctgccgatgtctatcatgcttatcacctttatatcattcaagtagctgaccgcttgggcctttataattatctgcacgagaacaatgtctatgcgcaggttcattatgctccgcttcatctgatgccttactatcagcagtggagaaataggaaaggcgatttacctatagtagaagagtattacgaacattgtctgagtcttccgatgtatcccacgttgacggacgaggaacaggagtatgtgattgaaaaggttatagaatatataaaacaatgattacttccattcctattgaagctattgaaaagcagcttttgcagcaactttcctcttttttcttcttgagtgaagaagatgagatgttaataaatatgaaaatgggggggtgatatctcgttgtgaatattgtttttcccgtacgaaaaataagtattactcatgcgacggagagacatacttcaacccttatcaaagtgcacaatatacaatttttctctatttttttgctaacaccatttctcaagatactgataaccgtttattggcagataagttgtattatttgaataagataatgaatgggtgtgatttgtatcatgaggtaaatcttcctcattattttacgttggatcatccggtcggtagcgttatgggacgggctgaatatggtgaaggattcagttttgggcaaaattgcacggtgggaaacaataaaggaatttatccggttttaggtgaaaatgtgcggatgtgtgcaaattcttctattatcggtaactgccggataggtgacaatgtgattatcggggcaaattctggtgtgaaagatgaggatgtgccggacaattcaattgttttcgggtattctccccatttaattataaaggctaaacgatgaaaaatatctgtattattcctgcccgtggcggcagtaaacgtattccgcgtaagaatatcaaaacctttatgggcaagcctattattgcatactccattgaggcggctttgcagagcggactttttgacgaagtaatggtttcgaccgatgatgaagaaatagcggagatagcttgcggatacggggccaaagttccttttatgcgcagtgctgagacctcgaatgattatgccggcacggccgatgtaattcttgaagttttagagatgtataaagagcgaggcagggaatttgatacagtttgttgcatttactcgacagctccttttgtcactcctgaaaggcttcgggaagcatacggaaaaatgaattcggagattgactccgttttcacttgtgtggcttattcctatcctatacagcgtagccttcatattgtagacgggagaatcggtatggtttatcccgaatacatgaatacacgttcccaagatttagagccgatttatcatgatgccggccaattctatttctctcgtactgctccttttgtggagagccggactttttgggggaagaacacagccggactggtactttccgaactcgaagtgcaggacctcgatacgctgaccgactggacattggcggaaatgaagtatgagttacttcatagatgatgtaatgcagaaaatctatttccgtgccgacgcaagcgctaccatcggctacggtcactttatccgtactctggctttggccgatatgctgaaggacgatttcgattgtaccttctttacttgccatcctacctcatatcaggtaagtgagatggagaaggtatgtcctttcatccccttgcaagaggaaacgcattctgctgatttcctttcccatttgcaaggtgatgaaattgtggtgctcgacaattatttcttcactaccgattatcagcgtgccatcaagcaaaaaggctgccgcctggtgtgcattgacgatatgcacgacaagcactatgtggctgatgtcgtgattaaccatggtcagaccaattctgcacttttcgacgtggaaccttacaccaagctctgtttgggatttgattgggcattactgcgtagcccgtttatagaggctgtaaacaaactctgttcttgtgcaaaacgtagtacggaaagtataaccattacttttggtggtgtggattcctttgactttactggccattacattcgtgaagctatgcaattgcctactgtcagccagataactgcagtggtaggtgatgcttatcaacctcaaaagccgagggtacgggataggcgagtgtcttattgctccaatttaacagctcaacagatggccgaacttttttgtgcttccgattgggtaatctgttcagcaagtactgtgagtctcgaggccattgcttgtggtgccaagttggctgtaggttggtatgtagataatcaggctgattattattcactgttaacctctactggaggagttcttcctttaggaaatattaaggataatcccatacctctgacatctttagagattgctggggttgataacttgcagatacaaggtggtattcgtgaacgctatattaatctgtttgaagaattgggaagaaatgtgcattgacgataatcgcattctttttggaaaaattctcataatggacaattgatgcaggaatagaacagataattttaattatttagcaattgaatgatacaaatagacaaacaagcggtttataaatataatggttatgttttccaacacttctctattttgtcggaagaactcctaaagcaaatattggattggaggaatacttttgagataaggcagtttatgtataatacagatgtaatatctcttgaaaatcacttgaattttacgaaaacccttgctcaacgagaagattgttactattggttagtaacaaaagataatgttccctatggagtcttcaatctgaccgatatagaccatgaaagaagaatcgctgaattaggctattatatggcaccttcccaaatgaaaagtggagggggacttgattttgtttatactatcatctgtttttcttttgaggttgcaaaatgtataaaactggtaggttcaattgatataaacaataccgatgcattgttattggatgagtttttaggctttgttttgggtgatacggtggaatccgacggatgttgtcataaccggaaattcattgaatgggagctttcagaacttcattatagaagtactacagtatatagaaatgatatacgtaaattggtccgctttattagagataaacgcaaatagagaatcatgttatcaaattttcattttcaccatataggatacgctgttaccagtattgaaaaaacaatgtattattacattgatgggggatattcttgttcatctgtgatatttgatccaatacagaatgtaaatatctgtttccttacaaaagaaggagagcctatgattgaacttcttgaacctgttgatgagaattctccaatcaataaaaatcttgagaagaatggagtttgtccgtatcattgctgttatagtgtagaaaatatagaagatgccatcgcacggcttcgtaaaatgaggttcatggtggtaagctatccggcagaagcagtagctctcaataatcatcgggtagcttttctctataataaagatatcggtttaattgaattattagaacaaaaatgaaattctttatttttagaaacaatacgctggaaaatatcttcggcacagacgaagtggagtattctggttacgaagatatatcatatatacctcaaaatacatctttgtatttgtggatgtatcaaatacccataagatggaatcagaagcaactggctgacgaaattgatgcatatattagaaaaatgcagcttgttttctcgcaggttccacaagggaaagaatttgtagcattcacattggtagacatctttcctacgagatttactgatgccaattttattgtaagggaggctatcgtccggtataatacccaactgtataatatggctggaacgaatgtaaattttaaggtgattgacttttctgagtttacttcccgttataggtcagaggaattgattggatggaaattctattttatttctcaaatgtatatatcttctaaaattactagtgaatttgctacatgggtagactctaaaatacagaatatagctttaaagagaaagaaatgcctcattcttgatttggataatactttgtggggtggagtccttggcgaggaaggcattaatggtatacaaattggcggggattatccaggtaaggcatttttatattttcaggaagcgctgtctgcgttaagtaaagagggtattattttatctgtttgtagtaagaacaacgaagaagatgtattcgaagcttgggagcaaaatccgtttatggttttaaggaaaaaagattttgttgctattcgtataaattggaatgacaaggcttcgaatatcgtggaactgtctaaagagctgaacataggtcttgatagtatggtgttcattgatgacaatccggcagagcgtgaattagtaaaacagaccttgcctatggtggctgtcccggactttccaaaacaagcatatatgttaccgcagtttttcatgcaattagttcgtgattattttgaagtttacgaaattaccggtgaagataaaaagaagacggaacaatataaggcaaatgcggaacgtacacgcgaacaagccaaattcttaaactttgaagattttcttcgttcattagaaattaaaattgagcttcagaaggtggactcattcaatatatcacgaattgctcagatgacgcaaaaaacaaatcagtttaatttaacgacccaacgttattctgaagctgatgtcagacaacttctggataatcaatggaaaatctattgcatcagagtttcagataaatttggtgataatggtatcacgggagcagttttcatcgctgataatagtattgagaatatattgcttagttgtcgtatattaggtaaaggtattgaaacggctttcattaaatttgtatttaaattgttggttgaggatggtgtgtcagctttagaagcaaaatttattcctactctcaaaaacagacaagtggctgatttttatgaccggcttggcttttctgtgatgcgagtagaagagggtgttaaatactatatggcgaatattgacaaattagatttgtcaatacctgattattattcaataacagttaaacaataaagttatgattacgaatgaagaaataatggatgtgatgagagctgttttaaaaacagatgtagatgagaatacctctcagaataattgcgaaaagtgggatagtatgaaccatttgaatctggttatagaattggaagatactttcgaagtagagcttgagcctaatgaaatcagtttgatgaaatctttctctgacatcaaaaatattatttcaaacaagttacaataagaaccattatgggaaaaacatttatcatagccgagatgtcggcgaatcataatggcagcaagcagataggcatagaaacaattcgtgctgccaaacgtgcaggtgcagatgctatcaagctccaaacatatacagctgataccataacgttggataatgataaaatggagtttatggctgattctacaagtgtttgggccggcatgcgtttgtacgatctctataagcaagcctataccccttgggagtggcacgaagaattgtttcgtgtggccaaggaggaaggacttatctgtttttcatcaccgtttgataaaactgcggtagatttcctggaatccttgggcaaccccatttacaaaattgcctcttttgaaattacggatattcctttaatagagtatgccgccaagaagatgaaaccgatggtgatgtctaccggcattgccactgaagaagacattcagttggctgtagatacttgccgtgcggcgggcaatgatgatattacgctgttgaaatgcacctcctcttatcctgcccccattgaggaagccaatctgtgcatgataaaggatttagccgagcgctatggagtgaagtccggtttgtccgatcataccattggcagtgtgtctgccgtagtggctgtgacacaaggtgcaaccatgattgaaaagcattttattatcgaccgtagtattggcggccccgatgcctcattctcaatgaacgagcaggagtttgcccaaatggtgaaagatatacgcatggccgaagcggctatcggctcagtatcgtatgaacttactgataagatgaagtcgggaagggagttctcccgttcgctctatgtagccgaggatatgaaagccggagaagtgattacagagcagaacgttcgctccgttcgtccgggcttcggtttgcaccctaagtatctgaaagatatattgggaaagaaagtaaatcaggatttggagaaaggaacgagatttgcatgggagttcgtgaatagttag

SEQ ID NO: 497 - DNA, 15308 bp, unidentified
  source 1..15308: mol_type = unassigned DNA
  misc_difference 508: note = a, c, g, or t
  misc_difference 509: note = a, c, g, or t
  misc_difference 510: note = a, c, g, or t
  misc_difference 511: note = a, c, g, or t
  misc_difference 512: note = a, c, g, or t
  misc_difference 513: note = a, c, g, or t
  misc_difference 514: note = a, c, g, or t
  misc_difference 515: note = a, c, g, or t
  misc_difference 516: note = a, c, g, or t
  misc_difference 517: note = a, c, g, or t
ttattccggtatccatcaatctgtccagggcgagtctgtattttgacagtgtggtcagccggtatcagcagatcgctgatgaaatcggagtaaaaacccatctggttccgattgagattacagagagcgcagcaattgacaatgacaatatcaaggggctggcagataagttccatgacaatggttttccattgcttgtagatgattttggatcggggtattcttcccttgcaacactgaacatgaaatgtttcgatacgttaaaaattgacaaaagtctgattgattacatcggggatttcagtggggaacgattgctggaacatacgattttacttgcaaaggaacttggattgtgcgttacggcagaaggtgttgagagagaagaacaggtggatttcctcaaacagatgaagtgtgacagtattcagggatattactattcgagaccgcttccaaaagaagagtttgaaaaacttttgctgacagcttaaatgataagaaaacnnnnnnnnnnaaacttttatggaatcatagaagttttccctgttttatttattgaccgagaagggaatctacataattgcgtattgcataattgtcttccggcatctgacatcccacaatatatacaccttcatcatccgagcaccggatgacatgtccttccagatgggactgatccgaaagggcaaaattttggatatcgatagcaacatctgcatgtttgtgatccatgaaaaatggatcccggatcagaaatgcaaatccattggcactgatattgtcaagctgaccggagaacgttgtgtcggaatctttcagcgtgatggtacatggattggacacatctgcccgtgggtatttccggcggtttttaatctccggacgtgcggaaagctgcaatgcatagacgtgggaaccggacgccgtgtcagcttgtatctgcgcctgatcccaacagtagagaacattgtcaaccgtgacctgaaccttacatgtttcggatccgtttaactgtggatcgtcagacaaaatcagggaaatactattttccgcaacagatctgacttctccgtgatactccatgcgttccagatgttttggaagaataacttttgctttcataccggcatgaatatcatccagacccatgaaaccaccgatgcccagttcacacatcagctcctgaattacattttctatgttattgatgttggaagcactttcctcatatttgctgagcatgcgtttgcttgtttcatcggaatcactgatgcatgtggtcatggtttccacgatggaagatacctgttccatattttccaccagctgacgattggaagattccacttctttcatggcagaatcaattgtctggatgtgttcacccagaagagaagaatcctgtgtaattttatttacattttcaccggtctgggttactttttccagagtggcctgaataagttttaaggtttcttcaatggaagaagtcatttttcctgaaatttcatccagccgcgagagtgcttcgctgatctgtccggaagaatctttggtttcggtactcagcttgcggatctgttctgcaacgacggagaatccttttccggcttcccctgcgcgggcagcttcaatggaagcattaagtgccagcagattggtctggctggaaatactgtcaatggttccggtttcctgttttacggtttcaaattctgccttgaaagcgtccagaatatgttctacctcattggacagatctgccatcgttccggcagtctgtaccagactctccagatcaacggaacttgtctttgcgtgtttgccggattccgcagtcagggataccatatcattgatcatggaagcaacattctgtacctgggaattgatatctcccgtcatttcctgcgaggaggctgtccgggactgcagctggccgttatggtcggtcagtttgttcattccgtctacgacaatgtcagaaccatgtttgttttccgtggcgagttcgcggacaacggtgattccatccatgatggtattgctggcggttttaacctgttcaacagttgtaacaacccgttttaaatcggctttgatactgtttgtcagggcaccatcggattcgatgagatggcggatagacatgatatagccgatataacagagcaggagacaggcaatctgcagctgataatttttctggtccgttgcagtattctgaccgagaacgaccagatgataaatgacactgataatgacactggcgatattggcgattgcacatcctaccataaatttccggtctttgtaaagaaccagaagactgacaaccggaagaatataggtaaaggcaatcggtgaatcggtggtgcagatcaggaacgtgtaaaaaataccgtaaccgacgacaagcgcataccgatagcggtcatcagcctttcccctgatgcgcaaaagaagatcaccggcaaaaaaaggaacccagcacagtattaaaaaaatgatgaaatttgtggaaggatacccaccctgggatacatctgtgccgtagtttgcactaagaagaagggcaaatacaagccagatgcgtctggctttgatattggccttggccttaaattcattttcattataatccataatacgtttctcctatgtgaaagctaattctattgtatgacgggatgaacgttttttcaagtaaaatgctttgttttctgtgcataatttttctgggattccggcatactacccatacaacatgaatatggaaagtaatctggaaaacaggaggaaatttatcatatgaaagcaactggaattgtgcgcagaatcgatgatctgggaagaattgtggttccgaaagaaattcgcaggacactgcgcatccgggagggggatcccctagagatttttacaagccgggagggcgaaattatgctcaaaaaatactcaccggttggggaactgggcgagtttgcacgaagttatgcacaggcactggcacagaccacagaggctctggtctgcattacggatcgggaatatgtgatcgcagcagcgggaaccgggaaaaaggaagttgagggggaacagctgagcgaagaaatggaagaaatgattgaaaagcgcagcacagttgtgaaaacaggagaagaacaggcctgctccattacaaaaaaaacaatgtcaacccttccgaagggaattgtgctttcaagtattctgtgcaatggagactgtcagggtgctgtgattctggcagataacagcggacaaaaggaaacacttggactgttgaaagcattgtctgccacagctgcaaattttctggggaaaaatatggaacagtgaaaataataaaatcttaataaaaagataatttgcatatactgtccaaaagagataaaatatatgatgtatgtttccaaaataaatatggaggagagtatatgtcaaccaagaagaaaaagaaaagaaagaaaaagcagcatcgctttttctggtttgtcataaagctgcagatcgtgctgatgcttgttgtgctggcaggttttggatactactattttggcggatatgcggatcagatacagcagatgcgccgtgaggcagtgcaggaggtatctgcttccgacgattctacgtttatcccttcacagacctgctccgtttttgataaagacggaaaactgatctctgaacgaaggggagacaagaatgcgcagtatgtcaaatacgaggatattccaaagaattttgtcgcagcgattatcagtattgaggacaagaagttttaccagcataacggtgtggatctgaaaggacttgtgcgcgcggtcaaagccacagtaatgtcgaaactgaaaaaatcgcagggtggtacgcagggtggaagtacgattaccatgcagcttgccaagctgatttatatgcagccgaaacagacgtggcagtacaaggtgaagcagatgtttcttgcgtgggaactcgaaaaacgttacagtaaggataaaattatggaattttatctgaataacgtgtattttgcaaacggctattacggaattgacgctgcctgtcatggatattttaactgtgaactgaaagatcttgatgtatcgcagaccgcgtatctgtgtgcgatcccgaaccgcccgtccaattatgatccggtgacacacccggacaataccattacccggcggaatctgatcttaaagaatatgcgggatgacgggaaaatctcccaggaagagtattatgaggcaaccaaagaagagattgcactgaaccggcctaaaaagagtgacacggagaaaattaacagttcgattgacacttacacgtatgactgcgcaacccgtgcactgatggaacaggaaggtttccagtttaaatattattttgattcggataaggaaaagaagtcttatggggaagcatatgacgaactttacagtgcgtgtcagaagaaactgttttccggaggatacaaaatctatacgacgattgatatggaaaaacaaaaggaactgcagtctgccattgatgataccctgaaaggatttaaagacaaatccaaagacggaacttacaagatgcaggcggcagcagtatcaattgataacaacagcggatatgttgtggcaatcgtgggcggccgtaagcaggattcggataattatacgttaaaccgtgcataccagagttaccgtcagccgggaagttcgattaagccattgctggtatatactccgcagctggagcgcgggtatactccggataccgttgtggatgaccataaactaaaagacggaccgtcgaatgcaaacaatacatatgccggaaagattccgctcagatatgcggttgcacattccattaatacgattgcctggcagctgtatgatgaactgacaccaaaagcaggcctgcagtatttaaaaaatatgaattttgcacagatcaaggacggagattataccctcgccacatctcttggtggatttaccaaaggtgtttctccacttgagatggcatccgggtatgcagcggttgaaaatgacggactttacagggaaccgacctgtgtaaaatcaattgtggattctgacgaaaatgtagtctatacgtccagcctgacggaaaaaacggtttataagcaggatgcggcgcggatgatgacggatatcatgacctccgttatggacagtggaaccggacgttctgcaaagcttgccgatatgccgtgtgccggaaagacgggtacaacaaacgatcacaaagatggatggttctgcggatttaccagatattatacaaccgcagtctgggtgggatgtgattatccaaaagccatttccaatctgagtggaagcacatatccggcacagatctggaaagcatatatgtctgcggcccacgagggattatcttcgcttgatttccttccttatgctcagctttcggatgattttaaaaatcagcagaagcaggaagaggaagaacacgacaagatgcgcgaagaaaaccagatagaagaaaaccagacggatgaccagcagacttccgagagccagcagaaagataatacaacggacggaagctccgaaaatgataaccagccggacaataacgacagcaatgccggtgatcagaataacaattccaaaccggaacatagtggggacaacgattccggagaaagcggaggaaacactgatacgccggaaaatggagaaaataccaataaaccggacaatagcggaaccacggataatagcggtgataccggagagagtggagataccggtggtggaaacgtacaataaacatatataaaacagtgcaaccggtgtatttatggatacatcggttgattttttttatcgatactaggcagaaattccggaatatggtagaatatagatacatggggtagaagaaaaatacatatcacatagatcaaggaggaatcaggaattgaagaaatatggatttggcgtagacgtgggaggaaccaccgtaaaaatgggattttttgagacaagcggagagcttcttgacaaatgggaaatcaagacagataccagcgataacggaaaggcagtactgccggatattgcacaggcgattgataacaaactggcgcaggaaggcatcagtaagagtgatgtagagggtgtgggaatcggtgttccgggtcctgtgcggagtgatggcgttgttaacgggtgtgtcaatctcggctggggagtgatcaatgttgcggaggaactcggtgcccagacaggtctgaaagtaaaagtcggaaatgatgcgaacgttgcaggtcttggcgaaatgtggcagggcggtggaaaaggaagtaaagatgtcatcatggtaacgcttggtaccggtgtcggcggtggaattatcgtggacggacatgtggttgctggatataacggtgcaggcggagaaatcggacacattaccgtaaatcatgatgagatcgagccttgtaactgtgggcagtatggatgtctggaacagtatacttctgcgactggtattgtacgcatggcaaaacgtaaacttgccaaaacacaggatgcgacaaagcttcgtgattataaagatattactgcaaaagacatttttgatgtggcaaaagaaggcgatgaagtagctcttggactggtagatgaagtgggagaaattttagggtcaaccctttcgaatattgcatgcgtgaccaatccggaagttatcgtgatcggtggtggtgtgtccaaagccggacagattttaatcgatacgatccagaagcactttaaggaaagctgcttccatgcatgtcgtgatacccgctttgaactggcacagcttggcaatgatgccggaatatacggggcaatgcaactcattatcggataagttcaaaaaacagaaccatatgcacagcaaacattttcgtgtaggaagaaagtgtttgctgtgcttttttgtactcttttatcattaccctgttgaaaaaatatcttgacaatcaaactatctttgcatatactttgactaagaaactgtttgacaatcaaactatttcacaatcaaacaaaattgaagacagtaaaaggagaacccattatgttagaaaagttaaaagaaatcattgcagaccagttaaacgtagacgcagattctatcaccgcagagtcccgtttcaaagaggatcttgaggcagattccttagatctgtttgagctggttatggctttggaagaagagtacggtgtagagattccttctgaggatttagagaagatccttaccgttcaggatgtcattgattatatgaaaaataagggtgttgaggcataagctatgaaaacaagagtgacagagcttttgggaatcgaatatccgatcattcagggcggtatggcatgggtcgcaacacatgaactggccagtgcggtatccaatgccggcggacttggcatcatcggagcaggtggagcaccggcttcctgggtgcgtgagcagattcaggcagcaaaaaaagaaaccgacaagccgtttggagtaaatctcatgctgatgaatccggaagcggatgagattgcaaaagtaattgtggaggaaggcgttaaggtagtaacaaccggcgccggcaatccggccaaatatatgagcatgtggaaagaagccaaaatcaaagtaatcccggttgtggcaagcgtggcattggcaaagctgatggagcgtggcggtgcggatgcactggtcgctgagggaatggagtccggtggacacatcggtgcccagacgacgatgacactcgtaccacaggtagtagatgcggtatccattccggtcattgcagccggtggaattgcagatggacgtggatttgcggcagctatgatgcttggcgcagaggcagtacagatgggaacccgttttgttgttgcaaaagaatccacggttcatgaaaattacaagcagcgcgtggtcaaagcaaaagatattgacagtgaagtgaccggcatgtccacaggccatccgattcgcgttattcgtaacaaaatgacccgcgagtacttaaagaaagaaaaagaaggtgcaccgttcgaagaacttgagcagatgacactcggagcactgcgcaaagcagttgtcgagggcgatgtcatgtacggcagcgttatggcaggccagtctgcggctctggtaaaaaaagaagagacctgtgcggaaattatccgggatgttatgagtggtgccgaaaagttattgggacagaaataggagaagacagtgaagagagtatttatgttccctggacagggatctcagtatattggtatgggaaaagagttttacgacgccatgccggaagcaaaagcggtttatgatctggcaaatgaagtgacaggtctggatgtggcagctctttgctttgaagaaaatgataagctgaacattacagagtacacacagatctgtatgctcacaaccgaggcggctatttatacagcattacaagcagcgggaattggctgcgacgttacggcaggcttaagccttggcgaatatggtgcgctgattgcatccggagcgatgacaatgcgggatgcatttgcggttgtccgcaagcgcggtatttatatggaacaggcatatccggtaggcggcggtatgtctgcaattcttggactggatgcggaaaagatcgcagcaatctgtgaggaaaccgctgcaaaaacaaacaaagttgtttccattgcaaattacaactgtccgggacagatcgttatcaccggagcagcagatgctgtaggtgaggcaggagatgcctgcaaggaagccggagcaaagcgcgtggttccgcttaaagtcagtggcccgttccattctgcacttttagcagaagcaggaaagaaactcggggaggcactcgaagatgtaacgattcagccgatcacgattccgtatctgaccaatgtgactgcagattatgtcaaagatccggcagacgtcaaggattatctggtacgtcaggtttcttcttccgtgcgctggcagcagacaattgagcgcctgattgcagacggagcagaggaatttgtggagatcggaccgggacgcagcctttctggatttatgagaaagattaatcgcgaggttaccacatgcaacatcgacaaaatggaggatttcaataaatatgttaaccggtaaaaatgcacttgttacaggtgcttccaggggaatcggaagagccattgcgctggagctggcaaaacgcggagcatttgttgtggtgaactacaatggttccgaagatgctgctaatgaaacggttgcagcaatcaaagcggccggaggagatgccgtgagtgttcgctgcaatgtctctgattttacagcctgtcaggagatgatagaatcccttatcaaagaatataagcatatggatattctggtgaacaatgccggaattacaagggatgatctgctgatgcgcatgaaggaaagcgattttgatgctgtgatcaataccaacctgaagggaactttcaatacaattcgtcatctgtcacgctatctgttaaaacagcgtgccggaaaaattatcaatatttcttcggtatccggaatccttggaaatgcgggacagtcaaactatgcagcaagcaaggcgggcgtgatcggtctgacaaaatctgttgcaagggagcttgcatccagaggaatctgcgtcaatgcggttgctcccggatttgtagagacagagatgaccgcagtattgccggaaaagacccaggaagaattaaaaaagcagatcccgcttggcagagccggacaggtacaggatattgcgaatgcagtcgcatttcttgcatcaccggagtcggattatattaccgggcagatactttctgtagatggtggtatggccatttaaggaacctgatagaaagaaaggaaaaggaaaatgagaagagtcgttgtgacgggaatgggagcaatcacgccgatcggcctgaatgtggaagaattctggaaaggaatccatgccggacagattggatttggtcctatcacgaagtttgatgcaagtgaatataaagcacatcttgcggcagaagtcaaaggttttgtcggaaaagagcatatggattttaaggcagcaaagcgtatggaactgtttgcacagtacgcagtagcagcagccaaagaagccgttgcggatgcagggcttgatatggaaaaagaggacgcttaccgttgcggtacagccgttggatgcggtgttggaagtcttcaggcaatcgagcgcgagtatacaaagattgtggaaaaaggaccgggcagagtcaatccgattttcgttccattgatgatctcaaacatggcagcaggaaatgtctccatccagctgggattgcagggaaaatgtaccaatgatgtaactgcctgtgcgaccggtacgaataatatcggtgatgcgttccgcagcattcagtacggagaggcagatgtcatggtagccggaggaaccgaggcagccgtatgtccatgtgcgattgccggattcggtgcactgacggcgctttctccatccgatgatccggaaaaatgttcccttcctttcgataaaaaccgcagcgggtttgtattgggtgaaggtgccggcattgttgttcttgaggaacttgagcatgcgaaggcaagaggcgcaaaaatctatgcagaagttgtgggatatggatgttctgcagatgcttaccatattacttccccactcgaagacggtgcaggtgcagcacgcgctatgcagaatgccatcgaggatgcgggggtagacaaaaacgagatcacgtacatcaatgcgcatggtactgcaacgcatcacaacgatctttttgagacccgtgccattaagttactgtttggggatcatgcaaaggacattaagatcaattctacaaagtccatgatcggtcatcttcttggtgccgcaggtgcggttgaatttatcacctgtgtcaaagagctggaagaaggatacattcaccgtacagttggttatgagacaccggatgacgagatggatctgaactactgtaaagaagaatcccacgagtcatttacctatgcactgtcaaactctcttggatttggcggacataacgcaagtcttctggttcgcaaatacgaggagtagaagctatgagtatgacaacacaggaaattatggaaattctgccacacagacatccgtttctgctgattgatacggtggaagaagtggagccgggcgtgcgcgcggtagcaaagaaaaatgtaactttcaatgaaccgttttttgccggtcattttccgggaaatccggttatgccgggcgtgctgatcgtggaagcactggcacagaccggtgcggttgcaattctttcgcagccggaatggaaaggaaagacggcatattttgcaggaatcaataaagcaaaattcaagcagaaagttgttccaggggatactctggtgcttgaaaccgaaattatcaaggtgaagggaccgatcggtgtggggcaggcaacagcaaaagtaaatggaaaactggcatgttccgcagaattgacatttgcaatcggataggggaaaggcaatgttttttaataaaaaatatatcaaagtaaatcacaacgaagaaccagaaaaaacacaggcagaagagccaaagcaggaagaggcaaaggaagcagcacctgttgtagagaccgttacctgtaaaatctgcaaaaaagaactggataaacagcgtgtcattaaaaataaatatgtctgctatgagtgcggatattatttccgtgtccgcaccaaaaaccgtattcgtatggtggcggatgcaggaacttttgaaacctgggataatgatcttaagaccgaaaatccgctgaatttcccggaatacgaagaaaaagttgctacaacacaggaaaaaaccggattaaacgaaggcgtaaccatgggaagttgtacaatcaacggagagaagacagttctcggtgtgattgatgcccgtttcatgatgggaagtatgggacacgtagtcggtgagcggattacacgtgcaatggaaaaggcaacggaacagaaacttccggtgatcttattctgctgttccggtggtgcacgtatgcaggagggaattatttccctgatgcagatggcaaagacttctgcagctgtaaaacggcattcggatgcaggacttctttatattccggttctgacagatccgacaaccggtggtgtgaccgcaagttttgcaatgcttggagatattatccttgcagagccgggagcgctgattggttttgccggtccgcgtgtgattgagcagaccatcggggagaagcttccggatggattccagagagctgagtttcagctgaaacacggatttgtggatgcaattgtagagcgtgacgagttaaaagatacgctggggaaaattcttcgtctgcatcgtccgaccgaaggctatgcaaattttgatccagcacatgacgatgaccgttatgagccgaccgaactgatgcgcgagagaaatacgttttccagaccgttggaaccgtgggataaagtaatggcggcacgtcagatgaagcgtctggcatctgtcgactatatgggacagatttttgatgaattcatggaactgcacggagaccgttatttccgtgatgatccggcaattgtcggtggtattgcctatctggatggacagccggtaaccgtgatcggggtgcataagggaaaagatttaaaggactgcaaggaacgcaactttggtatgccttcgccggaagggtaccgcaaagcaatccgtctgatgaagcaggcagaaaaattcaatcggccaatcattacttttgtaaatacatccggcgcatatccgggaaaagaagccgaggagaacggacagggtgaggcaattgcaagaaacctttatgaaatgtccggaatccaggtgccgattctttgcctgatgattggcgaaggcggcagtggtggagctcttgcccttgcggttggtaatgaagtatggatgatggaaaatgccacctattcgattctttctccggagggatttgcttccattctctggaaggatggaaaacgtgcaaaagaagcggcaactgtcatgaagatcacggcacaggatctgaaagaactgtctgttgtggataaggtgattccggagtatggcggagcggatgacgatgcgctgacttcaattgcggcatggatgaaaggaaatatgaaagaatttttacgcgcacagaatgacaagagtggtaagcagcttgcacaggagcggtatgatcgcttcagaaagttctaattgttccatagaggagaagcataaaatgaaatttttaggaaccggaagtgcgcttccgaaaaaagttgtaagcaatgatgacctggctcaggttatggacacttcagatgagtggattcgttcccgtaccgggatcggcatgcgtcatattgcggtggaagagacaacgacttccatggcggtagaggcggcagagaaggcgcttgcagatgcaaaaatatccggatgtgaaattgatctgatcatcgcgggaaccatttccccggattacatatttccatcgctggcatgtgaagtacaggctgcaattggagcaaaaagtgcaacggcatttgatctgagtgcgggatgttccggatttttatttgcactggctacggcggatgcctatttccgtaccggacgttacaaacatgcactggttatcggggcggaaaccctgtcaaaaatgatgaactgggcagaccgcagtacctgtgtgcttttcggggatggagccggagctgctgtagttagtgcagaaggaagccagctgctttccatggtgcagggatcagatggcgccggtggcatggcattgcattgtgagaaccgtccggtgaataatctttaccgccagcttggtgcacagcattatgcgttcacccagatggatgggagagaggtttataagtttgccgtgcgcacggttccaaaggcggtcagtgaagcacttgaacaggcagaacttccaattgaagatgtaaaatattttctgcttcaccaggcaaatatccggattattgagtcagtggcaaagcgtctgcatcagccaatggaaaaattcccatgtaatttacagaagtgtggaaatgtttcggccgcaagcgtacctattttacttgataatgtccacaaacatggtatgataagcgggggcgataaaatcgtattagctggatttggtgccggacttacctggggggcatgtgcagtcgagtggtaggtcacaccagatcatgaaggagtttaacatgacgctggaagagaccttaaatgatcttcttgtaaaattattcaaggatattctggagattgaggcgaaaagcctgatcacagaagagtttaaagatatcagttataatgatatgcatattatcgaggcagtgggaattgatgagccgcgaaatatgaaaaccgttgcaaaactgatgtccgttacaacaggcacactcacgaaagcaatggatgccttgtgtgagaaaggatatgttgtccgggaacggagtacgcgggataaaagagtaataaagctgcgcctgacagataaagggaaagctgcctattatcatcacgaacagtttcaccgccagatgattaaaaatgttgcggatgagatgaacgattccgaaaaagagatacttgtctttgccctggcaaaactggtggattactttaaactgacctactatgatacggacgaggaatccgaattcgttgactggtcgaaaataagcagggataaataaaatatatacttatttagtgttataaccgggcggttcagaatgcaagttttgaatcgccctgtttcattttatactcaaaaagctgctttattacgccgtagtggtagaaaattacaataataaagaattttctattgcaaaatcctgcatttttcgttacaataaaaaaggttgttgtagaaacaggcaacagattatgaacagaacatgacgattcgggattttactggttccggacgttaaaaattaatattaaggagatagagaaatgggttatgttgatgaagtactcgaagtagtaaagaagaaaaacgcagatcagcctgaattcttacaggcagtaacagaggttcttgattctttaagacctgtgatcgatgcaa

SEQ ID NO: 498 - DNA, 9427 bp, unidentified
  source 1..9427: mol_type = unassigned DNA
  misc_difference 1395: note = a, c, g, or t
  misc_difference 1396: note = a, c, g, or t
  misc_difference 1397: note = a, c, g, or t
  misc_difference 1398: note = a, c, g, or t
  misc_difference 1399: note = a, c, g, or t
  misc_difference 1400: note = a, c, g, or t
  misc_difference 1401: note = a, c, g, or t
  misc_difference 1402: note = a, c, g, or t
  misc_difference 1403: note = a, c, g, or t
  misc_difference 1404: note = a, c, g, or t
ttattcaggttgtttgtcagccattagtctaaccataacagccttttgagcatgaagtctgttttctgcttcttcaaagatttcatcagcatgagcttcaaaaacatcggcagtaatttcttcacctctgtgagcaggtaggcagtgtagaaccatacaatccttgtttgtcttttccattagttcagcattaatctgaataccggcaaatgccttttcacgaatagccttttcttcttcctgacccattgatgcccatacatcagtatatacaacatccgcattttcagcagcctttagagggtctgttgtcatttcaaacataccagggtaattgcctgcaaagtcaagaatgttctttggaggttcataacccttaggacaagcaatagcaacgctcataccacactttaagcaaccaacaataagtgagttagccatattgttaccgtcaccgataaatgctaacttaagaccctttagcttacccttaaattcacgaattgtcataaggtcagctagcacctgacatgggtggcaatagtctgttaaaccgttgataacagggattgaaccgtattcagcaagtgcatcaacttctgcctgagcaaatgtacgaatcataataccgtctagcattcttgaaagaactcttgcagtatcttctacaggttcacctctgccaatctgtaaatcatttgatgacaagaatagtgggtggccacctagctgatacatacctgtttcaaaagaaactcttgttcttgttgatgacttttcaaaaatcataccaagtgttttaccctttaggtgatgatgttcaataccatgctttagttcatactttagctgatcagcaaggttaagaatatccttaatttcttctgttgatagactttcaagtgttaataaatgcttcatcctttattcctccattaccttctttagtatagcaagtgcttcatcaatttcatcatacttaatatttagtggtggcaacattcttagtaatgtttttgcagtgattacaagaagaccgttttctgtacatttctttgcaatatcacctgcgttaccctcaacttcaataccaatcattaagccttgttgacgaactgacttaacacctttgattttttctagtttttctttaaagtaagtacccttcttatttacttcttcaataaattcaggagtgtttactgtatcaataatatagttagcaccggcacaaacaacagggttactgccaaatgttgtaccgtgagttgatggacccataacatcctttagtttgtcgttaaccatacaaattccaataggaagtccaccaccaagaccttttgctgaagttacaacatcaggcttaatgccactgtgcatatagccgtaaannnnnnnnnnaaagtttgcctgtacggcaaacacctgtctgtacttcatcaacaataagcaaaatgtctttttcatcacaaatctttcttacctgttgtaaatattcaaagtcaaggatatttacgccaccctcaccctgaactgtttctagcataacagcacaagttttgtctgtgattgtatcttttagactttcaatatcattagcaatagcattatcaaagccatctacaaatgggaagaagtaattatggaaaacatcctgacctgttgcagacaatgttgcaatagttctgccatggaaactgtttaccaaagtaataatatggtctctacctctaccgtatttatcaaatgaatattttctcgcaaccttaattgcacattcatttgcttcagcaccactgttgccgaagaatacctttgaaagtcctgttgccttagttagcttttcagcaagaacaccggcaaccttattgtagtaatagttactaatgtgctgaattgtaccggcttgttcactaactgcctttacccaaccgtcatcacagtaaccaagacagtttacaccgataccggaagaaacatcaatatatttcttaccgttatcgtcataagcatacacacctttacctttagttagacaaacatcatatctgccgtatgtatgcataatattttcattatctaattctttaatctttttattatccattgtaatcaatcctatcaatcaaatgagaatacatcaatgtcatccctctttgtaaagcccattgctttccaaaaaggctgacctagttgattgtttttgtaacagaaaatgtgagttttcttaataccggcttgttttattcttttgtcagcctcagtagcaagacttctgccaacacccattctacggtaatcagggctaactgccatatgatgaataaaacctcttctgccgtcatgacctgcaagtacagtagcaataatcttaccgtcaactatgccaacaagcgacatacccttgttgtgttcaaggtactttgcaatattttctctactatcggcatcagacaaggctctctttgttgttacttgccaaagagcaaaaatctcatcatagtcttcaattgtcatttctctaatctgtaaattatccatatatatttccttattaatagaacattgtaccgataccttcatcggagaacaattcaataagaatagaatgttcaattctaccgtcaataatatgcgctcttgatacaccttgacgaactgcctcaacacaacaatcaatcttaggtatcataccaccactgatgatgccttctctctttagctgactgacttcacttacatttactacagagataagtgaatcttcatcatccttatcttgaagtagtcctctaatatcagtcataagaataagtttcttagcaccaatctttgatgcaatatgggcagcagcaatatcagcattaatgttatacacattacccttatagtcaccggctacagttgcaataataggtacatagccgtcactgatagcatcgttaataacttcactgtttacttctgtgatttcgccaacataacctaggtcatcacctgtaaccatcttttcagccataagcatattgctgtcaagaccacaaagaccaatagccttaccacctgcatggttaaggtgctgagttaagcttttgtttaccttaccggctagaacttgctgaacaatatccattgtttctttatcggtaacacgcataccgttaatgaatttactttcaatgccaactcgttttagcattgaagaaatttcaggaccaccaccatgtacaagaacaacatttacaccaacaagttgcattagtacaatgtcactcataacagcagcctttaaatcttcgttaagcattgcattgccaccgtattttacaacaattgtttcaccggcatatttctgaatatatggcattgcttgtgtaagcacttttgctgttaaactactatccatttctcaaacttctttctctatcttatttttctaaaacaatcatcttcccataataacggattgctttttatatcaaaattataattatcaggttctatagtcaccgttgatttttacataatcatatgttaagtcgcaaccataagcttcggcaaagccttcaccgtcattaagttcaatgttgataataacagtatcgcaagaaaggactttctttgcttcatcttcatcaaagccaacaccggcaccgttctcgcaaacaagaacctcgccaccttcacttttgaaagtaactttaaccttgctaatgtcaacatccataccactatagccgatagcacatagcactctgccccagttagcatctgcaccaaacatagcagtctttacaagtgaagaaccgataactgtctttgcaacacctactgcatctttctttgttttagctccactaacatcacagataagtaactttgttgcaccctcaccgtctttagcaagttgctttgcaagtgacttgaaagcctctgttaaaccggcaacaaatgtcttgtaatcttcattcttagttgtgatttccttattaccagctttaccactggccataatagcaagtgtatcgttagtagaagtatcaccgtcaacagaaaccatattgtagctgtcctctactgcttccttaagtgcttcttccaacatttttgagctgatagcacagtcagttgtaacgaaagaaagcattgtacccatattaatatgaatcataccactgcccttagcaataccaccaacagtaacagttttgccgtcaatagtcatttccattgccatttctttcttaactgtatctgttgtcataattgcttcggcacagtcagagccattttcgctactcatcattttcttcattaggtaaagtttctgttcaaatggttcaagtggtagtggcacaccgataacacctgttgatgcaacaataacatcatcttcggcaatattaagtgttgatgcacaaagtttgcaaacatctgatgctttcttataaccatcagcgttacaagtatttgcgttaccactgttagcaacaatagcctgtgctttgccgtttttcaaatgttcctgagttactaggatagcatctgactttacaaggttttttgtataaacagcagcagcattacacaaagtgtcgcactttaccatcataatatctttcttagttgtgttaccctctttgataccaccacagatagctgcaccggtaaagccttgaggagttgtgatagttccatcaataaatctaaaatccataaatatacctcattttttatttattattacgattacgccttgtaaagaagtatttgtaaatattagaatgcaggaggaacgatttccaaacctgtcttttcgtctaaaccaaaaataatattcatattctgaattgcttgaccggcagcacccttaaccatattatcaatggcagctactgcaacaagcaagtttgctctcttgtctaggtgaagagaaatatcacagaaattactgtacttaacattgtgaatatcagctacttgaccatcatcaagaagtctgataaagtattcacctttgtaaaaatcttgataaatctttcttagttcttccattgtaatgtccttctttaaaggagcataacaagtagcaaggatacctctgtttacaggtaacaaatgtggaacgaaagtaatagttaccttttcatcagcaaaagaagtaagtgtctgttcaatttcaggtgtatgacggtgacaagcaaccttataaggatggaaaccttcgtttagttcaggatagtggttactctgagaaagtgaacgacctgcaccggtaacaccacttttacagtcacagataatacctttagtgtcaataacacctgcattaagtgcaggaacaagagcaagtggtgagcaagttgtataacaacctggatttgcaataatcttagcacccttaatcttgtcacgataaaattcaggtaaaccgtaaactgccatatcgtgaagttccttgtgtacatattcacctttgtaccattctttgtattcttcttcactctttagtctaaagtcagcacctaggtcaataaacaccttgtcattgtcataacatttctttgcaagttcttggcttaaaccatgtggtaaagcagcaaagataacttctgccttttctacaacatcatctgcattttcgcaaatcatatcgtttatatttacataacttctatatacatcactaattttctgaccctcaaagctaactgagctaatagccacaatttcagcctgtgggtgagttgtaataaggcgaacaagttctgcaccggcatagcctgttgcaccaataattcctaccttaatcataaattaatcctcaatcttctttagcatatcttctgcttgtttcataacattctgtggagcaggaccaccaaaggatgttctgtctgcaacacatttctctaggttgatagcttcataaacaccatcatcaaaagcagaatgtactttcttgtattcttccataggtaaattttcaaggtcagtaccaaggtcaatacatcttgcaaccaaagcacctgtagccttgtaagcatctctaaatgggatacctttcttagttagataatcggcacaatcggtagcattgataaatccaccggctgctgcacttctcattttattctttaacactgtcatagtgtctagcattggagtaaaggaaattaggcacatttttacagaatcgactgcatcaaaaatagcctctttatcttcttgcatatccttgttgtaagctaatgcaatgcccttcatagcagtaagcagtcccattgtatcaccaaatacacgaccactcttacctctgacaagttctgcaatatcagggttcttcttctgtggcataattgatgaacctgtagagaaagcatcatcaagttccacaaacttaaattcccagctacaccacataatcatttcttcggaaaatcttgataggtgtaccataataattgacaagtcacttgcaatttccaagcaataatctctgtcagaaacaccgtcaagtgaattgtttgttggagcatcaaaacccaaaagttctgatgtcatatgtctgtcaatagggtaagttgtaccggctaatgcacaagaaccaagtgggttaatattcattctcttgcgacaatcctgaagtcttgataaatctcttaggaacatttcaccgtaagctaataagtgatgaccgaatgtaataggttgtgctctctgaagatgagtataaccaggcattactgtgtcataatattccttagccttagatgcaataaccttgattaggtcctttagcaaagaaataatctcttctacttcgtgtcttaaatatagcttaatatcaacagcaacttggtcatttctacttcttgctgtgtgaagtcttttaccgtcatcaccgattctctttgttagttcaccctcaataaatgtgtgaatatcttcacattccatatcaaagtgaagtttaccggaaagtaaatcttcaagaataccttttaggccttcaacaatatgaagtgactcctctttcttgataatgcctgtttcacctagcatagtagcatgagcgattgagccttgtatatcttctctaaacattcttgagtcaaaagaaatggatgagttaaaatcgttagttgttttagaaagagatttcttaaatcttccttgccataactgcattgcttacacctctatttttgcaaaattataggtatttttatgtaaaaacaccgaaaaataggagaaaattcatacccctagaaaatgacataaagtccgtatgggtcatacggactttataattacaatttaaagaaatttcatcaattatttgatgaagcccttcttagcacgaaccttgattggaagaccgaataggttgatgaaacctgcactgtcgttctggtcataaacttcgtcttcgtcaaatgttgcaatatcttcatcatatagtgaatatggagaagtaacacctgcatcaataatgttgcccttgtaaagttttagcttaacatcacctgtaacaactgtgtttacctgatcaacgaaagctgttagagcttctcttagtggtgtgtaccactgaccataataaactaattcagcaaaacggtttgaaacaagttccatatagtggaatgtatctctgtcaagtgttagttcttctagtttcttgtgagcatagtaaaggattgtgccacccggagtttcataaacaccacggctcttcataccaacaagacggttttcaatcatatctgtaataccgataccgttagcaccaccaacttcgtttagcttcttaacgatagaaacgccgtccatttcaacaccgtcaatagctgttggaacacccttttcaaagtgaattgtaatatatgtatccttatcaggagcctgttcaggtgatacacctagttctaggaagttagggtcatcatacttaggttcatttgcaggattttcaagatcaagaccttcgtggcttaagtgccataggttcttatcttttgagtagtttgtttctctgttaatctttagaggaatacccatcttttctgcgtattcaatttcgtcttctcttgacttaaattcccaagttctccaaggagcaataatcttcatatcaggagcataagctttaatagcaagttcaaaacgaacctggtcgttacccttacctgtacaaccgtgacaaattgcatcagcaccttcagccttagcaatttcaactaatctctttgcgataataggacgagcaaaagaagtacctagaagatatttgccttcataaactgcatcagccttgattgtttcaaaaacataatcttcaataaattcttttgttaggtcttcaatgtatagcttactagcacctgtcttgatagccttttcttcaaggccgtctagttctgtaccctgaccaacattaccggaaactgcgataacttcacagttattgtagttttcctttagccaaggaataatgattgatgtatcaagtccacctgaataagcaagaacaacttttttaatatctttatctgccatgataatatttcctttcgtcctcaatgaggttaataattaatttatgtttttattatacaccaattatacagaaaatcaagggttatttgcatatttattcaaatttccaataatttgtagaattaagacaacaagtttgcatatacacagaatattgcagtaaatttatacaatcacaacaaagaattatacaaatatatccttattcagcctagattttccttgatttttaaaatgaatatatgcaaattttatgcataattatacatttttaatgtatgttattcattttcttgcaaaagatagccataatgtgatatatttatcttataaaataatcaaaggagataataaaatgtttaaagaaatatctgctaaagaactaaaggaaaacccatttaagcttattggtgatgattggggtcttgttactgttgacactaaagaaaaggtcaatatgatgactgtttcttggggtggtgttggcattatgtggaataagcctgttgcatttactttcattcgtccccagagatacacatttgactacctagaaaacggtgagtactttgctatttctttcctacctgatgaataccatgatgtacacaaaatttgtggttcaaaaagtggcagagatattgacaaggttaaggaaacaggtttaacacctgtaaccgatgaaaaagcaccttactttgcagaaagcaaggttgtactgatttgtcgtaaaatgtatggtcaaagtctaaattccgacagtgttgttgatgaaagtgtattgtcatcatatgcacccgacggtagtgactaccacaaaatgtacatttcagaaattgaaaaggtacttgttaaagaataa

SEQ ID NO: 499 - DNA, 11664 bp, unidentified
  source 1..11664: mol_type = unassigned DNA
  misc_difference 4574: note = a, c, g, or t
  misc_difference 4575: note = a, c, g, or t
  misc_difference 4576: note = a, c, g, or t
  misc_difference 4577: note = a, c, g, or t
  misc_difference 4578: note = a, c, g, or t
  misc_difference 4579: note = a, c, g, or t
  misc_difference 4580: note = a, c, g, or t
  misc_difference 4581: note = a, c, g, or t
  misc_difference 4582: note = a, c, g, or t
  misc_difference 4583: note = a, c, g, or t
ttaaattccaatcattaagccaatattgaacactctctgtataggatagccgagtccatttcctgccatttccggatcccacattttaaacttactgatgacgaacaagtttgaagcgttcagatagaggcgcaagtttctcagaccacacttggtaaatagtttttctggtatggtatatcctacttccaaactctttaggcgaagaaagcgtccgttacgcagccaccaactagatcctcgattattgttatctataatttttgaagctaagcgaggccaaaatgcgtaaatatcgcgattgtcttccgaccaatgatcttctgcaattacttctaataatccattttgatttccaccattgatatggaaaggggttatatttccgggattaatcataaatgatcgccttccaacacctgtaaagaagaagctgaaatctatatttttccatcccatagaggcaccaaatccataattaatttcgggtacattggggaatcccatgcaaacgttatcatcatctgtgatctttccatcgccgttcatatctttatacttgatatctcctgccatatattcaccaaatccctgctctggagagttcgctacatctgccttatcgataaacaagcgttcggcaatcaagccaatattcgcatttgctgtcctaccaattgatgaacgataccattcgttaataggatagccaggctcgtctaccactctcatttcattgtgagcatatgtaaagttaaattgtccttccagccataaaccgttcatgaaatttttctgatatttcattgatagatctacaccttgattgaatgcttctcctatattcgcttgtacttgagccgttaaccccatcgtatttggtatataagatcgtcccatcaggatattgttacgatactgggtaaaatattcagcagttaccgtaaatcccatacctaccaagtcaatagcaagattcatttgcttggatttttcccaaccgattagttcatttggatagcggttaatggaaattcccggcttactgtaattgaataactctccaaaagtatatccccatccactatccgataagtttacgttggagagataaaagaagcggtctttcattgcatcaccaatctggtcattacccactattccataggatcctctcaatttcagactagaaatcttgtcttttataggccaaaatttctcattagcaatatcccatgctgcgccaactgaaggaaagaatccccagcgattgtttttatgaaaacgttcactaccatttagtccaaagttgaattccacaaaataacgggagtcgaaattataagcagcacgtcctgacaagcctaaattacggttaggtaatgactgttctagcgaacctgcattaccagtagaatagtcagagagacgtcctaccagtaagccattaatcgtatgtttctctctgaagacatggtcgtacgtcaaaacagcttccgcatacattttgctgtttaccgtttttccaccttcttcataagtcaaatattcggttccaacagatcctatagagttagggccaccgtcattaaaagggagtaaagttgcatttcctgattcatcaatctgggtataatagtagaatggtgtaaagcgacgtttagtatcaaaataggaataacggtctacatatcccattgctctgaatttcaatccttcagtaataaatttcagatcttgttgaaattcaagctgagcgttgatccttgatgatttggaagattggaaacctgataccatttgggcatacgggttaacgaacaatgattttgtacccggcataagagcgtttccaaataattcatgtttcgaatatgggctcattgaaatcggataagtagccggaaacataacaggattcgaccaaatagcagaattaaacacagctccaccaccatcaattggccccttttgatcatcaaactgtccgtaaacacggatagttgctttcgtagtcgatgtaatatttaatgttgtattagaacgaattgcataattgatcagttttacattattatcaaaaaggtcggaagctccgctttttaaaacaccattatctacatttactgttcctgatacataatattgtgcaatatttcctccaccagatacactcatattataacgttgattcactgtataatctttaaccaattgatcaatccaattattattaggatacagatatggattatcaccattgcgcgtatgctcaatcttattttgcgaataaggaagatttgccaagggatctctagtcaatgcagcttcattggctagttccatataggtaatgttgtcagcaaacttaaaattacgtgtattagaagaaattgaagtctctacacgtgcatcaaatctagctttttctgctttacctaacttcgtagttaccaagattaccccgttagcaccacgtgcaccatatacagccgtggccgtggcatcttttaatacagaaaaagcattgatatcatctggttgtaaacgagctaagtcagtagaactagattcaacaccatcaatcaagattaatggatctaccttaccggctccaaatgaaccaacaccacgaacaaagaattgtgcattgtcctgtcccggctcaccggaactctgataagagataacaccggcaatcttaccttgaaacatcgttgtcagattacttgtcggtcctttcagatcttttacatcaatagtagttaccgaacttaccatactctcctttttttgagtaccgaatcctactactaccacttcttctaacgcttcgtttgattcttccatcacgattttcaagcgtttggtatttgttattttataagtaagattgcgcatacccataaacttgaataccaaaatatcacctaaacgagcttcaatagaaaaattaccattcatatcagtggcaacaccgatattggtaccttctatcatcacatttacacccggcataaaattaccgtctacgtcagttaccacaccaacaattttatcattattctgctgatttgaatacacagaatgattctttcctgcttcatcggcatacaatggagcagcagaaatcagaaaagaagcgatgattgataaaacaaattgtgagaaagaacttttaggaccctgtattctccatttctctttttgcacgatgagaaaatggaaaacatcttcattaattttcaatttccatatggctttcatagtttttaaatttttaaaattagtttttaagatttattggatatgcaaaattagatatttactaattatttaaactgtgttttttgacacaaaaaataatatttttgctaaattcgaaacaaagagcgtgggttcgatataaaatcagaaaatatccagttgcatgccattgataaaatttacctcaatagcgggcttcttttcaaagaaacaataagcagcaatggctgacagatcatttgcaatgaaattttgttgaaagaccgatgttttgaatcctcaatctgtgcgatattctttcatttatcgttggcggtttaaatcaggccctttttcgaagcagaattttatcggttatacttaccaggatattcttcatattgttttttgccttggtaacaagctgtattccattaaggaagaagttctcaaactgcgtctgtccgatatattatcccttgtcgatacataatttctcttttatgttttccagaaacttaccctgcttcaatggttcgcggtcatctacattttcgggagtaaatatgaacttctagatttttttaccattgataatcaggtgaagtttaaatccggagaaccatttcgtgaagtatttatcacgctcagttattctctcaagggttttgtgaatcagtattcactagttacggcagacgggcaatgagttaaatcgataaaattgatacctctgtgcaagttccaacaggactttcttgatgaaaatgctcaatggaagtaataccccctttttcaattctacaaagtggttataggatgcattattggaaaacaggtcattcaggtgtttacaggcatatttcttcgtaataatgcttgaaaaatctgaagccaccgaaataaaatagggtaagaataatcataatttccgtattactcatacggttagttttcttgcgatacttatatttttgtcttcaaacatatatttttcttgttgcaatgtaaataccttgcagaaatcatctgccatacaataaatctctgtaactttagtttatgagaacatactggtaatcgtttaaatgttataattgagcactataaacttaatatctttattgctatatatctaatttttaatgatatctttattctattatatcgaactcacgttaagatcagcattcaaagagttgtctactggtgctagtgtgacttcagaggatgaaaagacatcagatgagtcaatggagaagtgataattgtagcgataacgaagatttgatttggctgtttaatgaacagagaaacggttccgaggnnnnnnnnnnaccgtttctctgttttttatttctcatcgttcttgcgaatctccacacggcgaatcttaccgctgatcgtctttggcagttcgtcaacgaactcaatcacacgcggatatttataaggtgcagtcactttcttaacatggttctgcaattctttgatcaattcttctccggcgcgtgctttatagtctttagacaatacgatagttgctttcactacctgtccgcgaatctcgtcgggcactccggtaatagcacattctatcacggcagggtgtgtcatcaaagcgctttctacttcgaaaggaccgatgcggtaaccggaactcttgattacatcgtctgcgcgtcctacaaaccacaaatagccgtcttcgtctttccatgcaacgtcacctgtgtagtaaatgccgtcatgccaggcttcgtgtgtacgttccgcgtcgcgatagtattctttgaagagtccgagaggtttgcctttgctggtgcggattacgatctgaccttgttctcccgcttctacagagcggccttcgttgtctatcaggtccacgtcatattgtggattgggcaatcccatacttcccggtttcggttccatccaaggcatggtagctactgtcaatgtcgtctcagtctgtccgaagccttccatcagcttgatgcctgtcagtttcttgaaagtctcgaatacggcagggttcagagcttctccggcgatggtgcaataccgcaatgaggacagatcatatttggtcagatcttcatgaataaggaaacggaagatagtaggaggtgcacagagtgaagtcacctgatactcttgtatcttttccagaatagctgcgggggtgaacttctcatggtcgtaaacgaagatgtttgctccggcaatccactgtccgtagagtttgccccatactgcttttccccaaccggtatcggcgatggtgagatggagactgttctcgtccagattgtgccagaagctaccggtaacgatatgacctaacggataggtaaagtcatgcgctaccattttaggttcaccggtagtaccggaggtgaagtacatcagtgagatgtcatcattcgtattggcatgtctcggacggacgaatggagcagcgttctcgatgccctgatggaaatcttcgaatccttccggaacttccggacctacactgactaacttttctacgctcggacactcaggaagagcatctttgatgtgttgcaatacgattccttcaccggcagctacaatcattttgatgtcggcggcgttgcagcggtagatgatatctttctttgtcagcaggtgggttgcaggaataactgtggctcccagcttatgcaaggcgatggtgctgtaccagaactcgtagcggcgtttcagaatcagcatcaccatatctccgcgaccgatgccgaggctctggaagtaagaagccgtcatgtccgtatagcgtttcatgtcggcgaaagagaactggcggctttcgccccggtcattggtccagagtaaggcattcttgtcgggttgttcggctgcccaggcatctactacatcgtaaccgaagttgaagttctccggaacatttattttcaggttcttgataaaatcctcttgtgaggcaaagttagtctttgctaaaaatctttctaccataatgttattacataattactgccagaaaacgtaccgttttgccatcgagcgctttcatgccatgtggaagttttgagttgaaatagatactgtcaccttggttcaggataatttccttaccttcaatgttgataagcatacgcccttcgagcacaagattaaactcttgtccgttgtggtggttgtaatgaataggctcgtcgtctcctttgggttcgacagtaacgatgaacggatcggctgtgcgattcataaaaccggctgccagtgattggtatttgtaggctctggtgcgttcgatgctcgtgcctttgccggcacgggtgacaaagtaactgctcattttcggttcttcgccaaacatcagtgcatccagtgcaatgttataggtgcgggctatcttttgtaacatgctgacggaaatgtcgtaatctcctgtctctgcgagccggtattcctcggcagatatgtcacagtcgcgggcgatgtcttcagacgttagttccagtacgtcacgtaatccgcgaagacgctctgcgatttgtttaatttgatcattcatacaagtggttattttttataattaataattttgcggtattatttggatgccttcatcgccttgataacggcggaagtaaatccgttgtgctccagttcgttgattcctttgatggtgattccgcccggagtggtcaccttgtctatttccacgctgggatgagtatcattattcagaattaatgcggcggctcctttgacagactgggctaccatctccatggcatctttaggacggatgcccatttcgataccggcttgcatggcagcctggatgtatttcaatacataagcgatgccgcaggaagtcagtgccgtggtagctgctatcttttcttcggggatgagcatagacattcccatttcattgaacagccggagcatgaactggttttgctcatcgtttgtgttgcgtgctgcgataagcgtcatgctttccagttcgctgatggcagtgttggggatgaggcggaacatcggcatttcgggtgctatcacaaagtgtgcaagctcttcaaagctaatgccggctgctacagagacgagagtttgtctgctctttagcttcagctcacgcatcaccggttccatgaaccatggcttgaccgccaaaatgacaatatctgctcctgcagcagcttctgcgttattctgagttgtggagatgcccggaaattcttctttcagcttttccagtttgcctgcgctgggattggatacaatgatatctgagtctgctatcagacttccttttgccaggccgcgggctatagaaccacccatgtttcctgcaccgataatagctattttcatatgcgcttattttttatggattcttacagacaaaggtaacggtaaattgcgaaaaaacaaaaagcagcccggataagaaaaatatttctgtatgaggctgcttttttgtcggctgtttattaatcaaatgagcgatcagagtactctcttgaagcgggcaaggaattcgtccgcttcctccatgctgaggcagagagggggtaacagacgaagtacgtttgtaccgcttgctcccgtaaatacatgctcatcatagatgagtcggctgcgcagttctttgatcggttcttcaaattcgagtccgatcatcaacccgcgtccgcgtacttctttgatttgcggaaatttcttgagttcttccagcaggtaattaccgactttagcggcattttccaccagatggtcctgttcaatcacatccattacggcaagagctgccgagcatgccaggtgatttcctccgaatgtagttcccaattgtccgtagacgggtttgaacatcggactgatcagtacacctgccatcgggaatccgttaccgatacctttggctacagtgataatatccggctggatatgattgtattggtgagcaaagaatttaccgctgcgaccgtatccgctctgtatttcgtccagaatcaggatcgttccggtttcggtacaagcgttgcgaagttcctgcatgaattcggtagtcggtattttgataccgcccactccttgtattccttcgatgataacagcgcatacgtctccttttgccagttcctgtttcatcgcctcgatatcattcaagggaagataggtcacatgtccgttgttattgatcggagcaatgatggaaggattgttcgtagcctctactgccaacgaagtacgtccgtggaaagccttgctgaaggacactactttggtacgtccgttatagaaagaagccagcttcagcgcattctcattggcttcggctccgctgttgatcagaaacagggaatagtcttcgtaaccggagatttttcccagtcgttccgctacctgttgttgcagcttattgatcaccgaatttgaatagaaaccaagggttgctacctgattgctgatcatctccacatagtggggatgcgcatgtccgatggaaatgacggcatgacctccgtaaaggtccagatattccgtaccattctcatcccataccttacagccttgtcctttgactatattgatgttatataaaggatatacgtcgaataatttcataattcttctgtttttagaaagcggaaggtttcagccgtaatcctacggtttcttccaggttgaacatcaggttcatgttatgaactgcctgtccgctggcgcccttcagcaagttgtcgatgcaggagataatcaatagtttgtcaccatgtttctccaggtgtatcagacatttatttgtatttacgacttgtttcaagtctatattcttatctacgatatgaacgaaggagtctttggcataatattcttcgtacatgcgaatgatctcttcgagtgctactttggttttcacgacaagagtggcaaagatgccgcgtgggaaatcgccccgataagggataaagtcgatttctgaatcgaagctgttttgcagctgtttcagtgattgcttgatttccggcacatgctgatggtcgaatgccttgtagatgctgatgttattgttacgccagctgaaatgactggtagcaccgggtttcacgccggcaccggtacttccggtgatagcattaactgaaacatcatctgtcaacatcagattcttggccagcggaagcaaacctagctggatgcaggtggcaaaacaaccggggttggctacatgcttcgccgtacaggtagcacggcggttcagttccggcagaccatagatgaaatcatgatcgtcactcttgatacgataatccatcgagaggtcgatgatcttcaaatcttccggcacgttgtggctttccataaatttcttcgtgtcgccgtgggcagtacagaagaaaagcacgtcgatagcgtccaggggtaactggtcggtaaatctcaggtctgtttctccgtatagtccttcgtgtacgtcggtaattttgtttccggcattactgctgctgttgataaatacgatttcagtttccggatggttgagcagcagacggattaattcgcctgctgtatatcctgcgccaccaatgattcctgctttaatcatatctcttcgtctttatggttattgtagtaaacacgtagcggagtagaagtcaccttaataaagcctttcgcatcttcggctgtccagcctttctgcatctcgccatattcgccaaacttcgttttcacgaggtcatcttccgattctacgccaacggtagagaaagaaagcggacggagttcgaggattgccgtaccgttaacgttacgttggctttcctgaagcatagcttcgatatcacgcattaccggttcgagatactggctttcgtggaggaacattccgtaccagttggctacctgatctttccagtattgctgccatttgctcaatgtgtatttctcgaggaagcggtgggcaccgataatcaacatcggagctgctgcttcgaaacctacacggcctttgataccgataatcgtatcgcctacgtgcatatcgcgtccgataccgtatgccgcaccgatttcttctactttttgtatcgctttgatcggatcgtcgaatgtttcgtcgttgacagctttcagttctcccttttcgaaagtgagacggagttgttcgctgccttctttttccacatgtttcagataggctgtttccggtaatccctgtgcggagtcgaggatttcgccaccacagatggatgtaccccacaaacctacgttataagagtatttcagcttggtaaagtctgcactgaaaccatgtttgttcagatagtcgatttcttcctgacggctcaatgccatatcacgggtcagcgtgatgatttctacattcggagccagtacaaggaaagtcatgtcaaaacgaatctggtcgttacctgctccggtagaaccgtgggcaatggcatccgcaccgatttcgttggcataacgtgcgatggccaacgcctggaagatacgttccgagctgacggagatcgggtaagtaccattacgcagcacatttccgaaaaccatatatttcagactcttttcgtagtattcctgagtaacgtccagcgttacgtatttcaccgctcccagtttataggcattttcttcgtttgttttcagttgttcttcgctgaaaccacccgtattggcacaagctgcatatacttcgtaacctttttctttggcgaggtacatgacggtgaacgatgtgtccagtccgccgctgaatgccaccactacttttttcttcttttcttccatagtgtgtatatattaaatgttatttctttcttgttctttttttatgttccgcgggtctgtcggatcgtacagcatggctgtgcagatgcagaacttacggtttttagccaccagtatatcgtggttggtgcagccttcgcatcctttccagaaagcctcgtcgtctgtcagttcattgaaagtgacggggacatatcctagttcggtgttcattttcatcactgcggctccggatgtcagactgaaaatcttagctttcggccatcggagacgtgccagttggaaagatgcttgtttgatgcgctttgccaatcctaatccgcgaaaatcgggatgtacaatcagaccggaggttgctacgtattgcttgtttccccatgattcgatataggtgaaacctgcgaatgtgtcgccacagagcgcgattattgctttgccctctttcattttagtcgctacgtattcgtgtgtgcgctctgcgattccggttcctcgtacggcagcagcatttctgatagtttccaaaatagtgtcaacgtaaacctcatgtgaggcgtcggctaccataacatctatttgttgagtgtccat

SEQ ID NO: 500 - DNA, 7403 bp, unidentified
  source 1..7403: mol_type = unassigned DNA
ttattttatggcatcgagtgcgtttgagatatctgcaatcaaatccaccttgtcctcaagacctaagcttattctgataagctctgccggcactcctgcttccttaagctgctcatcattcatctgacgatgcgtgcttgttgccggatttaagcagcaggttctcgcatctgccacatgtgtctctattgcaccaagctttaatgccttcataaatgcagacgctgcctctctgccgccctttaagccaaatgatacgactccgcagcctccgtttggaagatacttctgtgctctctcatagtatttgtttgaaggaagccctgagtagtttacataggcaacctttggatgattttccaaaaattcagccactgcctgtccattttccatatgctttggcatacgcacatgaagtgactcaaggccaagattcagcataaatgcattctgtggtgactgcatagaaccaaaatcgcgcataagctgtgctgtacatttagtgatgaacgcaccttccttgccgaatttctctgcatatgttatgccatgatagctgtcatcaggtgtgcacagtcccggatatttatctgcatgtgccatccagtcgaatttgccgctgtctacgattgctccgccgagtgtggctccgtgtccgtccatgtactttgtggtagagtgtgtgacaatatctgcgccccactcaattggtctgcagtttacaggtgtagggaaggtattgtccactataagcggtactccgtgctcgtgtgccacctttgcaaaaagctctatatcaagcaccgtaagcgcaggattggcaatagtctcaccaaacataagctttgtgttcggtctgaatgctgcattcagttcctcctctgtagcatcaggagatacgaatgtagctgtaatacccatctttgccatagttaccgcgatgaggttgaaggtgcctccatagatggatgatgatgccacgatatggtctccgcactcacatatgttgaacatggcatagaaattggctgcctgtcccgatgatgtgagcatggcagcagtgccaccctccatagctgcgatttttcttgctaccgtgtcacaggtcggattctgcagtctgctgtagaaatagccctctgcctcaaggtcaaaaagctttcccatgtcctcgcttgtgtcatatttgaatgtagttgactgaataatcggaatctgtctcggctctccgtttccggctgcatagcctgcctgtacacactttgtacctatactgtattctttcattgtgcttctcctttattatgttaatgtttcggttggatatagtatattacatttggcgcgttttgacaaattcagattatataacttttgtcaccataaattcttatgctttataacatattgtatctaccagtgcttcatagctgctgtcatcagcttgcagtatctctctgacattgtgctgctctaatgctgctgtcgttttttcacctatcgagtatgctgtttccacgtatgtattctccggcagcatatgaaaaaatctttccacatttgatgcgcttgtaaaaacagcttcacttaccatgtttccaatgctttcaggaatactctcatatgcctgctcatttacatatgcatcaattttttctaattcacatatttctttaagccctgcctcaaggtcaggtgaagcctcctttgccgagaaaatgcagactttgatttcatcattatcgcccatatacgaactcaattctcctgcaagtccttttccggtctgttctgccggaataatatctgcctttatatgatgctttgcaagctctttttctgtagcttttcccactactgcaaaccttgcacttgctatcagcctgatgtctgcccctgccagctccagattatagaaaaatgatcttacaccatttttgcttgtaaaaacaatccagtctgccgatcttaccttatcggcaaattcaggaattataactggtttaattatgcctgtcttaaccggtgtgacatctgctccaagctgctgtaattttgctatcaattcgtttgttttgatatatggtactgtgatttttcttccaaacagcggtcttttttcaaagaaatcaagcctgtcattcagtgaaaccacatctcccacaacgattatagccggtgatgtcagctttgcttcctgaatcttttctccgatatccgcaagcgttcctatgcatttgcgttgcgcggcaagtgtaccgttcgatatcactgctgccggagtatccgctcttcgtcctgctttcataagccctgctgcaatgctttttacatgcgcaagtcccatcaaaaatacgcaggtgattgtctcatctgtaagaagggaatagtctatatctgcctcctcatcctttctgctgtgcgcagtgatgacctgaaagccttttgctatgcctctgtgtgtgataggtattcctgcagccgcaagcgctgcaaccgatgaactgacacccggtaccacttctacctccacatttctatctaccaggtagagagcttcctctccgcctcttccaaagacatacggatctccgccctttaaccggactacaagctcatgatattttgatttctcgtacaaaagctcgtttatggcatcctgcttcatgacatgcttgtgattttccttgcccacataaataagctcacagcctgcctttgccattgaaagaaactctggtgatgacagcctgtcatacaccagacaatccgcctgttttatatatttttctccttttaaagtgagcaggcccgtatctcccggtcctgctccaactaatactacttttcctgtgttttctctcatgattttcctaattatttttctactgaattattatgattaaaaattatgacttgatatttttttagtcgatttctaatttataccgaatatcatgcacggcacgctccacaatattgtttctgtctgatgtaatatcccatacctgctctgtccttgcaagcttttttccatcctctgagccaaacatcgcaagaagctttagcctgttatttttgttgctgtcattaccgcggtctttttcacttacaatatcacagtatgcagccacaggcatatgacagtttccaccgattcgctttaaaaattctctctcaatgcctgcgcacagattggttttctcatctgacaaagcatcaagctttgccatcagcttagcattgtcagcacgtagctcaagcgccagtgtgccctgtgccggagccggaatcatatcatcctccgaaaagtactgtgtgatctcagaatctcttccgatacgctttattcccgccgctgcaagtacgattccatccagcctgtattcgttatacttattctgtttttcgttagctatctcattgttatttacagtattatcggcaatctcttcatatataatttcaccatcatatagcttacgaagcctcgtatcgatattcccgcgtatgccaaccaccttaaggtcagggcgcagctttaaaagctgatactttctgcgcttgcttccggttcctatcacggcaccatgaggaagctcatccagtgaagcggcattttttagcaccaaaacatcccttggatcttcacgcttccatgcctttgcaaatgtaagccctgctgccggttcatcaggcatatccttcatggaatggactgccatatgaatctttcccgataaaagctcgtcctctatctcctttacgaagataccctttgagccaatcttatcgagtgcctttttctgctctaaatcgcctgttgtctttatgataacagccttaaaatcatcatccggatatgctctttttaacttatctatcacgtaatcagtctgaacaagagcaagctttgagcctctcgttcctattaaatacctcattttactctcctacggatcatgccattttccatttatcatttataaatgaacaacaacttaaaatctgtaataccatactttaaactatatttccggaatccttccattatcaatagctgcacacaagatttctttaaacacacgctttctctcggcttgagtgtcatattgcgctattactttttcgcggatctgtcccatgtattcgttcagctcaccaagaaacggagtaagaatctcctgctctttgcctttcagatactgagtcagcacagggctgtttcctccgctcgaaaatgccgcaacaagattcttttcctttatgtatgacggaaaaataaagctgcaatcagccttttgatcgaccgcatttaccatgatgtccttagctttgcaatactctgcaatctcatgatttaaagcattatcatcagtggcagcgataaccatttccatgccatcacagtcttttcgttcaaaccttctttctatgaacgtaattctatctgctgcatccgaatccgtcttattgttttctatatttgccgtatatgagcccgttttatcctcgcttgctatatcatcaattgtaagctttctcagctcatcacatatattctctgccacaaccgtgaccttcgcgccaaaatccagcattacaatcaccttgcggtatgccacatttccaccgccgacgatcagacactctctttccgtcatatccacaaacatcggaaaatacgccatttttatctccctgtaataccatatccatactttatttcatatatatttcatgccttattttatactttattatacgctttatgctttattttttgccttatgcttcacactgtatccattgagcattccttcaaaaacaggacgaagcttggcagaaaacactgctgccgatacgcataatataaagtccggtgcaacagttatcagacagtaatctactattacgatgccccagctgacaggtgttgccgcatagaaattcttcatgcagtaaaagtatattgctccaactgtataatatgccaccagtccgaccgttgccggaagaatgagtgtaaacgcattggtctttttaagcttttccgtgatggctccgattaaaaatgcggcaagcacaaagcctaagaggaacccaaagcccggtcttaaaatgtatgtaggaccaccgcctgccgcaaatacaggcactcccaccagtccgatgcacaaatatactattacgctaagcgatgccagctttgccccgagcagaaatcccgccatcagcacaaaaaaccactgtaatgtaaaatgcatggtgtacataggaagcggaatatcaatcttgataaatgctccaactgctataagtgctgcaaaaagtgcacatgttgtaagttcctttgtttttaatttcatttcacacgctctttcgttttattaaatatacatgctataataacatctttctctaaaaaagaaaagccatcttcgatgaagctgacttttctttgcagctttcgctgcgactcaaaacattaacatatgatttagaagtaatattcatcagaatatattcgtaaatcctctttcgtgacctgtccaccctcgatatgaaacgagttgattacaggattttctgccataagcgacattatcatgtagctcgcatttggatcatatgcaagctttatatcctcatccgatggccttgaagggctagacgggtgtgaatgccagttgccaagcggcttaaggccgtttgctctcatgtcctttatggctgccagctgctcctttggatccattgtgaaatggtcctcggcatggtctgtattcgtcaggtaatatacctttgtgatgagacgaccgttttcgtcctcactgcctgctatcagaccgcacgcctcctccggcagatgcgctttagcatattttgctatttcatccagaaacggatatttcattcttatgatactcatatcgttcctttccttactgtctttttattcctgtgtacgaggtgcatcaaatctgcccgctgtctcctcgcagacctcctgctcgtagtcgattggctcgagaatggtcggatggtcgccacagactgcacagttgtgtgtatcctttggaagcttaatcttgtggaactccatggtaagtgcatcatatgtaagcagatatcctgtgagcagctctccaacaccgattaaatacttgatagcctccatagcctgaagcgaaccgattactccgcccatagctccgataacgcctgcctgcttacatgtaggcactgcatcctttggtggcggattcttgaatacacatctgtagcaaggtccctctcccggcacatatgtcatgagctgacccttgaaacggatgattcctgcatgtgaaaacggctttttctcaagcacacatgcatcgttgattaagaactttgccgggaaattgtcagttccatctatgatgaaatcataatccctgataagctctctgatgtttgacgcatctacaaacatacggtatgtattgacctgaacatccgggttcatggcgttcattgtctcttttgctgactttaccttggcttttcccacatcggctgttccgtggataatctgtctctgcaggttggataaatctacctcatccgcatccacaataccgattgtgccaactcctgctgctgcaagatacatggctgccggagctccgagtccgccggcaccgataataagcaccttgccctttaataatttcttctgacctttaacgcccacctcattaaggataatgtggcgtgaatagcgctcgatctgctcatccgtcattgccattagcatccacctcccatgaagtaaaggaactctacattgtcgccatccttaagcactgtctttggcttatcctctgtggcaacaaattcctcatttattgaaactgttacatactcaggcatatctacattctcaagctcgataagctccggtaatgtaagtccatccttatattctttcttctctcctgctactgtgatagtcattttatttcctcctgtgtcacagattgtggtatctgtaagtgttattatcctgtatcagactgctttatataataatctaaaaactataataattcttcaacccatgctttcaaatcggcaggcttttgtgcgccgacctttctgtctaagacctctgcgtcttttacgaaaagcagtgtcgggtttgcagtcacctcatactcatcagcgagctctccgtcaaagtttgtgttgaccttgtatacgtgaagcttatcctcataatcatcctcgatatctccgagaaccggtgccagcttcttgcaggccacacatgaatccgagtaaaaatcaacaattaccggaagcttgctttttaatactttttcatcgaaatccgcctttgaaattcttgctgccat

SEQ ID NO: 501 - DNA, 5604 bp, unidentified
  source 1..5604: mol_type = unassigned DNA
ttatttcagcagatctgcggagataaccattctctgaacttcggaagtaccctcgtagatctcggtgatctttgcatcacgcatcatacgttcaacttcgtactctctgatgtaaccgtaaccaccgtgcagctgaacagccttggtagtaacttccatagcaacctcagcagcatacagcttagccatagcagcttctacagagtaagagatcttaggattggtcttgtactcgtccttcttgcgtgcagccttgtataccagcatcttggcagcttccaccttggtagccatatcagccagctggaactgtgtattctggaatccggaaatggactttccgaactgctttctttccttggtgtaagcaacggttctctccagagcgccttctgcaatacccagagcctgggaagcgataccgatacgtccgccgtccagagtgtgcattgcgatcttgaatccctgtccctgcttaccaagcatattctccttggggatacggcagtcggtgaagatcagctcgtaagtggaagaacccttgatacccatctttttctctttggtaccgaaggtaaatccgggagtacctttctcaacgataaaggaagaaatctccttcatctttctgcctctcttctctacgataccggtaactgcgataacaatatatacatcagcttctttaccgttggtgatgaagcacttggatccgttgatgacccactcgtcaccatctaatacagccttagtctgctgtccctgagcatcggtacctgcaccgggctcggtcagaccgaaagcaccgatcttacggccgcttgccagatcgggaacatatttcttcttctgatcctcagtaccgaaggtcatgataggatcgatacacagagaggtatgtgcggatacgataacgccggtggttgcacaaaccttggaaagctcctcaacacacatagcgtaggtcagggtatcacagccctgtccgccgtactccttgggaacgggaattcccatgaagccgtacttagccatcttctcaacggtctctctggggaaggtttcggtctcgtcaacttcctgcgcaagaggttttacttcgttctcggcgaactctttgaacagctgtctcgccatctcatgctctttggataatgtaaaatccatgatgttaatcctccattgttatttatacttggttgtaattatgaacttagactgtccagagccgtatccggctccgaacagttattttaccttttgcctactgtgcatccacaggagtcttggtgcggtctgcattgtatacatagaagcccttgccggtcttcacaccaaggttaccgccgcgaaccatcttacggatcagagggcatgcgcgatacttgctgtcgccggtctcgttgtacagaacatccatgatggcaaggcagatatccagtcctacgaaatcgcccagttccaggggtcccatgggatgattagcgcccagcttcatagctgcgtcgatacctgcgatatcggatacaccttccatcttgatgaaagctgcttcattgatcatagggatcaggatacggttaacaacaaagcctgctgcctcgtttacctgaacaggggtcttgccgatctcttccgatatcttcttgatggtgtctacggtctctgcgggagtattcacacctgcaattacctcaaccagcttcatacggtctgcgggattgaagaagtgcataccgatcagaggacgggtcagtccgttgccgatctcggtaatggaaaggctggaagtgttggaagcaaatacacactcgggcttgcagatcttgtccagctcaccgaaggtggtcttcttaacttccatgttctcaaatgcagcttctacgatcagatcgcagtctgcacacagatcttccttcaggcccggagtgatcttagctacgatagcgtcaacagcctcctgagtcatctttcctttttctaccagtcttgcatagccttttacgatcttggccttgccgccgtcagcccactcctgcttgatatcgcaaagagctacttcatatccgtctacctgggcaaatgcctttgcaatgccctgtcccatagtacctgcaccgataatacctactttcatggtaaatcctcctgattttatacttttatattcgtaatgattagcagttcttaaaaggctcttttaccttctccttgttcttgtcaaggaagaaagccataccatacttctgatcttctgtctcgaagcagtcaccgaacagcttctcttcgatcactactgcctgatccatatctgcatccaggccttcgttaatagccttcttgcagttgcggactgcgatgggagcattctttgcaatggtggctgccatcttctgtgctgctgccagcattacttcctgtgcactctttaccacattgccgtctgcatctacttctgcgctgtaaacttcgtttaccagaccgattctgtaagcgtctgctgccttgatattgcgtgcggtgtagatcatctgttttgccatgcctgcacctaccagacgagccagtctctgggttccgccgaagccgggagtgattcccagtcctacctcgggctgtccgaagactgcattgtcggaacagattctgatatcacagctcatggaaatctcacatccgccgcccagagcaaagccgttgacagctgcgatcacgggaatggggaaggtctcgatcttgcggaatacatcgttacccttcttaccgaatgcctcgccctctgccttggtcaggctgctcatctctccgatatctgcacctgccacgaaggacttactgcctgcaccggtgatcaccagacaacgaaccgttgccagatctactgcatccaatgtagcgttcagttcatccagtacctgagaattcagagcgttcagtgccttttcacggttaatggtgatggctgccacattgccattctgctcatacaaaatgtaatccatgtttttacctcatttcacatttctattcgtgttttcaaaaccacactaaggcgatagagattctaccgccccagcgaatatttataaaattaatcctcgatcttaacgatggtggagcagcccatgccaccgccgatgcacagagtagccagaccggtcttggcacctcttgcctgcatctcatgcagcagagttaccagaatacggcatccggaagctcctacgggatggcccagagcgatagcaccgccgttggggttcagctgcttatctacatcgatgcccagttccttaccaactgctacggactgtgctgcgaatgcttcgttagcctcgatgatatcgaagtcttcgatcttcataccggtcttagccattaccttcttggtagaagctacagggccgatacccataacctcgggacgaacaccagccagagcgcctgctacgaaagtagccataggcttaacgcccagctccttagccttctcttcgctcataacaacgatagctgctgcaccgtcgttgataccggaagcgttacctgcggtaacgaatccaccgggattgatggcacgaagcttagccagaccttcgatggtagaaccatgacgagggccttcatcggtatcgaatacgatggtctcttttttcttcttaacttctacgggaacgatctctgccttgaaggcaccgttcttctgagcttcttcagcctttaactggctctttaatgcgaactcatccagttcttcacgggtaagtccccactcttcgcagatgttgtctgcggtcttgatcatatgataatcattgaaagcatcccaaagtgcatctttgatcatggtatcaaccatggttgcgttacccatacgatatccgtaacgtccctgaggaattgcgtaaggagccatggacatgttctccataccacctgctactacgatatctgcatcaccggccatgatcatctgtgctgcctggttcacacagttcaggccagaaccacataccacgttcatggtaactgcgggaacttcgatgggaagtccggctttgatagctgcctgacgtgctacgttctgtccctggccagcctggattacacatcccatatatacctggtcaactgcttcgggagcaacgcctgctctcttcagagcctccttgataacgattgcgcccagctccggtgcaggagttgtgcttaaggttccgcccatggtaccgattgcggtacggcaagcgcctgctaatacaactttctttgccatttgtttgtcctccactttttgttttcgtttggtttgctttctgaaatgtagattgttatttttttatcatttcactgtccccattttaacatagcgaaatctgttttgcaatgcttttgtcaaaaaaataacaaaataacaaatgaaatttttagaaatcagaattcccggatttttgtagtgcggatccactctcttgttccctcgactttctgcacttcctgcgtgtgttttgccagaaaacaggtcagcggatagacatcgatccagatctcgttgtcactctctttctgttcttcatcaaagaccagttccaatccccagtgcagatgggttacttctatattatttacattttctgtggtactgtaaccggtatgtcccatataaccgatcacatcccccgccgtcaccacgctgccttcttccagtccttccgcataggggtagttctgccgcagatgtgcatagtaatagtagcgcttattatcaaagctgcggataccaatgcgccagccgccgtactggttccagtccagggcttccacagtgccggactcgacagcaatgataggtacaccgacgagccccatcatgtcatggcccagatgccttcgtttatatccgtagcttcttcccgccccgaaatcatcataatgagtataatcaaatcctctcgcaatggggcaataaccttttaatccgtattttttctgccaggtgctctgtccgtcttctccgatcacctctgcctcgtattctcccaccagtcctcccagtgccgcgctgtaagcttccagataatacggatagtatttcatatctttcgtgagagtttctatctctgcctctccctcagccagtttctccgccgtctcgttcaggatcttcagcgcctttttgtcaaattcccctccggttctggctgcggtatatgcaagcagcgggatccactccacatgatgttccgtgtcaaacgtatccacatcccagtcatatgcctggcagagcgcttcataggatacggtaaagtccacccatttgatataatcctttcccgcagccgaggttgcggtgaccaccgcctgttccatgctttctgtccgtcctgtctcccggagcagaaatgctcccatcattataaatagaagcatcacctctgcccggatccatgcccgcattctcttttctctgtccattccctgtcctgctctcagttcctccttacaggttatgtttctgatttttccggtattcagacaattcgaaaatctccggggcatatcatttcccatacaatcataaccaccggctgagccggtggtttg

SEQ ID NO: 502 - DNA, 10887 bp, unidentified
  source 1..10887: mol_type = unassigned DNA
  misc_difference 2390: note = a, c, g, or t
  misc_difference 2391: note = a, c, g, or t
  misc_difference 2392: note = a, c, g, or t
  misc_difference 2393: note = a, c, g, or t
  misc_difference 2394: note = a, c, g, or t
  misc_difference 2395: note = a, c, g, or t
  misc_difference 2396: note = a, c, g, or t
  misc_difference 2397: note = a, c, g, or t
  misc_difference 2398: note = a, c, g, or t
  misc_difference 2399: note = a, c, g, or t
  misc_difference 7329: note = a, c, g, or t
  misc_difference 7330: note = a, c, g, or t
  misc_difference 7331: note = a, c, g, or t
  misc_difference 7332: note = a, c, g, or t
  misc_difference 7333: note = a, c, g, or t
  misc_difference 7334: note = a, c, g, or t
  misc_difference 7335: note = a, c, g, or t
  misc_difference 7336: note = a, c, g, or t
  misc_difference 7337: note = a, c, g, or t
  misc_difference 7338: note = a, c, g, or t
  misc_difference 8311: note = a, c, g, or t
  misc_difference 8312: note = a, c, g, or t
  misc_difference 8313: note = a, c, g, or t
  misc_difference 8314: note = a, c, g, or t
  misc_difference 8315: note = a, c, g, or t
  misc_difference 8316: note = a, c, g, or t
  misc_difference 8317: note = a, c, g, or t
  misc_difference 8318: note = a, c, g, or t
  misc_difference 8319: note = a, c, g, or t
  misc_difference 8320: note = a, c, g, or t
ttcaaacaaagttatttggaaaagacacataagttctatgaaaagtatggcggtatcaaggagattaagattgcaaaccgcgaagagtttttcgagcgtgattttgagaaacagaatgagatctatacttatgttatcaaacagaactctttcttaagtgcactgccaaagccgatcattgaggcgcttgccatcgcgggtctgatgggaatgattattgtcaagatcgtgatgggaaacacgaacaatgcacactttatcgcagtgcttggtgtattcgcagtggcggcattcaagctgctgccttccgtcaataaaatttcttcctactatgcgtccattatccacaatggtgtcgtgatcgacaagatccgtgatgagtaccgtgatatagaggcgcaccgcgaggcacgtgccgaggcggaagcaagaaaagcagaggagatcccggtaaccctggagaaggaaatccgtgtggaacatatggagtttacttatccgaatgtggaggagccggtgctttccgatgtgaatgttacaatcccgaagaatgcgtcggtggcgttcattggaccgtccggagcaggaaagaccacgtttgtcgatctgatccttggtgttctgactccgcagaagggtgtcatcatgaccgatggtgtggatatccagaagggaatgcgcagctggcatgacaagatcggttatatcccgcagaccatctatatgcttgatgatacaatccgcaataacattgcatttggtgcgaatgaggacattgatgatgagcggatctgggaggcattaaagcaggcacagcttgacgatctggtacgtgagatggaggaaggtctggataccgtcatcggtgaggcgggtgtgcgcctttccggtggacagagacagagaatcggtatcgcgcgtgcactttaccgcagaccggaagttctggtgcttgacgaggcaacttctgcgcttgacaatgagacagaggcagctgttatggaagcaatcgacagcctgcagggcaagatgacgatgctgattattgcgcaccggctgtccacgatccgtaactgcaatattgtatataaggtagaaaatggtagcgtgacagtggatacacagcgccacaaccagtagaccggaggggatggaacgaacatgataatcatagaaccatgtgcaggactgggaaaccgcctgctggcactgacttcagcgtatgaattggcggagaagctgggaagggagctgcttgtcatctggaagagcgagataggctgccagatccggtcagaggagctgttcctgtttgatggggttaaggtgatcaatatcagtgagagtggatggaagcaggattttgccgggacactgcgcggcaatgccgtcaagaaaaaataccgtggcagcgcagaccggtttgtggagtgtgatgaggtagaggtctggaaaaaagagggtggatttgcgcgtgtggaacaggagattgcgaaaacgtcccggatctacatcaaatcctacacaaatctgtgcgagatcacgccggacagcttcaggttcttaacgccttccgctgcggtggaagcgcgtggcagagaagtgtttgcccggatcacaaaggagcggacggtgggggtacacatccgccgtaccgaccacacagatgcgatcgcaaacagcccgctggagttgtttaccgaccggatgaagcgcgagatagaggaaaaggatgccaatttttatgtgacgacggacgatgccagggtcatggacgagttaaagcaggcattttccgcagagcgtctggtaatctacgagaataaggtgcttgaccgtgattccagggagggcatacaggatgccctggtggatatgctgtgtctgtcaaagtgtagcaggatcataggaagctaccggagtacgttcagcctgatcccttcgatcatgggaaatattccgctagagatgatgataaaggattgagaaaatgaaaacgtgtacgatattaggaacagagattgccgtcacgacgatggaagagacggttcgctatatagaggaacacatggaggaactgcgcgggaaatatatctgcgtctcgaatgtgcacacgacggtaacggcatatgaggatgaaagctatcgcaaagtgcagaatggtgccgcatttgccctgccggatggaaaaccgttgtctctttattcaaaaaagcacggattcccggaggcggaacgtgtgaccggaccggatctgatgggagaactgttcgcgagagacaatgggctgactcactatttttacggggggagtgaggcgacgatcaggacactgcgtgagaagcttcccaaagaatatccacatcttaagattgcaggaatggtgtcgnnnnnnnnnngcgccgatgtggatgcagaagttgagcttagagtggttataccgtctgatgcaggatcccaagcgcctgttcaaacgctattttgtgacaaatttcaagttcctgcggctgacacttggaagagggaagaagagcagaggagagaaaaagtcatgacagaggcgaaggcaaagtaccaatacatggatgtggcacgggggctggcattgctgttggtcatgatctcacatgcgcacggactcagcagttttctgatcttttactatatccagatctttttcatcatctcgggctatatttataagcctgggcggagttacagggacaatatccggcgcaaggcaaaacgccttcttgtgccttattttggttacagtgcactgctgtggtgtgcgtatgccctgatccgccgggatatgggagagatgaaacagtcgctgtttggcattttttattcgaggttctgcctgtacaaaaatgcaacgcacacagagaatgtctatctgctggatattgccaacggagcgatgtggtatctgactgcattttttgtgacctgtctgctgttttatctgatcgcagacaagtgtcttgcaagtgcaaagacgatggcggtcacatcggtcgtgcttgttgccgtgacgatggcattaaacgaactgcccattcttcttccgtggagtatggatattgtgccggttgcggcactgctcatgctggtgggagcgtggatgcgcagatatgagttttttgagagaaaatggaatccgctgtggatttttgtgacactggcagtctatgtgggaacggttgtattcaacggcagattaaatatgtccatccgcgagtatggacggtttgacagtttcagcgtacctttttttcttgtaatctcgctgaccggatcaaccttatgtatctggttttgtaaatggatcgggcacacgaaggtagggagcggtctggcatacattggcaatcatacgatcgagttgatgtgcctgcatatgttcggtcttgagatgtttgaggtaatcgcgtcgcatgtcatcccggtacaggaactgacaggagtggcggagtggatttatgtagcagtgcgcgttggcgcagcggtctgcggctccctgctgtttggtgtgggtgtgtcgtgggtcaaaaagaagagaggaaggtagcatggagaaaaaggaaagagattcaggtctggagcttttgcgcatcatcggattgttcctgatcttctggatgcatggggcgagcagttatgtaaacaattcgctgagtgcctggctgtgtattgtgattgagacaatcggaaatgtcggggttccggtctttatcctgatttcaggatatttcgggatccggttcaaacctaaaaaactcctgcagctggatctgatgctgatcttttactgctggaccggtcttgcgctgcgctttgcgtggggagatgccgcagagtatggaatggaacagattctctcctatgtacttccggtcattggtcgcaattcctggtattttacctgctactttgcactggcgattttaagtccgttcttaaacgaatttgtggaaaagctggagaaggagaccttccgcaggatgcttgtgctgatgttagtgatcttttcgggtatcacgacatttctctttttcgatatcacacaggatggcggaaagggaatcgtcaatatgaccctgttgtacctgatcgggcggtatatccgcctgtatcaggatgaaaaggtgtacagccggaaaaaactcatcacggcgtatgttgccatcatggcagtctgtattgcattaaacggggcactgtatgtggtgagtggtacggtgcagaatcggttttcgcgtgacaatacgctctttacgatcgcagcttcggtgtgcctgttcctgctttttaaggatctgcattttcgcagtaaggtgatcaaccgtctggcaacgcatgttccggcggtctttacgatggagtggacgctccgcggagtggtcacggcgtacatgttcgactatctggcgtggagggagagcaactggcatgagctgatcctctttggggtatgcttcctgctgcttgccatgggaaccgtgatcgatgaactgcgtgtactcctgctcgggcgggcagaggaaaagcttgcagatctggaataccggggacttaccaccgtctgcggtactctgaagcggtgcatccttcgatttttttaaaaactttattaaagtaactggcgtcatcaatgccacagtgctgtgcgatggtttcaatggaatcgttgctgtaacggagcagctctttggcattggtgattttttttgtcagcagatactggatgatcgttgttccgaattcttttttgaactccctggaaagatagtacttgctgatatagaactggtcggcaagctgatcgagggagatattttcggtatagtgttcgttgagatagcgaagaatatccttaagcttgacggacagcggggagtcatcggcggactcgcgtggcgcatctgtgcataaggtggtgaggatggatacgatctgtgcggcagtcagaaggtcggcatcgtccgtcttttcttcatgcagcgtaattacgttctggattgtggaggtgagttctgcgaggtggctgcttttaaaatgccagtcgtgctgctcgcggaaacagctgtagtatgcggctgcgtttggaccgtaaaaatggatccacagaagctcccaggggtccgcctcactgctgatgtgggtgtattcgccactgcaatctaaaaaaaagcagtcgccggcacgggcagcgacgcgggtcagaggatgtttggcgtcctgggggctgtcggatgcaggaaaaaggtgggagcctgcggtatcccggtaggagacactgccgctgccggagagtacgatcagaaagaggtaggaggagagaccgctccgccggcttaagtgcggccgcagactttttaagtaaccggcctcctggatgtagagaaagttgcttttgataaaagaagaaggggtattgataacacgtctggtgttggtgacctcggaggtcttatatttttcaaaaaaagagtcccgcatctgtattctcctaatttttgcgtatagcaatataatactatttttgggcaagatattcaatggaaaaaaaacgtggattagattattcttagtaacggctttcaacgcgcatattagcaaaataatcatagaacaaagaaaaaggagaatctagatgagtaaaaaagcattgatcacaggtgtgaccggacaggacggaagctaccttgcagagtttttgttagagaaggggtatgaggtacatggtatggtacgccgttcttccacagagaagagagagcgtatcgaccatttggagagcaacccgaacttccatgtacactacggcgatctgtccgattccatgagcatcatgcgcttagtgggcatgattaagccggatgagatctacaacctggcagcacagagccatgtaggtgtcagctttgatgtgccggaatacacagcagatgtagttgcaactggtgtgctccgcgttttagaggcagtccgtctctgtggtctggagaagacctgccgtatctatcaggcatccacatccgagttatacggaaaggtagaggaagttccgcagcgcgagacgacaccgttccacccgtacagcccgtatgcagtggcaaagcagtatggctactggatcgtaaaggagtaccgcgaagcatacaacatgttctgctgcagcggtatcttgttcaatcatgagtccgagcgccgcggtgagacatttgttaccagaaagatttctctggctgcagcaagaatcgcgcagggcaagcaggacaagctgtatcttggcaatctgtcttccttacgtgactggggttatgcaaaggattatgtagagtgcatgtggctgatcttacagcatgagaagccggaggatttcgtgatcgcaaccggtgtacagcattccgtaagagaattctgtgagtatgcattccgtgaggctggcattgaactggagttccagggagagggcatggatgaggtcggtatcgacaaggcaaccggcaaggtagtcattgaggtatccaaggagttctaccgcccgacggacgttgtcaacctgtggggagatccaaccaaggcaaagaccgagcttggctggaatccgaccaagacaacattcgaggagctggtaaagatcatggtaaagcatgacatggagcttgtggcaaaagaaaactaaaacaaatgtatgacgatacagtatttggcgtgccatggcaggattggggcacgccaagttgtggtaaaaaggagagaaagattatgatggaaaaagatgcaaaaatatacgtggcagggcacagaggaatggttggctcggcgatcgtgcgccagcttgagaaggaaggctatcacaacatcattacccggacacacaaggagttgaacctctgccgccaggatgatgtggaggaattttttgcaaaagagaagccggagtatgtcttccttgcagcggcaaaggttggcggtatcatggcgaacagcgaagctcttgccgattttatgtatgagaatatgacactggagatgaacgtgatccatgaggcatggaaaaatggctgcaagaagctgatgtttctcggatcttcctgcatttacccgcgtatggccccgcagccgatgaaggagagctgtcttctgaccggagaactggagaagaccaacgaggcatatgcactggcaaagatcagcggtttaaagtattgtgagtttttgaataagcagtacggcaccgattatatttctgttatgccgaccaacctctacggaccgaacgataactaccatccggagcacagccatgtccannnnnnnnnncacacagtcatgtgcttccggcgctgatccgccgtttccatgaggcgaaggtggcaggagccaaagaagtaacctgctggggaactggaacgccgctgcgtgagtttttgtatgtggatgatcttgcagatgcttgtgtattcctgatgaacaactacagtggtgatgagacggtcaaccttggaaccggcaaagaacttacaatcaaagaactcacagagcttgttgcaaaagtgatcggttataccggagagatcaagtgggatccgagcaagccggacggaacaccgagaaagcttctcgatgtcagcaagttagagagcctcggctggaaatacaagacggagcttgaggatggaatccgccttgcatacgatgatttcctgaataatccaatgagagccgagcgctagaggggagaaccatatgtatatagtattgttatcgggcggctccggaaagcgtctgtggccattgtccaacgatttatgttccaaacagtatatcaagctgatgaatcatgataatcaaaaggagacggcagaaaagtgttcgatgctgcagcgtgtgtttggccagcttaagaccgcgggactttccgacaacacgatcgtctgcgcgagcagtgcacaggtggagctgattgagagccagcttgacggggctgcagaggtggcagttgagccgatgcgccgtgacactttcccggctgttatgttatcctgtgcttatcttttgtctaaaaagggagcgaaggaggatgacgtcgttgcatttcttccggtcgacccgtacacgacaggagagttttttgaccggattaagcgtctgggagagtatattgcatccacagagaatacgattggactgctcggcggtgtaccgacgtatccatcaaccaaatacggctatatcgtgccggagaagagtgggcaggagctgcttaaggtcgaaggcttccgtgagaagccgnnnnnnnnnncgggatgaggcaactgcggagaaactggtcgcagacggggcgctctggaactgtggtgtgttttgtttccagttatccatggcagccggctggcttacaaagtatggtgttggcacggattatgaccagatggtcactgattatgagaagcttccgaagaaaagttttgactacgaggtgttagagcactgggagcgcattgttgcgattaaatatgcagatctgtggaaggatctgggtacatggaatacactgaccgaggaaatgccggagaacagcatcggtgatgtgacctgggatgatacctgcgagaacagccatgccatcaatgtgctcggcgtgccgatggttgtgatgggagcgaaaaatatggtgatcgcagcatcccatgatggtattctggtggcggacaagcatcagagctcctatatcaaggattgtctgacgaacattgcggacacttcaaagtatgaggagcgccgctggggtacgatcaagacgatcgacagtgatgaggatgacggcattaagagtgtgacaaggcgcatcaaggttgttgcaggcaagacgacaccggagcacaggcatctgtcccacacagagacaatcacggttctctccggaatgggaaaattgatcttagaaggtgtggaagtagatctgatggcaggagcgacagtcagcattgcagccggcaaacggcatgcaatcaaggctatgggttcggatctgcgctgtattgaggtgtcgatcggtacggacgagaagagtaccttggacgatgagattataggataaggacggcagaacgatgaatatattactgacatccgcgggaagacgcggttatcttgtcgaatacttcaagaaagcactagaggggatcggggaagtgcatgtgggaaacagcacaccggtttccccgagcttttactatgcagatcatgcagttgtgacccctctgatttacgatgaggcatatattccgtttttgctggattactgcaaaaaaaaccacattgatgcggtactgtccttgtttgacgtggatctgtatatgctggcacagcacagggaagagtttgcaaaagaaggcatcagggtaattgtgtccgcaccggaggtgatccgtatctgcaacgataaatgggagacataccagttctgcaggaaaaacggttttctgacaccgaagacctggctgcatctttcggatgtgaaagctgcactggaggcgggggagatttcctatccggtcatcatcaagccgcgctggggcatgggatcgatcgccatctatcaggcagagaatgcagaggaactcgaggtattgaccaaaaaggtcacgcgggagattttccgctcctatctccggtatgaatcagcgttcgatgaggaggaatgtgtcctgttccaggagatgatccatggacaggagcacggactggatgtgatccacgatctggacggagcatggcagctgacggtcgtgcgtgagaagatcgccatgcgttcgggcgagacggactgtgcgagagtgctgtcggatgagaggattgcatcggtaggaactgctgtcggcaaggcgctgggacatatcggaaatctggatatggatgtgtttgtgaccaaagatgcggtctatgtacttgaactcaacgcgagatttggcgggggatatccgttttcccatctggcaggcgtcaatctgccgaaggcgattataaagtggctttcgggtgaggcacttacagatgaacttgtggtaaagaaaacaggtctttatgcacagaaggatatccgtatgatcgatatcacatcgtgtgtaaaagaagacggaaagtaaaagtatggaaaaagaaacaaaatatcaacagtcctatgtgacaccctgctatgagatcaatcttgagcagtttcacgaaaactgtgatgctgtgatgcagccgtttgaaaaagcatgggatggaaatgtggcatacggttactcggtaaagacaaaccatcacgaggcactgatgcgctatgccgcggatcatctgggatggtatattgagacggtttctgtgaatgaatacgagcaggccagacaactggtgcctgcggagcggatcatattcaatggaccgtgcaagcaggaacgtctgctcacagtctatgagcagggaggaatcctgaatctggataaccccacagaagtagaacagctgtgtgagacggtaagaaacggagctgttccatcagaacacacacaggtgggacttcggatcaattttgatctggaggcacagtgcccggatgagacaaccgctggtacagaggtcagtcgttttggcatctgctatgaaaatggtgatcttaagcgtgccatagaccagcttggggaggcgggtattgccattgacggcatccatctgcacaccagcacaaagaccagaagcacccgtgtttttgcggcattggcagggatggcggtgaagatccgggaggaatatggactgtccttaagttatgtggatatgggaggcggctattttggcggacagaaggtcaccggaaagccgacg

SEQ ID NO: 503 - DNA, 8087 bp, unidentified
  source 1..8087: mol_type = unassigned DNA
ttagtttttctcagccaattctgctttcagcatttctgtcaactgaggaacaatcttattcaaatcgcctaccaaaccatagtcagctacatcaaagattggagctgtctcatctttgttaatagcaacgataatgtcagattcttccatacctgcaacgtgctgaatagcaccggaaataccaattgcgaagtatacgttaggacgaacggttttaccggtctgtcctacctgacgctcaaccggaagccagccattctctacaacagcacgggaacaacttactgttccgccaagtacatctgccaaatcctgaagaagtttgaagttttcttcgcttccaacaccacgaccgccggataccaaaatcttagcatctgcgatatctactgtgtcagctacagacttcacaacatcaagaatctcaacatatttattgtccggagtgaatcccggattgtactcgattacttcagcttttgcacccttaattgggtcaatcttctgcataacaccggcacgaacggtagccatctgtggacggttgtatggacatgcaatcgtagcgattgtattaccaccaaacgcaggacgtgtcataagaagctgatttggaatggtctcctttgtcatgttatcggtgaaatcaccaatctcaagtactgtacagtcagcagtcagaccagttgctacacgtgccgatacacgaggacctaagtcacggccgattgctgttgcaccaaccaacataatttcaggtttgtactcattgattacagaagcaagtgcatgagcatatggctctgtacgatatacttcaagttctttgtcatccactacgattactttgtctgcaccatactcagccaaagaatctgcaaggtctttaacaccgtaaccaagcaaaacagcggtaacttctgcgttcaaatcttttgccagatcttttgctttaccaagcagctcgtaagcgattccgcttacttctccgtctacctgctgtgcaaagacatatacacctttatattcttctaaactcatttttttcaccacttttcctttataataattagattacatgtttctctttaaacttatctacaatatactgagcagcttctgttgggtcaagagtaacgacttcgccggcacctttacgaaccttatcggaagctctagcaatctttgttggagatcctttcaaaccaaggttagaatcatctacatccttaaggtctgcacgtccccaaacggtaatctctttgtcaaatgcgtccatgattccgcccggagtcatataacgtggctcattcaactcagaaagagcagtgatcaggcaaggcattttagcctttactacatggtagcggtcctcatactgacgctcaacgattacgctgtcaccttccactttgatattctgtgcataagagataaccggaatatccaagtgctcggaaatctgtggaccaacctgtgcagtatcaccatcgatagcctgacggcctgtgataatcaaatcgtaatcaatgttacgaagtgcaccggcaattgttgtagaagtagcccaagtatcagcaccaccgagtacacggtctgttacaaggataccattgtcagcgcccattgccattgcctcacgaagaacttcttctgcttttggaagtcccatggtaagaacagtaacttctgcacctgtttcttctttaattctcagtgctgcttccaaaccggctttatcatccgggttcatgatggtaagcatcgcacctctattcaatgtaccgtccgggttaaatacaacaccgcccttagtatccggcacctgtttaatacatactactattttcacgagagcacctcctatttcaataagctgccagagataaccatacgctgaacttctgaagttccttcgtagatttctgtgatttttgcatcacgcatcatacgctcaacgtcatattctctgatgtagccataaccaccgtgtaactgaactgcttttgttgttacttccatagcaacttctgctgcgtacaattttgccatagcagcttctacgctgtaaactttctgcgtagcttttgccattgctgcacgatacacaagcatcttagcagcttccacttttgttgccatatcagcaagctggaactgtgtattctggaactgtgcaatcgaacgaccgaactgttttctttcttttacataatcgattgttgcctgcaaagcaccttctgccagaccaagtgcctgagcagcgataccaatacgtccaccatccagtgtatgcatggcaattccgaaacctttgccctgtgcaccaagaagattttcttttggaatacggcagtcctcgaagattaactcgtatgtggatgaaccacggatacccatcttcttctcctttgtaccaaaagtaaatccaggagtatctttctcaacgatgaaagcagaaatttcttttacttttctaccacgtttttcgatgataccggttacagcaatgataatataaatatctgcttctttaccatttgtgatgaagcatttagaaccattgagtacccattcgtcaccatctaaaacagcctttgtctgctgtccctgtgcatctgtacctgcacccggctcagtcaaaccgaaagcacctaatttctcaccacttgcaagtggtacaagatatttctttttctgctcttctgtaccgtacatcataattgggtcagcaccaagagaagaatgagcggatacaataacgcttgttgtaccacaaactttagctaactcctcaacgcacattgtgtacatcaatgggtcacagccctgtccgccgtactctttaggaatcgcaattcccatgaaaccaagtttcatcattttgtcaacagtctcacgagggaatacttctgtttcatcggtttcctgcgcaagtggctttacttcgttctcagcaaaatctttgaacaactgtctcgccatttcatgctgtttgtctaatttaaaatccatgataacatgaactcctttctataatattatttggaataatcaaagaatccaacaccagttttacgtccgagtttgccggcacgtaccattttacgaagcaatggatgtggacggtatttcgggtcaccagtctctgcctgaagaacttccataatagcaaggcagatatcaagaccaaccaaatcaccaagtgcaagaggtcccattgggtggtttgcaccaagctgcatagcagcatcgataccctcagcagaagcaacaccatcagcaaggatgccaactgcttcgttaatcataggaatcaagatacggtttacaacaaaaccggcagcttcttttacttcaaccggtgttttaccaatttcttttgcgatagcaactactttatcgtttacttcatctgttgtgttctcgccgcggataacttcaacaagcttcataacaggagccgggttaaagaagtgcattccgataaccggatgagaaatgcctgcaccgatttctgtaatggacaaagaagaagtattcgtagcgaaaatgcagtcttctttctttacgatatcctgcagttctttgaatgtctgttttttaacatccataacttccaaagctgcctcaacaatcaaatcacaatcagtacaaatgtcttttacgccagttgtaatcttagctaagattgcatcaacatcttcctgtgttttctttccttttgtaaccagtctctgaagaccttttgcaatcttgtttttaccgtttgcagcaaactcttcattgatgtcacacaaatatacttcataaccttctgtctgcgcaaatgcctgcgcaattccggaacccattgttccagctccaataataccaactttcattgtatttacctccattgtatttgattcaaatcccagacgggatgtcgtcacgaattaacagtttttgaatggtaccacttttaattttttctctttatctttctctaagaagttacccattccggctttctggtcttctgtctcgaagcagtcaccgaacaatttctcttcgattacaattgcctcatccatatttacctgaagaccttcgttaattgcctttttgcagttgcggacagcaatcggtgcattcttagcaataccggatgccatcttctttgctgcatccatcagttcttcttgtggatatacagcatttacaagaccaatgcggtaagcttcgtctgctttaatatttcttgctgtataaatcatctgttttgccataccagggcttactaaacgagcaagtctctgtgtaccgccaaatccaggagtaataccaagacctgcttccggctggccaaatacggcattgtcagagcagatacggatatcacagctcatggaaatctcgcatccaccaccaagagcaaatccgtttactgcagcaattacaggaaccgggaatgtctctaacttacggaatacatcgtttccttttttaccaaaggcttcgccttctgcttttgtcaatgtgctcatctctccgatgtctgcacctgcaacaaaagatttctctccggcacctgtcaaaatcaggcagcggatttcattctggtcaactgcatccaaagtctgattcagttcatccaaaacagcactgtttaacgcattcaatgcttttgggcggttgatggtaataataccaactgcaccttctacttcatatgttacaaattccattgaaagtatcctccatttaaaatttcttttttacatcacaggaacgaaccgatataataccggctcgtcccaaaagtaaaattagtctctctcaacaattgtggaacatcccattccaccaccgatacaaagtgttgcaagacctttctttgcatcgcgtttctgcatctcatgaagcaatgtaacaaggatacggcatccacttgctccaaccggatgtccaagtgcaattgcaccaccgtttacattcaatttgctaaggtcaaatccaaggtcacgacctactgctacagactgtgctgcaaatgcctcgtttgcctcaatcaaatcaaagtcatcaatgctcatgcctgttttagcaagaaccttctttgtagaagcgaccggtccaatacccatgatttttggatccacaccgccaagagcaccggctacaaatgttgccattggtgttacaccaagctcttttgctttttcttcgctcattactacaatcgcagctgcaccatcattaataccggaagcgttaccagctgttaccacaccgccttctttaccggagcagcatctaagaccgctaaggctctcagctgttgtaccaggacgtggtccctcatcggtatcaaatacgattgttttctttttagatttgacttcaacaggaacaatctcatctttgaatttacctgcagcgatagcagcttcacatttctgctggctgttagcagagaactcatccaactcttcacgagtaattccgtactgctctgctacgttctcagcagtaatcatcatgtgatactgattgaaagcatcccacaatgcatcgtttaccatggtatccacaagtttaccattgttcatacggtaaccaaaacgagcattcatagctgcgtaaggagccatggacatgttctccataccaccggcaacaacgatatcagcatctcctgtctgaatcatctgagctgccatatttacacagttcaaaccggaaccacaaacaacgtttacggtaactgctgttgtctcgattggaagaccagcaccgatggatgcctgacgagctacgttctgaccaagacctgcctggattacacatcccatgtaaacatggtcaacggcatcctttggcacgcctgctctcttaagagcctcctcaataacgatagaacctaatttgggtgctggagttgtgcttaatgcaccacccattttaccaattgccgtacggcaagcacctgctaatacaactttcttagacatgaatatatcctccttataaattttttactaatactacttaatttatcatcactgctttcgcagtttctgatcatacttttctctgaatgccttctgaacaacttccggcaccagtttcgatacatccgagccataaaaagcaacttctttcgcaatggtggaacttaggaaagcatactcaagactcgtagtaaaaaacatcgtatcaatctctggctcaatgctgtgattagtctgtgcaatctgcatctcggattcaaaatccgtcacggcacggagaccgcggataatcagctttgcatcattttgtttggcaaaatcaattgtcaatccggtaaatgttaaaaccctcacatttggaaattctttcgtggtctgctttaacagttctacacgctcttcccttgtaaataaaggcgttttttcctgattcacaagcactccgataatcaattcatccactactttggatgctctcttaataacatctaagtgcccatatgtaacgggatcaaaactacccggatatattgcttttatcatatctttttcctatctgtaaatcaaactacaatttaccactttttatgattcaatccttactcataataacaaacgaaaacgatattgtcaacaatttaacaaactttttccatgaacattttgtgaactgactggctacttgaccgcaccatgcgataatgctaaaataaacatattgcaaatatagttaccagaatggaggttttaccagatatgaacgaattatataagagtaaacttgtgactgccaaagaggcagccgaagtggttaagtcaggaaactgggtggattacggctggaccgtaacaacacctgtggatttcgacaaagaacttgccaaacgtctgccggagcttcacgatgtgaacttccgtggcggtatcctgatgtgggaaccggagattttcaaaattgaagatccggctgcacacatgacatggaactcctggcacatgagcggaatcgaaagaaaagctgttgcaaaaggattttctttctactctccaatccgctattcggaactgccacgttattaccgtgatttagaaaatcctgtggatattgctgttatgcaggtagcaccgatggatgaacacggatactttaactttggaccaagtgcttcccatttgggagctgcctgcgagcgcgcgaaaaccattatcgttgaggtaaacaaaaacatgccacgctgtcttggcggatttgaaaatggaattcatatttctaaagtagatatgattatcgaaggctcaaacccaccaatcgcagaaatgggcggcggtgctgctgcaacagaagttgaccacgcagtagcaagacagatcgttgcgcagattccaaacggtgcctgccttcagttgggaattggcggtatgccaaacgctgtcggctcactgattgctgaatccgatttaaaagatcttggtgttcacaccgaaatgtatgtcgatgcttttgttgacattgccaaagctggaaaaatcaatggttctaagaaaaacttaaacaaaggccgtcaggtatacgcttttgctgccggtacaaagaaattgtatgactatttggataacaatccggaatgcatgagtgttcccgtagattatgccaatgaaattgatgtcatttccgcacatgataacttcatttcaattaacaatgctgttgacattgatttgtttggacaggttaatgctgaatccgccggcataaaaaatatcagtggagcaggcggccagcttgatttcgtattaggtgcttataaatcaaaaggcggaaagagctttatctgcctctcttctacctttaaaaataagcagggcgaagtacagtcccgtatccgcccaactttagcaaacggttccatcgttaccgatacccgtgcaaacacaatgtatgtcgtaaccgaatacggtatggtaaacttaaaaggactctccagttggcagagagctgaagcattaatcggcatcgctcatccggatttccgtgatgaattgattaaagaagctgagaagatgcatatatggcgtagaagtaatcgatga

SEQ ID NO: 504 - DNA, 23421 bp, unidentified
  source 1..23421: mol_type = unassigned DNA
ataccggcgatgtgaccggtaccgtgctggaaacagccccggtaactgccggggaaaaagagctgctggaggtgctgccccgctttgtggggccccggatgcagacgccgcccatgtactcggcggtcaagatcaacggccagccgctctacaaactggcgcggcagggcatggaggtggagcggaaagcccgccccattgagatcctgtccatccagtacgagggcagcccggcggagaatgagtacaccctgacggtcaaatgttccaagggcacctatatccgggtgctgctggaagagatcgcggaggccatgggccagaaaggcaccatgagcgccctgcgccgcgttgcggccggggtctacaccgaggccgacgcccacagcctggaagagatccaggccgccaaaaacgcgggccccgaggccctgcaggccctgatgctgccggtggagagcgtgttcacctctctgccgctgctggtggcggacgagcgggtggagcagcacctgtacaatggctgccctaccagccgctaccccgctgcggatggccgctaccgggtgcggaacgcgcagggccagttcctcggccttgccaacatcaccgagggcgtgctccgggtggaaaagctctttgtggagcgaaactgaagggaaaggaatgatgccaatgcagatctattcacagcttgtgccgcttgcgctgggcaatgcaaacggcagtgccgtggccatgggcttttttgacggcatccacattggccaccgcaccgtcatcgagggggcggtccagtgggcaagagcccacggggcatccccggcggtattcacgttcaaattgcccaccgaaaacaagatgaaaggcaagcgcctcctctccaccgaggataaacatgccctcatcgaacgtctgggcgtggagcattatctctgcccggattttgaggagatcaaggccatgacgcccgagcagttcgtgctgggcatcgtgcgggactgcaacgccaaagcgcttttctgcggcgaaaactttacctttggggccaaagccgccggaaacccggaactgctgcgcaagctctgcgccccgctgggggtggaagtggtggtgctgcccatggcccggtttgaggaaaaaccggtctcttccacccgcatccgcacggcgctggagggcggcgacatcccggcggcaaacgccatgctggggatgccctacgcgatccgctttgcggtgcaccacggggctggtctgggccggacgctgggggttcccaccatcaaccagctctacccgcaggggttccagctgccgcgtttcggcatctatatcacccggaccaagatcggggatacctggtacccctcggccaccggcctgggcacccggcccaccgtcaacgacgatctttccaaggtgacctgcgagacgttcatcccgggcttctcgggcgacctgtatggcaccgacccggtggtggagttttacgcctacctcagccccagcaaaaagtttgatacactggacgagctgcgggactgcatcaaccatgcagcccggcgggcccaggagtatttccagtaaacgaaaaaacaccgttcggctgaacggtgttttttgtttgcagaaaagcgaaataccgcaatcctcaatcgaagaatctgcccttgagcacgttttcgatcacggcctgtttcaggacgggagagagggtgctgtccgcctccatggcggcaagcagcgattctttcgtttcggtctgggcggcgcaccgggtgatggcgtggtccgcatcggcatccagcaccagcagggcgggggaatcgggcgtccagcgctgccatctggtggagccggaaagcagctttttgccgttggggtcgccgctggtgatgaagtttttcagataggcgcgcagctgttccgccatggcctgatagcccgcgccggagaggtcggcccagccgaagtaggggttgctgccagacagcatcgggagggcgatgccctggaacgagcccagcagcgggatctgtgttttgctggcggaagagccgtactcgatctgccccaggtagagcggcgcgtcgctccgggccgcgatcacctccgcactgccacgggtgctgaagacccggcagagggctgaaccataggtggcggcaaactgcttggctgcttccagctcgtcggcggaaaagcgtttggcctcctcgctggaaaaccagctgtcccaccgggcggcggcgttgaattcatcggccccggtcagcagcagggtaggaatttcgctgtactgagccgctggatatccgccctcgggcagggtgatgctgtccgcatagagatggggaaagacgctcatccgtaaaccggcatttgccatcagcggagccagacgggcggcatccacgccacagagccagctgcggaccgcagggtcttccgtcagcagccagcgccgcgcggttgcttcggtcagagccttgccgtcctgcacggccagcggtgccagagcagcggcaagcgtttcagcactcgtgttctcatccgcgcaggtcatgccgccggaaatagagatggctttctggaaccggcccacaaacaggggactggccagcagggccattccgtcccgcccgccggctgcaaagccgaggaccgtgatgttctgcgggtcgccgccgaacgatgcgatattgtcccgcacccagtccagcgccttggccatgtccagcagggcaaaattgcccgtttcctccgggccggagcagaacgcgggcaggcagttgaagccgaacaaccccagccggtattccagccccacgaagacacagcccagctgctcggccagaaatccgcccggaagctcccgcgcggagccgatctgattgccgccgctgtgcaggtagacgatgacgggccgtttgctggccttttccgtggtgtaaacgtctaatttgaggcagtcttcggtgcccagggcgcaggtgctgtactggtacgccgccgcgccggggacggtgcagtctttggcgtcggcccagggggcggggtcctgcggggctgtccagcgggcgtccccggcggtggaagcgccgtaagggatgccataccagacgagatgcccctcctgccggatgccctgcaccgggccgtgctgagtttggcataccgtgccgatgggggcggcagcggcggctgcgggcagcgaaaagcccggcaggctggcggcagcggcggccacggctccggatttgagaaaactgcggcgggaaaacttgggtgcttgcatcgtaaaatccctctcttgtaaaatacacctaaattataacagcccgggtttgaaatgcaatgaccgggcagcgacaaaattgtaaaaaattttcttgctttttgcacggctttctgttatactagcactgttaccgcggcacggggctgggagtatgcccgtttgggagtaccgtttcccgcaatctgtgctgacggcaaataaaattttaataaagaggtactgtactatgaacaagcaggaagttatggccaaagtcgctctgaccgagaaggacactggctcccccgaggttcaggtcgctctgctgaccgctcacatcaacgagctgaacgagcacctgaagaagaacccgaacgatcaccacagccgccgtggtctgatgaagatggttggccgccgccgcaatctgctggcctacctccagaagaaggacatcgagcgttaccgtgctctgatcgcaaccctgggtctgcgtaagtaatagaaaacagagggcaggtaccgtacaatggtgcctgccctttgctgtttttctgtggcttcccgttgtttgccgctccatggaacaacaggctgctgttgcgtgttgcagcagtaaatcgagcgtccgtgcgtacaaaaatgcacagacgctggatttattgctatgatgcgcggcgggcagccttttggataaaactgatcctgaaaaggacaaaggaggcaaaaccaaatggcaattgaatttggttcccgcaaagagacctttgagaactacaaggtctacgagaccatgctggcgggccgtccgttcaaggcggaaatgggcaagatgtgcggtctgtccaacgcaagcgccctgatccgttacggcgagacctgcgtgatgtgcaatgtggtcatgagccccaaaccccgcgagggcgtggatttcttccccctgaacgtggagtatgaggaaaagctctacgccgcaggccgcatccccggcagctttatgcgccgtgagggccgccctggtgagcgtgccatcctcaccagccgcgtggtggaccgccccatgcgcccgctgttccccaaggagatgcggaacgatgtctgcatcaccatgaccgtcatgagcctggaccccgattgcagccctgagatcgccggtatgatcggtgcctctctggtcaccgcagtgtccgagatcccctggaacggccccatcggcggcgtgcaggtgggcctggtggatggcgagatcgtcctcaaccccacccaggagcagcgccgccacagcgacctggccctgaccgtggccgctaccatggacaagatcgtcatgatcgaggccggcgccaacgaggtggatgaggataccatgctcaacgccatcaaggcggctcatgtcgagatcaagaagatcatcgagttcatcaacaagatcgtggccgagcgcggcaagccgaagatcgatttccaggtcgtgggcctggatatggatgtcttccacgccatccagaacaagtatctggacgacttcaaggctgccatggacaccgacgacaagaacgtccgcgatgccgctctgctgcccatcatggacaagatcgccgaggagtatccggacctgtccgaggcagacctcgacctcgtcagctacaagatgcagaagtacgtcgtccgccgctggctgctcgacgagggcaagcgcgtggatggccgcggcatcaacgagatccgcccgctggctgccgaagtcggcatcctgccccgtgtccatggctctggtatgttcacccgcggccagacccaggtgctgaccacctgcaccctgggcggcaccaaggacaaccagctgatggatgacctgaccgatgagcagaccaagcgctacatccaccactacaacttcccgccgtactccgtcggtgaggcccgcgcgccccgcagccccggccgccgcgagatcggccacggcgcactggccgagcgcgccctcgtgcccgtgctgccctctctggaggagttcccctacaccatccgctgcgtgtctgaggtcctgagctccaacggctccacctctcaggcttccatctgcggctccacactggccctgatggatgcaggcgtgcccatcaaggcccccgtggccggcatctcctgcggcctgatcaccgagggcgaccgctggatgaccatgctggacatccagggcgtcgaggacttccacggcgatatggacttcaaggtgggcggtacccgcaagggcatcaccgccattcagatggacattaagatcgacggcctgacctatgacatcattgccgaggcattcgagaagtgccgcaagggccgcctctacatcctggacgagatcatcaagcccgtcatcgcgcagccccgtgaggagctgagccgctgggcccccaagatgttcagcatgatgatccccaccgataagatcaaggacgtcatcggcaagggcggcaaggtcatccaggacatctgcgcgacctgcaactgcaagatcgacgtgcaggaggacggccacgtcttcgtctccgccgtcgatcaggaggacgcaaagcgcgccatcttcaccatcaagaccattgtggaagaccccgagatcggtgccatctacaagggcaaagtcacccgcctgatgaacttcggcgcattcgttgagatcgccccgggcaaagagggcctggtgcacatctccaagctggacaccaagcgtgtcgagcgcgtggaggatgtggtcgccgtgggcgacgccatcgtcgtcaaggtcaccgatatcgaccagcagggccgcatcaacctcagccgccgcgacgccatcctggctctggaagccaagaagaacgcccagcagtaaggctgtaacctgaaataaaagcagaaacctcccgttcagcaggaattgttgaacgggaggtttttattgggcagataaaattctttgtactatttcttgaaatcaaatggcatggcgttcctccgtaaagccagaagtactttatgtctttttctacgaatgattcccaggaaagaagaaatggctcgaatggttatacggcccgatgaatgccgaagaaaggttcaatgacgaaagccatcgtctctataggcatgaagcaatcagcgcttctcatttttgctttttatatccactttgagcgatttgatctcttccaggataagttccgtgcagacaacaataagccccgaaagaagaataaccccaccatagatcgggtagagaaaagactcctgaacgccgccgccgagaatgccggataagagctgccagatgccgccaaacggccagatggtgaatgcaaacatgacgaacatcgtgataagcgcttttttcatcgttctttccctccaaagtttttgatttgttgagttgagtataccatactgtttggtgaagcaccagacgcaggtacaaaaaagccagagcaccaccgctgtgacgatgctctggcttttacggtttattggtggttacggagggaaagcagtgcttttagcctttaccggatgcaggtgtaattctggttccagtagcggttcatgatgggattggtcaggtatttgttaccgttgtaagtgccataggatggagtggaagtgctgatagtgatttcattccacatggcttcgctgccgccaaagtacacattgctcagcgaggtgcagcggtcaaaagcacagctgttaatttgcttcacagttctaggaatataaacatcccgcagggagacgcagccttggaaaacttcattattgatttgcgaaatgttttcgggtagagcaagttgtgttaaactacgacaataccagaatgcagcgtttccaacgctagagacagcacggggaagagtaagcttggcgagagcggtgcaatggtcaaatgctcgttctccgataatcttaacactatcaggaatcacaacattggtaagattgctgcattcctcgaaagttgcagttttaatttcggtgacgccatccgggattttgatggaacgcagagaggtgcagtaagaaaatgcgctgctgccgatggttgtaacggtatcggggagtgtgatattctcgagcaatacacactttttgaaaatggagctgccaagagttttcacatcacctggaaatttaatgctttgcagtttagaacaatacatgaacatctcagaggaaagctcacggatgctgtcttggaaagtaacagttgttaaattgggacaggaagtgaacgtccctctttcaaaagtagtcttgccgcgaattgtgacattagccagagaggtgatttcagaaaatgcgttgactcctacggtggagacactggctggaagtgttaaagtatcgagattcgtcttttcaaaagccatattttcaatggacttcaatccatcagggaaagaaaccgaagttaaattactgcaattataaaatgcccggctaccgatgctggtaactgtttcaggaataatgacacgggtaatgtccttgttgctgtccagtgcagagggaccaattctggtaatcgtatagcctttatatacttttggaatagtcacttcgccagtcggggtcttggcggcggttttgtcgtagcctgtaatggtggcggtgccattattgtttttgttgtaagtccacaggatgccgtcagtctgctccggttccgagctggcggaggaactggaggagctggaagaactcgacgaagaagagctggacgagcttgcagagcttgaggcgggggagctgctgggctgattggttgagttggagggggcgggagcgccgccgccaccgcctccgcagccggtcaacaggatggcggctgcaagggcaaggcttgccgtggtacaggcggcaatgtgccgggatttggattgcaaacgcataaaatcactccttttttattttaccaaagcattgtgggagaggtctgggacctgttaagtctattatagaatattaaactactatgtcaagttaatctattagattattaatcttttggtttaaatctgtattgtcaagacaagaacattcttgggaggacaatgccatgatcgactatgcagctattggaaagcgcatccagaaaaagcggcaggagcgcagcatcacgcaggaaaagctggcggaacaggtgggcatctcggtggtgtacctgtccaaaattgaaaacgggcgggtctacccgacgctggagaccctttccaacatctgcacagagctggacacggagctggcagaggtgttgtccgacacggaaatggagcggaaagattacgccaatgaccgggtgctggagctgttcaacgcctgttcggtgcgggtcaagccaattgccttatcgctactggaagaactggccaaactttgagacgatactaaacttccgtccttgctgttcgtttcacagtgtgttaaactaaactgaaagaaattgttgaaaacaggaggaaaccatcttgaaacacatttcgatgttcgcgcgccgggcggcggcgcttttgctggcggcggtgctgctggtcggggccatccccgcggcgtttgcagaggaagagggcaccccggagggcgaggcggtcacggaggccgtctacacggtgcccaccaccatcggcggggcggataccaccctgctcccggcggaggaggaaaactgcctgagctggctgttcggctcgaaagataccatcaccatgccttacctgaatatcaagggcaagggcctgcgccggaatgtgaaactcaacctggtggactgcctggtgggcattacttacaccgagctgggttccatcggcagctttgtgagcgcctcggcggcacaggaagcctggaaagcccaggctgtggccattcactcctacctggaataccacaaaaagtacggctcttcggccaatgcgctgatttacaccccggtggaccagatcccggcctcggcccggtccgccattgagaaagccgtccgcgccgtcaaggacgaggtgctgacctacaacggcagcgttattgacgcggtgtggtcggccagcgcaggctacaacactcagacgggcgtctacggcacctgctccggtctggacgcctgggggacggatgtgccctacctccagagcgtggagagtccctatgagcgccagtaccatgagaaaatgcgccgcatcatcggcaaggactacacctatcaggagtacaacgacagcaagaccggcgagccctacgtcagcgccgacaccacccacaaggatctgggcggttttgtgcagtacaacaccttcgtctccaatggccgcagctaccgcaacatcagccagtttgtgagctcccgttactgctttgattttggcaccgacgccaatggcacccccgtgatgacctactacggctatggtcacggcgtgggcatgagccagtgcggcgcggtgggctttgccgccgagcaggggatgggctaccgtgagatcctccagcattactacaccggcgtctccatgaagagcgtgggcagtggttccagcagcggcggcttctttggctggctgcggaagctgttccgctgaccaaaacggcgctgcactggaaaccaaaaggaattgcggaaaatcgcttctcaaatgcggcggaatttggtatactatacaattgtaacatcaaatgggagttggagaaatcggaatgcagttggacaaggaaacgaaattgaagcaggagaaagagcgctgccgtcagctggcgcagcgggtcgcggaagaagcgcgccccgcctcggcccaggtactgaacagcgagtctgacctgctggaaaaggccctgcgccgggcaggcatccgggcggaagagtggtctgcacaggctgcagagcctgtggacctgctggtggtggaagaccccgtgtggagccatctgccccagcagctgcccgagaaagtgctgctggccagtgtggacagcaccatgatggcggcctgggccgagcagctggcccggcggggctattaccgtgatttccgctggcgcagcaagggccgggcccagcagtccgctctgttctgcaccggcagcgccgtgcccgccccgctgatgatggtacagggctacgagcaggagatggacaccctgcgggaccggatggtccgggccgagcgcacctgcagcgaggaagccgccctgatcgagcggctccgcagtgaccttgccctcagccgcagccacgagcagcagctggaaaagaccctgagcgacgttaccaattccacgttctggaagctgacctggcccatgcggtatgccgtcagcaagagccgccagatctggcacacgttcccgctgttcgtcttcctgcatgacctgcgcgctatgggcgtggagggcgtgcgggagcaggcccgtgcccgccgtgagtatgcagtcctcttccccagcaagaccctgcgggcagaccgctttgccccggtggagctgctggtaaagcaggccagccaccagcccggcggcgaggcaggccccaagatcagcattgtggtgcccctgtacaacaccccgctgaatttcctcgaggagctgctggattccgtcgtcaaccagacctaccgcaactgggagctctgctgtgtggacgccgggcaggacaccgccgtgggccagcatgtgcaggcccgcgccaaggcagacccccgcatccgctaccagaaactgaccgagaatgagggcattgccgggaacaccaaccacggttttgagctggccacaggcgattacatcgccctgctggatcatgacgatatcctccacccctgtgccctgtggtacacggcgcaggcgatcgtggagcagggagctgatttcgtctataccgacgaggcgacctttgagggcaaggtggagaacgtggtgctctaccacttcaagccggacttcatgctggacaacctccgctccaacaactatatctgccacctgaccacgttcagcaaggtgctgatggaacaggctggtggcggggagcgggccgagtacaacggcagccaggattacgacctcttcctccgcctgaccgagaaagcccaaaagatcgcccacatcccccatgcgctctattactggcgttccagccccaacagcaccgccagcgatatctccgccaagacctactgcatcgacgcgggcattgcggccctcaaggcccactatgcccgctgcggcgtggcggtggatgacgtcaccctcatccccggcaccccgggctattacaagacggattacaccatggcccacccgggccgggtgagcatcctcatccccacctgcgaccacatccgggatctggagacctgtgtggagtccatctacgcccgcaccacctacccggattttgagatcctcctcattgagaacaactccaaggaggagcagacgttccgcagctatgagcggatgcggaaagagcaccccgataccctcaaggtccttacctggcagggcaagggattcaactacagcgccctgaacaactttggggcccggtacgccacgggcgagtatctgctgctgctcaacaacgacaccgaggtcatcacctcgggctggctggaagagatggtcatgtacgcccagcagaagcgtgtgggctgcgtgggtgccaagctgctctaccccgatgacaccatccagcacgctggcgtgggctttggcatcggcggcgtggcgggccacctgcacaaatatttcccggccacttccgatggctacatgggccgcctgaactatgtgcaggacgtctacggggataccgccgcctgcctgctcatccggaaagaaatttacgacgaggtccacggcctggacgagagctacgccgtggcgttcaacgatgtggatttctgtgtccgcgtccgggaggccggttacaccaatgtcttcaccccgtttgcccagctctaccactacgagagcaagagccgcggcatggaggacaaccctgaaaagcagaagcgcttccagggcgaagtgctccgcttccaggcccgctggggcgacctgctggccaagggcgacccctgtaccaaccccaactttgacatccagcgtgaggacttcagcctcaaaattctgcctttggaatgaacctctcagtcacgcttcgcgtgccagccgctcccctttcgacacttgcgtgccacctcccccggccgggggagtctttcctatcaggggagcccttggcagggcggtgaggcttgagcaggacaagaaaactgtacgctttcataaaatgccgggccctgctgcctaaggagtgacttgtttgactttatccgcatgtattgttgtctataacggctatgacgaggtgctcaaggcggcccagaccgtgctgcagttcacccgccgctacccgctgaccctctatctggtggacaacgccagcccggacggcagcggcccccggctggaacaggccgtgcgggagggtctgctggctcccgggcccgggcagcaggtcgaggtgcgctgccgcaaggagaacggcggctttggcaccggccacaacaccgtgctgccggagcttgccagcacctaccacttcatcctcaacccggatatccagctcatggccgataccctcagtgacctggccgactggatggcccggcacccggatgccgtgatggcccggcccggcctcgtcttcccggacgggcggccccagcgcctgcccctgcggcggtgtgcgctgcggcccatggtctaccgccagctgtcgtttctcaagttctgggagaaatacaacgagcagtacctcatggcggacaaagacctgacaaaacccaccgagatcgagttctgcaccggcagcttttccgcggtgcggacggcggagttcaaggccgtgggcggctttgacgagcactacttcatgtatgtggaggacgccgacctcacccagaagatgcgcaccaccggcaaggcgtatctggtgccccagtacacggccatccatgcctggcaccgggcggcccaccgcagcctgaaaccgttcctctggcaggccggcagcctgctgcggtattttagcaagtggggcttcaaattttaatttttcaaaagaagaacggcatgagccagaaattttctgattcatgccgtttttttcttgcttttttgctgatttgatagtagaataaggtgtaatactatcgccccgggaaagaaaagaccggagttttgcacggtattacccaaccttgttgacagcggacgcagctccgctttgaatccatacgaatctcaaacgccaatccaacacgctgccacggctcttttgccgccggactgctttagcctcgcttgaattccaccaaggagttcggcgctcggctgcattgtctggtgtcaaaatagcctgtgtcatcgcgtcgcctttggcgttcgagcttcgtaaagctgcacaacttttttcatttttattaaaggagtgcacaaatatgaaaggcattattctggccggcggtgccggcacccggctttatccgttgacgatggtcaccagcaagcagctgctgcctgtctacgataagcccatgatctattatcctctgtccaccctcatgctggcgggcatccaggatatcctcatcatttcaacccctaccgacacgccccgctttgaggcgctgctgggcgatggcagccagtacggcatccatctgcaatataaagttcagccctccccggacggcctggcacaggcattcatcctgggcgaggagttcattggcgacgactgctgcgccatgatcctgggcgataacatcttctacggcaacggcttctccaagatcttgaagactgccgccgccaacgccgagaacaagggccgctgcaccgtctttggctattatgtgcaggatcccgagcgctttggcatcgtcgagttcgaccagaacggcaaggtgctgagcgtggaagaaaagcccgagcaccccaagagcaactacgccatcaccggcctgtacttctacaacaaggaagtcgtcaagatggcaaagcaggtcaagccctccgcccgcggcgagctggagatcaccacgctgaacgacatgtacctcaagaaagacgagctggatgtccagctgctgggccgcggctttgcctggctggataccggtacgatggacagcctggtggatgccgctgactttgtgcggatgatcgagaagcgccagggcatcaagatcagcgctccggaggagatcgcttacaagtatggctggatcgaccgcgataccctgctggagagcgctgcccgctacggcaagagcccctacggccagcacctgaagaacgtcgccgacggaaaactgagatactaagagtttaaggggagggttatcccatgaaaatcatcgtcactggctgcaagggccagctgggcaccgagatcatcaagcagctccgcgagggccgcagcgagatcggccccatcccggaaaagctgctcaatgcaacggtcattccggtggacctgcccgagctggacattgccaactacaagatggtggatgatttcatccgccgccagcgcccggacgtcatcatcaactgcgccgcctacaccaacgtggacggctgcgaggtgaaccacgacgccgcctacaaggcaaacgccatcggcccccgcaacctggcacaggctgccaccaagacgggtgcccgcctggtgcatgtctccaccgactacgttttttctggccgggagaacggcggcatcgctcaggatgaggccaccctgcccggccccatcagcgcctacggctccaccaagctcatgggcgagaagtatgtggagcagttctgccaccgccacttcatcgtccgcacggcctggctgtacagctactacggcaaaaactttgtcaagaccatcgtcaacgcgggcaagaagtttggcaagctggaagtggtcaacgaccagtgcggcaaccctaccaacgcggtggatctggcccacgagattttacagctctgcgtcacccacgagtacggcctgtaccactgcaccggcgagggcatctgctcctggtatgatttcgcctccgagatcatccgcctgtccggtgtggacgctaccgtggctccctgcaccagcgccgagtacaaggaaaagcacccggaaagcgccgaccgccccaagtggagcgccctggacaaccggatgctccgttgcaccgtcggcaacgaggtgcgcgattggaaagctgccctggcctgcttctttgagcactgggatggcgagaatggcatgaagtaatttgttttaacatcgaggatatatcaatatgaaaacctatctgatcaccggctgcgccggttttatcggctccaactttgtccactatatgctcaaaaaataccccgagatcctgctggtcaacctggataagctgacctatgccggcaacctcgaaaacctgaaggacgtggaaggcgacccccgccatgtctttgtgcagggcgatatctgcgataaggagctggtggagagcctgttcgcaaagtatgatttcgattacgtcatcaactttgcggccgagagccatgtggaccgttccatcaagaaccccgagatctttgtccagagcaatgtcatgggcaccgtgaacctgctgcagcgtgcaaaagaggcatggtacgatgctgacgccaagacctggaaagagggcaagaagtacgttcaggtctctaccgacgaggtctacggcgctctgggggccgagggcttcttcatggagaccaccccgctgtgcccccacagcccctactccgcttccaaggccagcgcggatatgttcgtcaaggcattccacgatacctacggtatgcccatcaacatcacccgctgctccaacaactacggcccctaccagttccccgagaagctgatccccctgatgatcaacaacgtcaagcaccacaagcagctgcccgtctacggcgacggaatgcagatccgcgactggctgtatgtggaggaccactgcaaggccattgacatggtggccaacggcggtaagatcggcgaggtgtacaacgtgggcggccacaacgagcgccccaacatcttcatcgtcaagaccatcatcagccagctgcatgaccgcctgaaagacgacggtatcagcgaggacctcatcaagcatgtggccgaccgtctgggccacgaccgccgctacggcatcgaccccaccaagatcaagaacgatctgggctggtatcccgagaccccgtttgagaaaggcatcgtcctgaccattgactggtacctcaaccacgaggagtggatggagcacatcaccagcggcaactaccagaagtactacgaggaaatgtacaagaataagtaagcggaatttccgcgttgcaatgagaatggcccccgccggaagcaagattccggcgggggccatttttgctgcccgttacgagtgggcagggcgtttagaacatcttttcccaggtggcactgcccaccgagccatcggcggtcaggctgttccgcttctggtagcggcggacggcttccgtggtcttggcaccatatttgccgtcagcggtcagggcctcgccctcgccgcgcagtttctgctgcaccagccggacggttccgccctcagagccctgccgcagcacgatgccggggtagggcacatgcaggccgtgggcagcggtgtatttggcgtagatggcattccaggtgttggcacccactttgccgtccacagtcagcttgttccgcagctggaactcggtcacggctttctcgcaggcggtgccaaaatggccatccaccttgaggatgtcgtgccaggtgcaggcgtcgcgcaggccgttgagccaggtctgcaccagtgccacgtcggggcctgaagagccacgctggatgagggaataataagcgggaattgccatgtgtgtggtcacactcctttccgccacaggttatgcggcaggggagaggagtgtgcggtcggcgcggtcggagcaaacgctctgcacccagtccaccagccggaaccggacgatgtactccccgcagatgaggtcattctcctgcgggagggcatagctgccgcaggccgcgcggcagaggcttgggtagagcacgcaccaccagtttttgccgctgcggtcattctcccccagcgtgaggcgcacagcgtcgtaccgcccggcgggaagggaggcgttttgataccgggtggcggcaaagtacatgttcaccagttccacccgggccgccggggcaaggccaagccgggccagcgtctggcgggcggtcagctccagcgcgggcaggttctgtgccgcccagtgcagggcttccggctgggtggacgccctgcactgggcatccgtataggccagcagggcgtcccgcacggccagcttggcggtctggtcctgcaggctgtcactgtcggctttgatgtggagccgcagggtgtcggcacagagggcggccccggtgtccagctgggcccggccccagtccagcgcaaacccgctcaaaccggccagcacgcaccccagcgccagcgcggcacaccacaccgccatttcccggcgggataatttttttgcaaacataaaaacaggcccctctctggaaaagttatccagagtatgggcctgtttctcaacgttgatacaaaaacgatcagttcttcagcgactgcatgggagccggcagacggccgccgcggttgatgaagaccgaggggtcgtgctggttgacgggcatgatggggccgtaacccagcaggccgccgaagtccaggatctcgcccgccttgcggccaatggccgggatgacgcggacggcggtggtcttgctgttcaccatgccgatggcggcttcgtccgcaatgagggcgctgatgacggccggggtggtgtcgcccggaatgatgaccatgtcgatgcccaccgagcagaccgccgtcatggcttccagcttctcaatggtcaggcagccggtctccgccgcgtggatcatgccggcgtcctcactgaccggaatgaaagcaccggacaggccgccgacgtggttggaggccatgacgccgccctttttcacggcgtcgttcagcagggccaggcaggccgtggtgccgcagcagccgcaggtctccagccccatctcttcgagaatgttggccacgctgtcgcccaccgccggggtaggagccagagaaagatcaatgatgcctgcgggcacgcccagtgcctgggaggcaaggtttgccaccagctggcccacgcgggtgatcttgaacgcggtccgtttgaccagctctgccacctggtcgatgggcgcgtccttgggcaggcgggccagcgcggcgcggacggcaccggggccggaaacgccaacgtggatctcacagtcgggttcaccggggccgtggaacgcaccggccataaaggggttgtcctccggcgcgttgcagaagacgaccagctttgccgcgccgatgcactgacggtctgccgtcagctcagaggctttcttgacggcctcgcccatcagcttgatggcgtccatgttcaggcctgccttggtggcaccgatgttgaccgagctgcagacgatgtccgtctcggccaaagcgcgggggatggactcaatcaggcgtttgtcgcccgccgaaaagcccttgtgcaccagggccgtgtagccgcccacaaagttgacgcccacctttttgccggcagcgtccagtgccttggcaaaatccacggggtccgcgtccgggcaggcacccagcagcatggcaatgggggtcacgctgatccgcttgttgatgatggggatgccatactcggcgctgatgtgctccaccgcaggcaccagattggccgccttggtggtgatcttattgtaaactttctcgcaggcctttttgggatccgggtcgatgcagtccagcaggctgatgcccatggtaacggtgcgcacgtccagattatcctgcgtaaacatctcgatggtttcgaggatgtcgccggtgttgatcatactcattgatatggaacctcgcaattctatactcgatgtatctcttcgtacaacctctcagtcgagcttcgctcgccagccgctccccctttcggcactttcgtgccacctcccccggccgggggagtctttcctagtaggggaggtggcacgccgtcaggcgtgacggagaggtttaaatcgtgtgcatggcgtcgaagacttcctggcgggtgaggttgatctgcatccccatctccttggccagggcgtccatgcgctggtgcagctcctcatggctgacactgcacttggagatatccaccagcatgatcatggcgaacatgccctgcagaatgctctgggtcacgtcctcaatgttaatattcagttcgctgcaaagggtcgagactttggcgaccacgccaacggtatcatgacccatgaccgtgataaatgctttcataatttctaccccataatttaagtttgacctctcagttgagcttcgctcgccagccactcccctttcggcacgttcgtgccacctccccccagcaggggggagtctttcctgacaggggagccattggcaaatagagaaagcttccatcgactgccaaagcctcccctattaggggaagtggcatcgcgctagcgatgacggagaggtttcgttcccctcaagtatagcagatttgctgaaatttgaacactgtttttagaaaaaagaaccgagaacactcccaaaagacattctatgcaaaaaaccagatgaaaacagccgccgcttgtgttatacttatttacaaatctcgcacaacaagctgaaaaggagaacacaccatggaacagcttttgaaaattctggaagataacgcgcggctttccgttgaggacattgccacgatgctgaataaatcccccgccgaggtggcggccatgatcgacctggcccgggcgcagggcatcatcaagggctacaagacccttgtggactgggaaaaggccggggtgaaccgggtggaggcggtcattgagctgaacgtcagccccaagaagagccgaggctttgatgagatcgcggccaccattgccgcttttgacgaggtggagagcgtgctgctgatgagcggcggttacgacctgcagctggtcatcaagggccagacgttccaggagatcgccctgtttgtggcaaagcggctgagcccgctggacgatgtgctgtccacggccacccactttgtcctccgcacctacaaaaaagagggccgcctgtaccaggacgacgagatcgatgaaagagagtgcacggtgctgtgatggattacgaacgactgatcgcgcctgccgccaaggccatgcggccctccggcatccgcaaattctttgatctggccgctgagatgcccgagtgcatcagcctgggcgtgggcgagccggatttcaaaacgccctgggccgtgcgggaagccggcatcgagagcctggaacacggccgcacccgctacacctccaacgcgggcctcaaggagctgcgggcggagatcacccgctatctcgcccgccggatgaatctccactatgagcccagccaggtgctggtgacggtaggcggcagcgaggccattgacatgtgcatccgcacgctggtccagcccggggatgaggtcgtcatcccggagccctgctttgtctgctacgagcccatcaccaccctttccggcggtgtgccggtccatgtggcctgccgacaggaggatgagttccgcctcaaagcagacgctctcaaagcggccattacccccaagaccaagctggtcatcatgccgttccccaacaaccccacgggtgccgtgatggagcgggaagacctggagaccgttgcggaggtgctgcggggcaccaacatcatggtgctttccgatgaaatttacgcggagctcaactatggcctgcggccccacgtctccattgcgtccctgccggatatggcggagcggaccatcgtggtcaacggcttctccaagagctatgccatgacgggctggcggctgggctatgcctgcggcccggagcccatcatcaaaatcatgaccaagatccaccagagcgccatcatgagcgcccccaccaccagccagtacgcggccatcaccgccctgaaagagtgcgatggcgagatcgaccggatgcgggacgagtacaacatgcgccgccgcctggtggtgaagagcttcaaccagatggggctgacctgctttgagccccggggcgcgttctatgcgttcccctgcatcaagtccaccgggatgagcagccaggaattctgcacaaagctgctggaacagaagcatgtggccatcatccccggcgacgcctttggtgcctccggcgagggatatgcccgggtgtcctacgcgtattccgtagagcacctgaaagaggccctgaagcggatcaaggaattcctgcaggaaaacggcatttatcacggggaagcataacgggaggaaacaaccatggcaactttgaaaagcgtgaccgttctggcccctgccaagctcaacctggcactggatgtggtgggtctgctgcccaacggctatcataatctggatatgaccatgcaggccatcaccctgtacgagcgggtggtgctccgccggagcaataccctgagcctgagcctgcccggcagtccggtggccgccaacgacagcaataccgccatcaaggcggccattgcctttttccagtacacgggccttttggcgggtgtggacatcaccatttataaaaacgtgcctgtccgggccggtatggcgggcggcagcgccgacgccgccggtgtgctggtgggcctgaacgccctgtacggggccaaactctccatgagtgagctctgcgctctgggtgccaaaattggtgccgacgtgccttttgctctcatgggcggcacctgccgggtgcagggtgtgggtgatatcctaaaagccctgccgccctgcccggactgctggttcaccgtggtgatgccggattacggcgtctctaccccggaggcctttgcggcttatgacaaagtgggcagcagcacccacccggactgtgaggcccaggaaaaggccgtccgggccgaagatctggccggggtctgcgcggcggccggcaacgcgctggaagagtgcagcggtgccagggacaacgaggccatcaaagcggctctccgccagcacggcgccgtcacggccctgatgacgggcagcggcgcggcggtgttcggcgtgtttcccaccgaagaggccgcccgtggagctgccgaggccctcaaggcccagtggccgcaggtgtatgtggcccagcccgataaaggcggtgcccgggtcgtcagccccaaatggctgctgtaagcgtttcagaatgcataaaccctcctttctccggaaatgctattccaagagaagggagggtctttttgtgcagaccttttataaaatctgtctgattctcatgatcatcggcggcatcaactgggggcttgtgggcctgttccagttcgattttgtgggctggctgctgggcggcagcagctccatctggtcccggatcgtgttcactgtggtgggcgcggccgcgctctgcggcatcccgggtctgttttccgacgaagcagagtaacgcaaaaacggctccgtgcaaaaaacggccccttacaaaggagccgtttttcttgtgccattttattcttcttcccagccgacaagatcgggcagggtaagggtctcatcagagcagtggggattggtggtaccatgggccgccagagacgcccgctcgatctcccgcacgatgtcgttgatggcccggcagtcttcgggcaggtcggtctggttgcggccggagtgggtgaacagaattttgcccagatggcccaccaccagtgtcaggggtaaaatctggggagcggatttatcgtagtggtagcccgcgtctttagcggccttgaaaattttctgggccgcaaagctccagc

SEQ ID NO: 505 - DNA, 19149 bp, unidentified
  source 1..19149: mol_type = unassigned DNA
ccgaaactggattccatcctcacctcactgaacaacatcgtaggtgacaagagcatcccttctacgctgcactctatcgaaacgactaccgccaatcttgctgtagtcagctctcagatgaaaggactcatgagcaaggacatcccccagctgaccggcaagctcaataccatcggagataattttgtagcgatcagcggtaacttgaaggaagtggactacagcgccattttccaaaaagttgacgcaacactcgctaacgtaaaaatgattacagagaagttgaacagcaaagataacactatcggactgctcttcaacgaccctgctttatataacaatctgaacgctaccacagagaatgcggcgagcttactggaagacctgaaagcacaccccaaacggtacgttcatttctctttattcgggaagaaagacaagtagcaaatctttcttatatagattttatctaaataagcaggcggtatataaaagggagtataacctctgcaaaagtctatctacagaccgaaataatattcccgtacaaacaagtgcgggaagtataaaagagcaagaataaaacgataaacagttagaatacagatacttataattttgcaagagaggggaaacagacagtgttccaacacaattctataagtcattgaaagtaaacacattattgtttgcccgagaaaaacaagaaaaagctaatttgttttttccaaataagattcccaattttgcaaacgtagaagtttcgcttaatttaataaatgtattaaagtcactatgattgaatcaaatcatgttgtactttggaaccgctgtctcgaagtaattaaagacaatgttccagagacgacatataatacttggtttgccccgattgttccattaaaatatgaggacaaaacattgatcgtacagatcccgagccagtttttctatgaaatactggaagagaaattcgtggatttgctgcgaaagacattgtacaaagctattggcgaaggcaccaagttaatgtataacgtcatggtcgacaagacttcgattccgaatcaaaccgtgaatctcgaagcaagcaatcgttctacagctgttactcctaaaagcatcgtcggtggcaacaaggcgcccagtttcctgaaagctcctgccgtacaggacttagacccgcacttgaacccgaactataacttcgagaactttatagaaggatacagcaacaaactttcaagaagcgtagcagaagcggttgcgcaaaatccagcaggtactgccttcaatccattgttcctttacggagcgtctggagtggggaaaacacacctggcaaacgcaatcggtactaaaatcaaagaattatatgccgataaaagagtattgtatgtttcggcacatctgtttcaggtgcaatatacagactccgtacgtaataacacgaccaacgactttatcaacttctaccagacaattgatgtattaatcattgatgatattcaggaatttgccggagtaacgaaaactcaaaatactttcttccatatcttcaatcatttacatcaaaacggaaagcagcttatactgacttccgaccgtgccccggtattattgcagggtatggaagaacgtctgttgacccgtttcaaatggggaatggtggcagaactggaaaaaccgactgtcgaactccgcaaaaacatcctgcggaacaagatacaccgcgacggtctgcaattcccaccggaagtgatcgactatatcgctgaaaatgtaaatgagagtgtacgagacctggaaggtatcgtcatcgccattatggcacgctctactattttcaacaaagaaatagacctggatttagcccaacatattgtacacggcgtagttcacaacgaaacaaaagcagttaccattgacgatatactgaaagtagtatgcaagcactttgatctggaagcatcggctattcacaccaaatccagaaaaagagaagtggttcaggcacgtcagattgcaatgtacctggctaagaattatacggatttctcaacttcaaaaatcggtaagttcatcggcaataaggatcatgcgacagtgctgcatgcttgcaagactgtaaaaggtcaactggaagtagataaaagctttcaggctgaggtacaggagattgagtcgttgctgaagaagaaagcataattcaagtaataggtattaagtaataggtaatatcgaagctgcataaacaagtgcagtccgcatagctattacctattacttattacctattacttatcattagaatccttgttgacgaagcactttcaacaagttctcagacataaattcattgtctttctttgtataacgtacatccgtaaatacctgtgccagagtttctttcttattttcttctataaactgtttattttccggcagtgattctttatactcgtacaagcgatcgatgtcttccggagtataatcatggtaaacttcctgatgcacggcagcttcgagaggcaagcggtccacctgggccggagtaccgtccggatagccgactgtgatcgtcgtaatagggaataccagtttcggcagttgaagtgtatcgatgatcatttgcggattataagtagtcgttcccagataacagatacccaagcctgcctcttcagccaacgtgcagaaggtttgcgcaaccaacaaggtatccatagacgcattcataaaagacattaaattatcgtagccgggaacagcgtttctctgttcacaccacttgctgaaacggcggaaatcggcacaaaaagtaagcacgacaggtgccccttttaccatcggctgattgaaatgagcaggagaaagtttctctttcatttctgcatcgcgagtcactataacactataaagttgcatccctcccatcgtagaagcgcggaaagaggtttcgagcaaatcatttaacaaatcaggagcaatatctttttgctggtatttccggattgttcttctgttctttacggtttcaaacatatcttttttttgcaaagatacaaaaagaaatattattttgccatatcaatgaaataatctaattttctttttggaaaacttaaagccatgaacaaaaagcaaagttatctgttaatcaaagacttaacaataacaaacggaaaacttaaagcctgttgataaaatgttgcatttttattttgatagataaaaaaacattcttagctttgcagccacatttgttactgataagtaaacttctacacattacttattaaataataaaatctaagacacattggatcgtggaaaaacaaatttattcttatgacgaagcctacgaagaatctttacgatattttcaaggcgacgagcttgctgcaagggtttgggtaaacaagtacgcagtaaaggattctttcggaaacatctatgaaaaatctccggaagatatgcattggagaattgccaatgaagtagcacgtatcgaggcaaagtatccgaatgcactgacagcaaaggaactgtatgatctgctggatcattttaagtacatcgttccgcaaggaagcccgatgacgggtatcggtaatgactatcaggtcgcttcactatccaactgcttcgtaatcggggtagacggcgcagcagactcttatggcgctatcatcaaaatcgacgaggaacaagtacagctcatgaaaaggcgtggaggagtaggtcatgacttgtctcacatccgcccgaaaggttctcccgttaaaaattcggcattgacttccactggtctcgttccgttcatggaacgttattccaactctacccgcgaagtagctcaggacggtcgtcgtggtgcactgatgctgagtgtgtctatcaagcatccggattcggaagccttcatcgacgctaaaatgacggaaggaaaagttaccggagccaatgtttccgtaaagctggacgacgctttcatgcaggcggcagttgacgagaaaccttatatacaacaatatccgattgaatcggcaaatccgactaccactaaagaaatagatgcttccacattatggaagaagattgtgcacaatgcatggaaatcggcagaacccggtgttttattctgggatacgattatccgtgaatctgtgcccgattgctacgcagatttaggttataagactgtatctaccaatccatgcggtgaaattccattgtgtccttatgactcttgtcgtctgctggctatcaatctatattcttatgtagtaaatccgtttaaaccggatgcctattttgatttcgaattgttcaaaaaacacgttgcgctggctcaacgcatcatggacgacatcatcgacctcgaactggagaagatcgaacgtatcatggaaaagatcgatcaagacccggaaggcgaagaggtaaaacatgccgaacgcaacttgtggaacaagatatataagaagagcggtcaaggtcgccgtacaggtgtgggaatcactgcggaaggcgatatgcttgctgctttaggtctgcgctacggaaccgaagaagcaaccgaattctctgaaaaagtacataagacagtggccctcggtgcctatcgttcttcggttgaaatggcaaaagaacgcggtgctttcgaaatatacagcaatgagcgcgaacagaacaatccgttcattcagcgtcttgccgaagctgacccggaactgtatgcagaaatgaagaaatatggccgtcgtaatattgcatgtctgacgattgctcctacaggaacaaccagtctgatgacacagacgacttccggtatcgaaccggtcttcctgcccgtttacaagcgcagaagaaaagtaaacccgaacgatacgaatgtacacgttgactttgttgacgagacaggcgacgcattcgaagaatatatcgtattccatcataaattcgtgacatggatggaagctaacggatacgatcccgccaagcgttattcgcaggaagagattgacgagctggtggccaagtcaccttattataaagcgacttccaatgacgtagactggttgatgaaagtgaagatgcagggaagaatccaaaaatgggtagaccactctatcagcgtaaccatcaacctgccgaacgatgtagacgaggatcttgtcaaccgcctgtatgtagaagcatggaaatccggttgcaaaggatgtacggtataccgcgacggctcacgttccggagtattgatttcaaccaaatcggataagaaagaaactcttcctccttgcaaaccgcctacggtagtagaaacacgcccaagagtactggaagccgacgtggttcgtttccagaataacaaagaaaaatgggtggctttcgtaggactgctggatggacatccttacgagatattcaccggtttgcaagatgacgacgaaggtatcctgttgccgaaaagcgtaaccagcggacgtattatcaagaatatagacgaggatggaaccaagcgttacgacttccagttcgaaaataaacgtggatacaagacgactatcgaaggattgtcagagaagttcaacaaggaatactggaactatgcaaaactgatctccggtgtactccgttaccggatgccgattgagcaggttatcaagctggtaggttctctgcaactaaacagcgagagcatcaacacttggaagaacggtgtagaacgtgcattgaagaaatatattcaggacggaacggaagccaaaggaaagaaatgcccgaattgcggtaatgaaactttggtctatcaggaaggctgtctgatctgtaccacttgtggtgcttccagatgcggttaacatgtgacgtatgttaattaatatataaacaaaagattaaaaggagtcctaatacggctccttttattttttattcaaaaaaatgtcttatacttgcatagtcattagtgtctaatcaaaatctaatatatatgactgtatcatttaacatcgaatatcgcaccagttggggagaagaagtcaggattgccgggctgctgccggagtcgatccccatgcataccacagacggcatatactggacggcagacgtggaactggaagttcccaaagaaggaatgactatcaattacagctatcagatagaacaaaaccaaatcatcatccgcaaagaatgggacagttttccgagacgtctctttttatccggtaactctaaaaagaagtatcagattaaagactgctggaaaaatatccccgaacaattgtattactacagttcggccttcacggaagccttgttagcccatcccgacagagctgaaattccgccttgtcacaaaaaagggctggtcatcaaggcatacgccccacgcatcaacaaagactattgcctggcaatttgcggaaatcagaaagcattgggaaactgggacccggacaaagcgattcccatgagcgatgccaactttccggaatggcagatcgagctggatgcaagtaagctgaaattcccgctggaatacaaattcatcctttaccataaagaagaaaagaaagcagactgctgggaaaataaccccaaccgctatcttgccgacccggaactgaaaacaaatgagacgctggtcatctccgaccgatatgcatatttcgatattccggtatggaaaggggccggtatagccatccctgtcttttcactgaaatcagagaacagtttcggagtaggagatttcggagatttgaaacgcatgattgactgggctgtaagtacccaacaaaaggtaatacagatattaccgatcaatgatacgaccatgactcatgcgtggaccgattcttatccatataatagtatctccatttatgctttccacccgatgtatgcggatataaagcagatgggaacactgaaagacaagtcagccgcagcaaagttcaacaaaaaacagaaagaactcaacggcctgccggcgatggattatgaagctgtcaaccaaacgaaatgggaatacttccgactgatcttcaagcaggaaggagaaaaagtattagcctccggagagttcggcgaattctttaatgccaacaaggaatggctgcaaccttacgctgttttcagctatctgcgcgatgcctttcagacacctaatttccgtgaatggcccagacattccgtttataatgcacaagatatagagaagatgtgccggccagaatctgtagattacccgcatatcgcactttattattatatccagtttcacctgcacctgcaattggtagccgctacgcaatacgcccgcgaacacggtgtcgtactcaaaggagatatccctatcggcatcagccgcaacagtgtggaagcatggaccgaaccttattacttcaatctcaacgggcaggcgggcgcccctcccgatgatttctcggtgaacggacaaaactggggattccccacgtacaactgggacgtcatggaaaaggacggctaccgctggtggatgaagcgtttccaaaaaatgtcagagtacttcgacgcttaccggattgaccacatcctcggtttcttccgtatctgggaaatcccgatgcatgccgtacacggattactcggacagttcattccctccatccctatgagtcgggaggaaatcgaaagttacggactcccctttcgggaagaatatttgattccatatattcatgaatccttcctcgggcaagtattcggtccgcataccgattatgtgaaacagacttttctgcttcctgccgaaacacccggtgtttatcacatgaaaccggagttcaccacccaacgggaagtggagagtttctttgcaggaaagaatgatgaaaacagtctttggattcgggatggactatacactttgatcagtgatgttctttttgtaccggatacgaaagaaaaagataaatatcatccgcgcatcggaatacaacgcgatttcatcttccgttcactcaatgaacaggagcagaatgcgtttaacagactgtatgaccagtattattatcaccgccacaacgagttctggcgccaacaggctatgaagaaactaccgcaactgacacaatcgacacgtatgctggtttgcggagaagacctgggtatgattccggattgtgtttcgtccgtcatgaatgatcttcgtatcctcagcctggagattcagcggatgccaaagaatccgatgcacgagttcggatatttaaatgaatacccataccggtcggtttgtaccatctccactcatgatatgtctactttgcgaggctggtgggaagaagattacctgcagacacagcgttactacaacacgatgctggggcattacggaaccgcaccgacagtcgccactcccgaattgtgcgaagaagtggtgcgcaatcatctgaaaagcaattccatactttgtattctgtccctgcaagactggctgagcattgatggcaaatggagaaatccgaatgtgcaggaagaacggattaatgtaccatccaatccgcgcaattattggcgttaccggatgcacctcactctggaacagttgatgaaagcagaagaactcaatgacaagatacgtgagctaataaaatacaccggcagagctcccaagaaataaatatctttaggcacgggtgacacggattaacacgttttttagacctataatctcttaaaactgtaaatccgtgtcatctgtgcctgaataaaatcaactgatagttttgacacctccgtttctctcccatgcggcaattctttatcttccttcattccgttttttccaattaatcaagtatctttgcaacgcaaaaacgcaacgcaaaataaatgggagacaatcagcatcggcgtattgattttgtggacttaaccaagggagtctgcattattctggtagtgatggcgcatatcggaggcgctttcgaccaacttgacaagcattccatgctatcctgctttcgcatgcctctctatttctttatatcaggaattttcttcaagccttatgaaggattatacgggttcattatccgaaagaccaataagctaatcattccctttatcttcttctacgtcagcgcctttctactaaaatacattgtatggaagattgcaccggaaactttccatctccctgtgtcatggagagaattactgtttgtctttcacgggcacgacctcatcaagttcaatcctcccatctggtttctgcttgctctattcaactgcaatatcctgttctatctgattcattatctgcgtgacaagcatttatctctgatgtttgcagcaacgttactgatcggatgcacaggattcttcctaggcaaatttcacatcgaactttctttgtatatagacgttgccatgactgccctccccttctatgtggcaggtttctgggttcgccgatataatttcttcctgttccccagtcatcggttcgacaagattattccctcatttgtcctgctggcactggtcgtaatgtacttcaccgccaccacgccgggtatgcggaccaacaattatcccggcaacatattccaggtatacattgccgcatttgccggaatctttatgattatgctgatctgtaagaaaataaaaagaataagcatcgtttcttatctggggcgatattccattatcacactcagtattcatggaccgattatacactttgcaagaccggtcgtttcgcattatattcataacgactgggcagaagcaagcgcactgctcctgctgacattgaccatctgcattctctttacccctatcctgcttaagataattccacagttggtggcacaaaaggatttattaaaagtcaaataataaaacattgtgcaagccaaacttttcttaactctaagtttaattatcaaataatttactacttttgttccaaagaactatagaccgagaacaaatgaatataacgattgtcttaggagataaaattccatctataaaatacggcggaactcaaagagtaatgtggtatctgggtaaagaactcaataagcgcggacacaaagtcaccttcatcgcaggaaaaggttcctcctgccctttcgctaaagtgatagaactggaccctagcgtaaatctgaacacccaaatccccacagacgcggacatcgtacatttcaacattcccgttcccgaaggaatcaccaagccgcacttactgaccatacacggcaatggaatcccggccaacgcagaccggaacatcgtttttgtctcacgtaatcatgcacaaagacttggaagcgaatcattcgtttacaatggactggactgggatgactacggtcccgccaacctcaccctttccagaaaaaactaccattttctaggcaaagcagcctggaaggtcaaaaatatcaaaggagctatcgccgttgtccaaagcatcaagaacgcacaactggacgttttaggcggttatcgcctcaatctcaaaatgggcttccgattcacatggaatccacggattcattttcatggaatggtagatgattcaaagaaaaaagttattattgagcagtcaaaagggcttattttccccgttacatggcacgaacctttcggacttgcaatcaccgaatccttatacttcggagctcccgtattcggtactccctacggtgcgcttcccgaactcgtttcaccggaagtcggttttctgaccgctcacggacaggaaatggccgaacatatacagtcagcacaatattctccgaaagtctgccacgaatatgccagagatctattcaattcaagtgtcatggcagaagcttatttaaagaaatatgaaactgtactgaacggcgaacctttgaataaagaagtccctcatattatagatatcgcacgacgtcttccatgggactaaaaatggcagttgaattacatagctgatgactaaaatctcatttataaagcctttcattcatttaataagcgaacaaaaatgatcgaaaacactttataaaaagaaataaagccttacctttacttttttagaaaacaaaagatatgaagataaacaacagctatattttgctgaaagacatctgctgctttgcttatcatggagtagccccccaagagaatatcattggaaatgagtatattatcaacttgaagttgaaggtagatatcagtcaggctattcaaacagacgacgtggtggatacggtcaactatgccgaaatacacgaagccgtgaaagctgaaatgtccatcccgtcgaagttgctggaacacgtatgcggacgaatagctaaaagactactggcagaatttcctgccattgaagaaatagaacttcgtctttccaaacggaatccgcctatgggagcagacatcgactcagccggagtagaactgcattgcagcagataagtacctttgctttatcagtttgtgttattatcaagaagcacattggtctgtcatcctatcatccggactgccacatccggtcaacttatttacaacaccctatcattctgcttgtgccaagtaatgggcacagttatgccaaaggagtgtcacggttgtgacaagggtgtggcacagttgtgccaaaggcgtggcatcgtcgtgccaaaggcatggcacaagtaaggctgcctcatttctacttgaagcagcctcacactatcatattttcagtctataacgacctatctcttctttctttttcttttatttaccgattctacagcttccgttaccacggatttgttttcgaaccgtttcgtataactggaatagtccggatgggtacgttcgtaatcgggatccataaacagagggctggaaatgatatgatccgccgtagaacgattacaacagaaaacgatgttctcaacaccggccagtcgggttaatgctttaacatccgtatcatgtggctgcaaagtcatagggtcagtgaaaaagaatagataatcaatctgaccgtccacaatacgcgatcccatctgctggtcacctcccaaaggaccggatttcagaattgtgaagtcccactccacttcaggatgcttctccttcagtgcttccagaatcagagtacctgtagtacctgtacaatagaatttatttcccatcaacagttccgagttccacagcacccattcgatgaggtcttttttcatggcatcatgtgctaccagcccgatgcctctccttacttttggttccattttgttatccttttaaatccgacaattgagagaatcttttgcaccctcccacataaaactgccacaagatactactttttatccgttcagggattggattcaaagaagtttttcttaagttttctttacgggaagaagaaaatgaaggacaaatctgtttatattctttccgggcacgcatcaccgcacgggcgttgtctaactgccccttcaacagaaatgtgaatgcagccacgtaatcgagacaagtccggatacgcatcactttatttaactcttcgtccgaaagattcttatagagcatgacaagattattacgaaaattcaaaaaagtcttgcggggattctcctttttcagagttgcaccaccgacgtgatagaccgtactttgaggaatgcaaacgatttcccgaccacgggaacgtagtcgccagcataaatcaatctcttccatgtgggcaaagaaacgtccgtccagtccgcccgcctcacgataatccgcatgacggataaacagggcggctcccgttgcccagaaaactggcaggatcgtatcatactgtccctcatccttttcgaccactcccattatacgtccacgacagaacggatagccgtacttatctataaatcctccggctgctccggcatattcaaaatactctttttgccgctggctacggattttcggctgacaggcagctaccttcggatggccatcaagataggagatcatcggttcaagccaatgttcggtcacctcaacatcagaattcagaagtaccacatactccgcttctacctgctgcaaagccaggttatatccatctgcgaatccatgattctgatccagcacaatgatccggacacaaggaaattcctcccgaagcatttccacagaagcatccgtagagccattgtcggccacacagacttctacttcttcgctcttcgaatagcggatcacggacggaagaaaagtacgaagcatatcgcacccgttccaattcaaaataaccactgacactttcatccttaccccctttcacattcagccttagaagctttccaacgtttatgagaccacagccaataagccggttccctgcgaatcgtctgttccagataatcagcaaacatttccgtaatttctccttcacccgtctccttcggtttctctgtcatcagcttaaactcagctacgcaataccctctgccgggttttgtcagatcacaatagaacacagggaagttcatcattttcgcaatgcgctccgcaccattcagaaaggcggtttcctgccccaaaaaagtagtccagtatttttcgtttccgctgggccactggtcagtaatcagaccgacaaccatctttttgccttcacgcttcaacttgataatttcgcgtgccgtagaatgtttcggaacgttatatcctccgaagcgggaacggatgcgctgaaacaattcgttcaagtatttatctttcagaggtttatagacttgcatcggtacatcacccggtttcataatagatcccatcccgatcagccattcataattggcataatgaggaatcattacgatgattccgccatatttctcggtcagttccagatattgttccgtattcttataagtcatccgcttataaaggtcttcgggtgacatatgaagcattttcaagtcttcaagcatatagtcggaaaggtaacgatagaaacggcgttcgatctgcagcctttctttcttgtctttttcgggaaatgatttcttcagattctcccgtactactttccggcgatacctccctatacggtacatcaacaggtaattgaaatccgaaagtaaatacaatatccggaagggaagcgccgaaaacagccacatcccgctatataccagccaatagataaatctagacttcataattcatcagaattgtgcctttaagcgctgtcatatcttcattaaattctcccagtcggacgttaatcatctgattgtccaatgattcgtcattctccacttctacgcggatatagttagcggtaaacccgtgcatcggcgtacctgcttttgatttttccatcaatacctgcatggtctgcccaatgtgacgggtatagaaagcccgtgtcttttcatcagaaagtgtcagcaagcactggctgcgctgatgtttctcttccggcgaaaccacataatctatcttcagggcctgcgtccccggacgttcggagtagctgaacacatgcaactgtgtcacatccagtccggaaataaactgataagcctgttcaaaatactcttccgtctctccgcgagtacctacaatcacatcgactccgataaaggcatccggcatcacttccttgattttctttactttagaggcaaaaagagccgtatcataacgacggcgcatcaatttcagcacttcatcgcaaccggattgcaacgggatatgaaaatgaggcataaatctacgggaacgggaaacgaactcaatgatttcatcagtcagcagattgggctcgatagaggaaatgcggtaacgttcgatgccttccacctgatccagcgctttcaccagatcaaagaaagtctcaccggtagtcttaccaaaatcgccgatattcacgcctgtcagtacaatctcttttccgccttcggcagcagcctgccttgcctgctccaccatagaggcaacagtaccgttacggctgcgtccacgggcaaaaggaatggtacaataagaacagaaataatcgcatccgtcttgtactttcaggaagaaacgagtacggtcgccccgtgaacacgaaggagaaaacgaacggatatctttggtggtggtagtaaatgcctctccctcttcatgcttatggaggtcgccgagatactgcaacaagtctcctttctgctcggcacccagcactacatctactccttttatctttgccacgtcgccgggtttcaactgcgcgtaacatccggtcactaccacaaaagctccgggatgctgcttgaccaaccgatgaatagcctgacgacatttcttgtctgccatctccgtcaccgaacaagtatttactacacagatgtctgctttttcccctttgcgtgcagtccggactcctgcctcccgcaggattttgccgatagttgaagtctctgaaaagttcaatttgcagcctaacgtataataaacggctgtcttattttgaaatacagtggtatctatcataatctgttataacgcatatttcctgcaaagttacacattattattagtaaaacactttaggatacgaaagtttattcctatttttgcacaattcactaaaaaacgtgcaatgattaaagagaatttcattaaactatacgaaaatagttttcgggaaaattgggatttaccttgctataccgattatggtgaatccgttcattatacttatggccaggtagccggagaaatcgcccgtatgcacctgctcttcaaacactgcagcctgcgtagaggagataaaatagccgttatcggcaaaaacaatgcccactggtgcatcgcctacatggcaaccatcacctacggagccatcatcgtccctatcctgcaagactttacacccaacgatgtgcatcatatcgtcaaccattccgagtccgttttcctctttaccagtgacagcatctgggaaaacctggaagaagaaaagctgaccggactgcgcggagttttttcgctcaccgacttccgctgcctctatcagcgggacggagaaactattcagaagtttctggtacacctcaatgatgaaatgtacgccgcctatccgaaaggattcacgcgcgaggacattcaatacactacgttatccaatgataaggtaatgctgttgaactacacatcgggaactaccggcttcagcaaaggggtaatgttgacgggcaacaatcttgccggcaatgtcactttcggcatccgcacggagttacttaaaaaaggagataaagtgctttctttcctgccactggcacacgcctacggttgcgctttcgactttctgactgcaactgctgtcggaactcatgtcaccctgctcggtaaaacgccttctcccaaaattatcatgaaggcttttgaggaggtaaaaccgaacctgattatcactgttccgctggtcatcgagaaaatatataaaaatgtcatccagccgctcattaataagaaaggtatgaaatgggcattaaacattcctttgctcgacacccagatttataatcagatacggaaaaagctgatagacgccctaggcggacgtttcaaagaaatcatcatcggaggcgctgccatgaatcaggaagtggaagagttcttctacaaaataaagttccctttcaccatcggttatggtatgaccgagtgcggaccactgatcagctatgctccctggaatgaatttattttaggctcttccggcaaagtgctggatatcatggaggcacgcatctataaagaaaatccggaagcggaaaccggagagattcaggtacgtggtgaaaacgtgatggtgggatattataagaatccggaagccacgcaggaagtgtttaccgaagacggctggctgcgcaccggcgaccttggtactatggacgccagcggaaatatcttcatccgcggacgactcaaaagcatgattctgagttcgagcggacagaacatcttccccgaagagctggaagccaaactcaataacctgccattcattcttgaaagcctcgtcatcgaacgtaacaagaaactggtggcactggtctatgcggattacgaagcgcttgattctctcggattgaacaatccggataacctgaaaaccatcatggatgaaaatctgaagaacttaaataataatgtagctgcgtatgaaaaagtcagcaagattcagctttatcctacggaatttgagaaaaccccgaaaagaagcatcaaaaggtatctatataacagtatagctgtcgattagtatgttttaaaacatggattgaaggcgtaatataacaagcttctaaaaaaaattataaaaatagttggcttttcgagaacaacatattgaaaaagtacataactttgcagcgttttaataaagcaattgattgtattacgtttttaaaaagcaaagaaaatgaaaaaattagttttgatggccgtagctatcgtagcagtatcattcgcatcttgtggtaacaaagcagctgacgcagcaaaagctcaacaagattctatccgcatcgctgactcaatcgcagctgtagaagcagcagcagctgaagcagaacaagcagcagctcaggcagcagctgactctttgaatgcagatagcactgcaactgaagctgtagctgaataattcagaacagcctagagagaattgaaagtctgacatgctaaaagcatgcacagacttttttttatgccttatttagcgtatgagcttttcacaaagggagcatccagcaaataatccagacttacctcgacacttttctctacgggcatgccgtagctttctatctctgcaacaagatgcttcacaccggctgtctttgcattcttgaaaatagcatcgaaaccaaccattccgctctgcccgatttctctgtgatctttgatatggaacattttaaaacgaccggggtatttattaaaataatcgaccggactgttttgcccgcgaactacccaataaacatccatctggaagaaaacatattcaggattggtatgctcaatcatgtaatcatacatcactttatcttctaccttctgaaattcatgagcatgattatggtatccgaacgacatcccctgctgtttacaacgtttgcctatttcattgtaataagcacaatatgtatccaactccttaagtgttttaggcacatccatccaaggagctacaatgtaactcatgccggcagctttatgatcagcaatacactggtcccaccattgaagtgaacttgaaaaatcaccggaagctaattcttctttcgacaatcctcttgtgcaatgtgaggataaaaccttcagtccggcagattctacatcttttttaaattggtcgggagttctgtcgtaaaactttccattattataattggcggcttccacactggtatatcccattttcgccaagttcttcagaagagtaatataagcggcgtcacatttgccgtccttattgtctaccttattcaatatatccctgacagaatagagttgaatcgctacttcttttttagctttcgcttttgttttagactgtgccatggccgtaaacgaaatcattaaaagaagagccagcgcacatagatttatttggagtttcatgtttgtagataaaggggttcatgtattaaaataaaaaagctgtgtcagaagttcgtcgggcatatcattctgtcattcagaactaaatgccatgttgatgttacttttgacacagcctatctttgaattatttatgtgatcagtccagaactttcacacggatattgcggaaccaaacgtcatcaccgtgatcctgcattccgataaatccttcgtggttttcgccaccgcaattattcagcagttcgaaagccaacggccatttgtcctggctgaacttgctggcctgcaaaaggtcagtccattgtttagtccacaagtgatattcgagtacattctcgtcattctgtccgtgaacaaccgtacctttataaaccatgatcttagccttgttccattcaccgaaaggtttcgcattctgaggaactgccggaatcatgtcatataaagaagccg

SEQ ID NO: 506 - DNA, 9756 bp, unidentified
  source 1..9756: mol_type = unassigned DNA
atgaagtggggaatcttagcgaccggcaccattgccaaaaagtttgcatctacggtggaacagatgggcgcagagggggagcagcttgttgccgtgggctcccggcacatggaaagtgcccaggcgtttgcacagcagtacggcatcccccgctgctatgactcctacgaagcccttgccgccgacccggaggtggaggccatctatatcgccacccccaacaccctgcattacgaaaactgcaagctctgcttggagcagggcaagcacgttttgtgcgaaaagccctttaccatcaccccggagcaggcgcagcagctgtaccgcctggcggaggaaaagcacctctttctcatggaggcgttctggatctggctgctgccgctgtacgaccgcctgcgccagatccttgcggctggcaccatcggggagctgaagcagatcacctgtcagtacggctttgtggcctccggtgcccggaaagaccgcaagtttgattccggtctgggcggcggtgcgctgctggatatcggcatctacaatctgggctttctgcgcatcctcaccgggcaggacccggagagggtggagaccaaagaggtgcacatcaacgagtacggcaccgacgattacagccgccttgtgctgacctaccccggcggctgcaaggcggagtcggtccagaccatcgggcaggagctggagcgcaacgcccgcatccttggtaccaagggcagtattttcctgccggatttccagcacgccgagaccatgacgctggaagtggagggcaaagaaccggaggtcatccgctgcccggtggacatcaacggctttgagtatgagatccgggaagcaagccgctgcgtcaagctggggcgtaccggcagcgaccgctacaccccgcaggacagccttgccctgacccgcctgatgtacgacacccgcatgagctggggcatgaagtttgcgggcgaggtgtaagcacacaccttgtacagggggctttttgcgtgcgaaaaccatgggacactaagaacgacaacttggaatttgaggaggtaatattgtatgtggttaatatttgcattactgtctgcaatatttgcagcacttacctctatactggcaaaggtcggcatagatggagtcaactcaaatcttgcaacagctatcagaactgttgttgtggtagcaatggcttggggaatggtatttctcacaaatgcacagagtggaattgctgaaatcagcaaaaagagttggatttttcttatattatccgggcttgcaacgggtgcttcgtggctttgctattacaaggcattgcaagtgggcgaagcttcaaaagtagttccgattgataaattaagtgttgttattacattaattttggcatttatcttcttacatgaagaatttactgcaaaatccctgattggatgtatgctgattacagcaggaacattgataatggttttataaatctcagtttgccgggcagacaggcaactgaaaaccacacaaaaaacgaggaaacagccatggtactttattttacgggaaccggcaacagccggtatctggcgcggcgcattgccgaaaggctggagatgccgctttacgacctgaacgcctgcatcaaggcagggaatcccgccccggtgcagaccgggcgggacgtggtgctggtgacgcctacctacgcatggcgcatcccccgggtggtgtccgagtggctgggcaagaccacgctgaccggggcagagcgtatctggtttgtgatggactgcggcagcgagatcggcaatgcggcaaaatacaaccggcagcttgcagcacaaaaacagctgcagtatatgggcacagcccagatcatcatgccggaaaactacattgccatgttcaatgcgccccaaaaagagcaggcacggagcatcgtggagcaggcagagcctgcgcttcaaaaagtgctgacccagctcagagccgggcaggaatttcccccgccgagagagaccctctacgaccgccttatgagcggcccggtgaacccggtgttctatcgcttttttgtaaaagcggaggccttccgggcaacggatgcctgtatcggctgcagtaagtgcgtggagttgtgccctttgaacaatatccatctggaaaacggagcgccggtttggggcaaaaactgcacccattgcatggcctgcatctgctattgccccaaagaagccatcgagtacggcaaaaagagcaaaggtaagccccggtatcactttgaagcactggaaaagcagcaggacgtatgaagaaaaacgatgatggtaaaaagcagatgaagtatttatacttacatggattaggacaaaaaccagacagttgggacagagtaatcaaagaaacgacggtttcggacaaaagcgtcagcttgagtctggcagagatgctggaaggaaaagcggccacctatggggaactgtatactgcattctcagaagagtgcaacaaggaaaatgacgaaatcgttttatgtgggctctctctgggtgctgttttggcacttcattatgcaatagaccatccggataaagtaaaggcactggtgctaattgcagcacaatacaaaatgcctaaaaaattattgaagttccagaatatgctgttccgctttatgccaaatgcaacgttcaagcaatttggattcaaaaaagccgatgtgatcagtttgtgcggcacgatggcagaattggatttcagagatttattgtgtaaggtgtcctgtccggcattgatcgtttgtggcgaaaaggacaacgcaaacaaaaaagcctcaaaggaacttgccagttatttgagcgattcctgctatcgtgaacttttgaaaacgagtcatgaagcaaacatagaagctccggagggattagcggcagtgttacagagattttatgacaatattgaatcaatctgatttatcaaaagagagacgaggactgtcaagcaaactcgaagaacaggcagtgcaggcgattgcttggaaagcacctgcggtacatgaatcggcgcggtgatggcggcgggcaaccggcggacgaaaaggcagagttgtctttacgagaacaaacctattgacatggtgcgaaaatgggtttatactatccccaacacaaggaaagggagcacaggcagatgaaacgtacaacagatgcccggcacaggctgcccgggcgaatgcgctgctcccagacaaattccaggcagacagactgagaaaaaacaggaagatgccgttgtctgggagaagtgcccgaatatacatcgtcacaataaaaggagaaccgacaatggctgattataaactgtggaacgcactgaagaatgctaaaaaatatcgctgggtggaactttctcactcgctgaacaacgaaagcccctactggtccggcatcccggaaggctctgtggagttggcaaagaccgtgtgggactggggcaagccggaactggaatgcctgatccagaccttcaaattccccggacagtttggtacccatatcgacttcccggggcacttcatcaagggcaaagcattgtccgaaaagtacgatgtgaatgacctgattttcccgctggtggtcattgatatttctgagcaggccaagaaagacccccgctacgctgtgacggtggaggacatcaaggcctatgaggcgaagtacgggcccatcccggatggtgcgctggtggctctgcgcagcgactggtacaagaagtggccggatatggatgcgctgtccggcatcgacgcagagggcaaagaaaatgcccccggctggtcgctggaagcactggagtatatctacaaggtgcgcaacgccgccgccaacggccacgaaacgctggataccgattcctctgcggtggcggaggaaaagggcgaccttgcctgcgagcgctatgttctggacaacgacaagctgcaggtggaggtgcttgcaaatctggataaagttcagcctgccggtgcggtggtcatcgtttcttatccccgcatcgagggtgcaaccggtctgcccgcacgagtctgggccattaccgaataagagcggagaagtgggaaaatgtcctttgaaaaagcaaaagcagacctggaggaaaaaggcttgggagaccatgtcattgtgctgaacgagttctcggcaaccgtggcagaggcagcccctgcactgggcgtagagcctgccagcatcgccaaaacgctgttggatggacccttttaagattcgcagagtaatgccggcaatattgattccgtattgcagacgtaaaaactgttgaccctgcgattgggctccagctgcaataaaaaagggcaaggccgcctgatgccaagcgaccttgccgttttgtgttatattttacaataaattaggcagtttcccgtgtattcacagcgccacattgaccggcaggacatatacgccgtcggcggcgtagaaggtgatctgagtaatcgtcttgccgatgatggatgcaaagtaaggatcatcggcgttgaagcccagcttggtaccatgccagatgttggtcacatgatgcaggccgtactcactgccatcggcggtggtcagaactacgccgtagaccttgttggccttgtagtccagatcaaaaccggagagcttcatctcgtaggtggcgtggtgaccgttggtgttcagctccacagtggtgccctctacggtggtctcggtggcgtggaccttgccaaactcccacttgccgctcagcaggttataccatgcggtgatgtagtaggcaggggtctcactgagcttgtagtaagcgtagctctcgttctcaaacaaggcatctgcgccggtgtaggtggtggtggattccttgcccttcagggtaacggtaatgtcgtagctgtcggcatcggtgacctgctttgcgttcttcagcgcccacggggtcagcaccttgaccgggaaagaaacgccggtgatgtcggagccgtctgcgttgacgtggtaggaaccggcggcaaggttgcctgcacgggtcttgttcttggtggcgctggtcacagcgtcgatctcagatgcgttgtccacaccggcagccttgtagaagtcggcgtaggggatgttcatctggacatagctggaggactggccgttctcctgctccacctcttccgcagcaaaggccgggactgccacagcgcataccagcatagcggccgcaagtgcacctgcaaatacttttttcaatctcatgataacacacctctatctcggttttgaaaaaacagttagctttacctaacaattaatgcaaaaaatacagggtcaaaacccctcagatagttaggcaaaacaaattcgcaaagtaaaaatagcactcccaccgggcgttgtcaagcagaaaccggaaagtttgcagaggtgaacttttcggtgcaggaaacgatctgcactttttatgtcgcaggggcagcactccaacgttggcacggtatttttcgcggtgggcttcagcgtgatgatggtgctggacgtagcactggggtgacggttgggggttcccgaaagcgaaatctttttcggaatcttcgaaaatgcctaaactccttgacagaggcaacagcagggcgtattattttggcagaaggaccgctgagaagcggctttttatagaacagaaagttagctttgcctaacttgcggcacaaggaattgctggcctgtcatccggtgcagtgggcgcatctggtaaaaagcattgtattgtgaacggtaaacagaaagagggtggcattatgtccttttttgaaaatacccgaaagcccgtaggccttggcgggaagatcatggttgctatgatgaactttggacacagcgcaatggcagaatgggggctgagttttttacagcctgccccggatgccatggtgctggactgcggctgcggcggtggagcgaacatgaaaacgctgttgaaactgtgccccaacggcaaggtgcagggcatcgactactcagccgtcagcgtggaaaaagcgcgaaaagtcaatgccagagccattgcggcaggacggtgtaccgtgcaacaggcaagtgtggcagagctgccgtttgaagcggagcagtttgatgtggtgactgcctttgaaacggtctacttctggccggagcttgcacagaatttcagagaggtttatcgagtgctgaagcccggcggaatctttttcatctgtaacgaagcgaatggcgaaacgacaaaagacgacaaatggacgcagatcatcgatggcatgaccatctatacggatactgcactgaaagagtatctggaacaagcaggattttgtcagatccaaagccataaaaataaaaagggctggctttgcgttacggcgcaaaagcggtgaagtagtgcaaccgtaacacttggaacagggaagagcatggcatggtttgcctgccggaaagcagaataaggagaacaggaagaaacctatgaaatacaaaatcgagaaaaacaccgtgcaggagacattgatcctcccactgtattcccggaagctgtgtaccgagctgtacccaaatctttatcgggacgagacggcggtgcgcttgctgagcgagatcgactacgacttttcgcaggcagagaaaaactcccgcagcctgatgcagcgctttggtgcgctggaggtcgccatgcggcagaatgaccttgcctttgaggtgcgggcgtacctgaaaacgcatccctgcgcggcggtggtcaatctgggctgtgggctggacaacaccggcagagcctgcgacaacggcagatgcaagatctacaatctggactttcccgatgtcattgccttgcggcagcagctgctgcccgccggggagcgggagcaaaacatcccctgcgacctgaaagaccccgcatggtttgacaaaatcgatgcatccggcggggcggtgttctttgcctccggggtgttctattacttcctgacccagcaggtcaaggcgctggtgcaggggatggcggacacttttcccggcggggtgctggtgttcgatgccgccaaccgcacggcggtaaagatgatcgccaaaacgtggctcaggacggcgaaaatcaaggatgtgggagcatatttcgcggtttcggatgcgaaaagcgagctttccccgtgggacagccgtctgcaagtgtccagccgaggctatatgatgggctacaacgacctgaaagacccttccgtcagcggctttttccggtttctcgccaaggtcggggacaacgggatgaaaatgcagatcgtgaagatcggatttggagacagacaatgaaatatgccgggatgcctatggggatgtgggtgctgtttgccggttcctttcaaaagcagccgaccgcagcccctactcgtggaacagtgttctgcatatagcagcaatatgaaagcagtatttcacagaggggcattatgaatctataatagtagttggaaataaacagaaagagggtctttttgatggcaacgatatttccaagagaagaaaaggcagaggcactgttcggggagatcctgaaaaatccagaagcctgccaccgcctgatggataccttcaacgactcgctggacatggcagacgtactggatgcgccggccgtgagtgcacagcagtttgccgcggcgctgttcaatgcctacgagaacaaggatctgtctgcctttctgatggcgatctgccagcacagtatgtttgacctgctacggaacgctgccctgatcccgttcaaattcaacgccgatggtcagccgaacccggtgatcctgacggatgatgccggcgttcttttgccgaacaacaaagttgccgtgagcagcaaagtatacgaccggttcacccgggtgttccagaagcaggaaaaggtaaaaatgtaccttgccagcggctactgcaagtatcacggctacgacgaaggctcgatggatgtggtggagtaccactacaaccagcatttggggctgctgctgatctacgaactgccggacaccgtgaagcagaaagtaacggaagcggaggcctactccaccgtctgggacatccagatgaagctgcagcacgcactgccccgttccgtggtctactatggacaggatacgctcaaggacggcggaacccgctacgatgaacttggcgtttttctgccgctggaacactttgccgaccggctggaacgccatgtggaaactgctaccaagatcgtttacggcgagtaaacgccctgtaaacgaactccctttataagtgcatcacagcaaaacaaaacgcagcgaaccgttaaatgattcgctgcgttttgccttataagggagaatggaactgctgcacatcaggtgcaataacggaaagtcttgtcagtgacaatacgggcgaagatcagccctaacggcagtgccacgatgatgagaatggcatctgcaaaccatgtggcggagtccatcagagacaggatgcccagattatagatggcacggtagaaatacagtcccggtaccatgataacgatggacggcacggtgacggagatgcggggataaccgacggcgctcttcaggcaggaggccagcaatccggacagcagtgcgcccagaaacgctgcaatagcgggcggaaagcccgcaaggctcaccagctccagccggaacgtgttcgttaccgcaccgataagggcggcgcagactgccaggttccggggactgttgaacatgagcgaaaagccgaacacaccgccaaaacttgccagcagccggaacacgatctcttccgggagtgtcaggctcagggcagggaactgcaccggctgcaaatgcagcagcagtgccatgatccaagccgtcatggttgccaccagaatgatgaggacggcgtaggccagacgttccagcccggagcgcatatccagcttggcaaggtcgatgccgctggtaatgaacggaaagcccggaatgatgaagagcatggagcagatataccccgcctcgtgctgcaccgatacggcaaacagcacctctgccagcttcagcaggatgtcatacacgaggcttgcggaacagaccgacgccgtaatgcccagaaacagggtgaaatggtgttttgtcagcttgcaccgtacaaagttgccgatgcctgcaccgcagaaagcacacagcatttccacaatgccgccgccaagcagaaaggtgaagcagccgcaggccagtgcagctgcaaagcccagtgcgatgggcgaatacaagccgtggatgcgctcgatctcatcgaggtggctgtgcagttcttcgccggtcataaattttccttcccggtcgaagtcgctgacgaaatgctccagtcggttcagccgggaggtattcacgcccgtatttgtcagacagagtgactgggtataacactggtcaccgtcaaagcaggtgaactcaatggacaacaggccgatgtctgctgttgttgtgactcccagctcccgcgaaagggtgttcatggagcttcggacacgccatgcgccggtgccgcattccagcagcatcagcccggtgcgtccaatgacggaagctttttccacaagccccgcctcggtaatggggacgcccttgctggccgaagcatagtcgtgccagtagacttccatgtgatttttgatgatctcactttgccgttgtcccat

SEQ ID NO: 507 - DNA, 5534 bp, unidentified
  source 1..5534: mol_type = unassigned DNA
atgtttgtaggaacatggtggtcactgatgccgcccattgtggcgattgcgctggcactgttgaccaaagaagtgtatttgtcattgtttgcggggtgtgcccttggcgcactgttgacggcagaattccacccgtggattgcgtttgatacgctgtttaacacaatgatcgatagtgtggatttttccattctgatgttcatgatccttttgggcatgatcgttatgctcatgcaggaatccggcggcacccgcgcttacggtgaatgggcctccagccacctgaaaagtaagcgctccgctttggtaacgacctctctgctcggtgcgctgatttttgtggacgactacttcaactgcctgacggttggctctgtcatgcgccctgtcacagataagtacaaggtttcccgcgccaagctggcgtatatcattgatgcaaccgccgcgccagtctgcatcattgcgccgatttcttcctgggcggcagccgtcaactcttacgttccggcgggcagctccatgtccggttttgaaatgttcgttaaaaccattccgttcaacctctatgcaattttaaccctgtatatggtgttcttcacctccattgtaggcttcgatttcggcctgatgaaaaagcatgaagagaacgcggccaaaggtgatctgttcacctccggcggggaagagttccagaaccaggaaacaaaagacccgaccgagggcggcaaatacgccaaaggcaaggtcatcgatctgattgcgcccatggtcgtcatgattgcaacggcaatcgcagctatgatctggaccggccacctgaacggcggccagaatctggtggaggactttgccaactgttcttcttcggaagcgttggtgtttgccggtttggtcacagtgggattcctgctgcttctgtatctgccgcgccgtgtcatcggcttcaaggattttatgaattccgttcccgaaggtggcaagcttatgatgcccgccatcctgattttagtgctggcctggactctgaaaggtatgacggacgccctgggtatcggtacctttgtacgttcggccatcaatctgaattccagcctgatgaactttgtgccgctggtcatcttctgcattgcaatttttattgccttttcttccggcaccagctggggcacctttgctatttttgtgcccatcgtggtcaacatgtttgctgaactggacccgaccatgatgatcatttctgtagcggctgtcctggctggtgctgtctgcggtgaccatatttcgcctatttctgatactaccatcatgtccagctccggtgcccagtccaaccatatcaaccatgtgcaaacccagatgcagtacgcctttgtggtcattgccgtgtgtgctgttggctacctgatcgccggctttaccgaaaactggtggctgaccctgctttgctcgctggtgattttgaccggagtgctgttggagataaggaagagagaaatgtgcggccgataaaccatactgacgtagcatcatcaaaaagaacttgttttgcacactatatggggcactaaaaccggtcgtgttttacagttatatgaactatatatgaactaaaacgccgaacttttggcccctgcggcacaaaattggcacaactttttcagaagttatgaggagatggcggaaaacaggagaaaacaatgagaatccatgagtttatcacctgcttcgtaaaactgttgttgagtacccgatgcagaggggccggtcttctttacatggctgccgaagatgtttggtaaaagagttgtagttaccgtccatggaacctgtgaaataatgttagtaaccagaaaaaatcctgatttcatgcgggtttgcgcggcttgaccttttttaccttaacttgtttctgtttaccatggtgcgttgcgttccggcgtgatttcgggggttagtggcttctggttgcgctctatacttaacccaccacagcgaaagctgatagagcagaaaacagaataaggaggtacgaggataagcctgcgtatagattgttactgcaatctgtatacaggcttgttgttgtgctgtgaggtaggaaaggtgagtagtgaaagatgagcatgacaatttaaggaaaagaactgctgggattgtgtataagcctaggacaagaatagaaattatggaatgacggttggagagaagtaatggaagaaaaaatcagacttgcggttttcggacagaaacgtctttctcgtgaaggcggaatagagattgttgtaaaagagttatgcacccgaatggcacagaatggttgtgatataacttgctacaatagagcaggccatcatgtgagcggtgcagagtatgacaaaacaattgaatatgatggcatccgtcaaaaggttgttccgactattgagaagaagggggctagagatataatagggtcaaccaagaaaacctacgataactaaatggttttgacggcttgagttgtccttcaaatgttttatttgttgaaaaactgcaagaagcgggaaatcctgagggttatatgtaggtggcttttggaagctctgttttgacccacaaaaaggagcagcaaataaagattgcaggagagttcaagcctacggtggattgcctttgtgcgatccgccgtgggtttgttgctgtttatatagaaaaagtgaggagtgcagaatgtacatgaatgacggaaataaaacgaaaatcaatctgagaaacaagagtgtttttatcacgggtgtagctggttttatcggttctaaccttgcaaagagactgctctccacggtggagggtgtcaaggttgtgggtctggacaacatgaaccactattatgatgtgcgcctgaaggaagcacgtttgaacgaattggagcagtttgacaatttcagcttcgtaaaaggtaatctggcagacaaggctgtgatcgaatctatctttgagcagtataagccggaaatcgtagtgaacctcggtgcgcaggcgggtgtccgctattccattacgaaccctgatgcctatgtggaagcaaacttgattggcttctataacattctggaagcctgccgccattcttacgatgaagggcatactccggtggaacatttggtttatgcgtcgagttcttccgtatacggcagcaataaaaaagtgccgtacagtacggatgacaaggtggataacccggtatcgctgtatgcagcgaccaagaagtccaacgaactgatggcacatgcctattctaaactgtacaacattccttccacgggtctgcgcttcttcacagtatacggccctgctggtcgcccggatatggcgtacttcggctttactaacaagctgctgaaaggcgaaacgattcagattttcaactacggtaactgcaagcgtgactttacttatgtggatgatattgtcgagggcgttgtccgtgtgatgcagggtgcgccggaacgtaaaaatggtgaagatggtctgcccgttcctccgtatgcagtttataacatcggcaaccagaacccggaaaatctgctggactttgtacagattttgcaagaagaactgattcgtgctggtgttctgccggaagattatgattttgaagcacacaaaaaattggttccgatgcagcctggtgatgtacctgtgacctatgcagataccagtgcgctggagcgtgacttcggatataagccctctaccagtttgcgcgaggggttgcggaagttcgctgagtggtacgcaaagttctacaaataatgaagaataggaaaataaaccgatgaagtgtgttgaggtttacaaggaattatatcatcaggaaccgtttgatgtggcgttctgcccgtaccgcatcagtccgctgggtgcgcatatcgaccatcagtacggaaaaatcaatggtttggcaatcgacaagggaatccacatggcctaccacccgaaacagaatggtgtggtggagttgcagtcgctgaacttcccgaagcgtgcccagttctttgtaaatgcagtgccggaagaaaagcagggagactgggctgatcatctgcgtggtgcggcaaagatgctgggagaaaagtaccgcctgaaagttggtctgtctggcattatcgagggtagcctgccgattggcggtttgtcctcgtcggcttcggtcattatttgctttttgtctgcactgtgcaaagtgaatggtatccatctagagccgatggagatgattctcacggcgaaggccgcagaaaaccagtatgttggtgttgcttgcggcaagctcgaccagagctgcgaagttctttctaagaaaaaccatctactgtacctcgatacgaaagatgacagctatgaactgatccctaccagtgagaaaatgaagccttataaggtggcaatcttcttctccggcttggagcgttctttgaaaaactctaagtacaatctgcggcaggacgagtgcaaggcagcggcctatgcactaatgggctatgcagggatggactatgacacctttgcaaatacccggctgcgcgatgtgccgtatgaggtgtttgaagcctataaagaccgtctgccagaattgtggcgtagacgcgcagaacactattacagcgagtttgctcgtgccgaaaagggtgcagaactgtggcgtaaaggtgatttggaaggctacggtcagctggttttcgagagtggcaaatcttccatttataattacgagtgtggctgcgatgaattgaaaaaactgtatgaaattatggctgacactgatggtatctacggtggccgcttctccggtgcgggattcaaaggctgctgcatggcgctgattgacccagacaaggccgaagatattgaagcaaaggtcacagcagagtatctgaaagcgttcccggcattggaaggtaagtacagtttccatctgtgcgagagtgccgatggtgtggaactgtaaggagaatacatagatgaaatgtttgattttagcagcgggctacgctacacggctttatccgctgacggagaattttccgaagccgctcctgaaagtgggagaaaagtccatcctcgattggctggtggatgatttagtggataccaccgatattgacgaatttgtggtaatttccaaccacaagttcgcgcagcattttgaggattggaaaagcaataagcaaaagacgcggccttatgagattactgtaatcgacgatggcacaagcaccaatgaaactcgtctgggagcagtcaaagatattcagctggcggtggaaaagctgaatttagctgatgatttgctggttatggctggcgacaatgtgctggatttcagtctttccaagttcgtggagttcgcaaaggaaaaggatacttcctgtgtgatgtgccatgtggaaaatgaactgaaaaagcagcagaaaacggcgattatcacgttggatggcaatgacctgattaccagctatgaggaaaagccgaaagagccgaaaggaaat

SEQ ID NO: 508 - DNA, 24071 bp, unidentified
  source 1..24071: mol_type = unassigned DNA
  misc_difference 1585: note = a, c, g, or t
  misc_difference 1586: note = a, c, g, or t
  misc_difference 1587: note = a, c, g, or t
  misc_difference 1588: note = a, c, g, or t
  misc_difference 1589: note = a, c, g, or t
  misc_difference 1590: note = a, c, g, or t
  misc_difference 1591: note = a, c, g, or t
  misc_difference 1592: note = a, c, g, or t
  misc_difference 1593: note = a, c, g, or t
  misc_difference 1594: note = a, c, g, or t
  misc_difference 15309: note = a, c, g, or t
  misc_difference 15310: note = a, c, g, or t
  misc_difference 15311: note = a, c, g, or t
  misc_difference 15312: note = a, c, g, or t
  misc_difference 15313: note = a, c, g, or t
  misc_difference 15314: note = a, c, g, or t
  misc_difference 15315: note = a, c, g, or t
  misc_difference 15316: note = a, c, g, or t
  misc_difference 15317: note = a, c, g, or t
  misc_difference 15318: note = a, c, g, or t
ttaaccaagatattgcagaatttccttagcatgcggtaaaataatatccggcttaatagaaccgttttccacatcttccatggttgcttcacctgtcagcaccatcacagaaagaatatcattgttcaggccaaaggcaatatcagttgccaggcggtcacccaccatagcaatttcctcttttttataaccggttttgtccaaaaccacatccaccatatacttgtaaggcttgccgaaaatcagctgtggctttttgccggtagcagttttaatcagctccagcatcgcaccggtatcaggaatgaattcaccgccttcaatcgggcagcgcacatcaggatgcgtagcaacgtacggtacacccttgtcaatcaggcggcaggcggtagtaaggcggtcataggtaagtgtctggtcaaagccgacaactacataatcagcgccctcctctaatgtatttgtcagcgtaaaacctgcttcctcaattgttgccaacagctgcggcgttcccagcacaaacagcttcgcgcccggcttgttcttctgcatccagttggtcagtgcgtctgacgaaatcaggatgttctcacgtgtaacaggcacgcccagtccgttcattttctgcacataatgctcgtggctacgggaagaattatttgtcagcagataatattccttgcctgctgccttcaatttatcaaaaaagccctccatacccggaatcagttcgttacccaggttaatggttccgtccatatcaaaaagaaaacacttaattttcgctaagcgagcgtaatcataagtcatgctctatcctccatacttaaaatataacaatattataaagcatttgccttatttgtgctacaatagacgaggaagaaaatctgaagttcaaaaggagattaatcatgaaatatacaaccattatttttgaccttgacggtaccttactcaacacattggcagatttagctgctgctaccaaccatgctttggcagaacataaactgcctcagcgcaccacagacgaggtgcgcctgtttgtcggcaacggcatccgcaagctgattgagcgtgcggtaccggctgacaccccggcagagctgcaggagaaggtctttgccagcttcaacaaatactataagcagcactgcgccgacaacacccgcccctacgacggcgttccgcagcttttgcagcagctgcgcactgcaggctgccgtacagccattgtttccaacaaagcggattacggcgtacaagcgctggctaagcaatactttgacggccggctcgacgctgcctgcggcgaacgcgccggcatcgccaaaaagcctgcgccggatatgctgctggcaatcatgcggcaattaaaggctgagcccgcaagcactatctatatcggtgattcggataccgacctcgacaccgcccgcaatgcaggagttgcctgcatcggcgcctgctggggcttcagaggccgtgcctttttggaagcgcacggcgctaagctgctggctgaaaacgttggcgatatttgggagcttataaagtaaaagaggctgccgagatcggaagnnnnnnnnnntgccgtaaggcagccccttttttataactattttacgctaagcaatcatccataaatttaatcagacctgcttctacttcatcgcgcaagcaaagctcattgtgaatttcgtgacggaaaccgggatacggctttacagaaaccttgtgtcctgtttttgccagcagattggcaacatgatacaagccctcgccgtaattgccgcagggatcctggtcaccggcaatcagatagctgggaatattttgcggcaccttggcagcccactcatcattttcaatataatgatacaactgcacgaaatcatagcacagctccagcgtagtatcgaaggtattgaacatatcacctgcatgatcctcaacaattcgcggatctgttgcaatccagtctgccggaccgttgggattttccactctgtccgtcatgccgcagaaaacacgctcaaaccaaacaccgcaaggctgatacggatctgcctcataagcagccttgaattctgcattaacataggcatcctcacagccctgccactgcgagcagacaccgcacagcatcatacctttgatatcctcaccgtagattgacgcataagcacgcgccagcatagaaccccagctgtgaccgaaaacaaaatacggcagctcgggatatgcctctttagcaatatcatgcaaagccttttcatccttcaggtaagtcatatagccgccggaatgcgggtcacctaaagtgcctccgtcatagcctgttttgccgtgaccgagatgatcatcagcaaacactacaaagcctgcttcgttgaacttgctgatcatgtgcagatagcggcgtgaatgctcaccatagccgtgaatcagctgtacaacagctttcggtttacctaagggactgtaggagcaagccttaatggtatctctgccgttggcagaagggaaggaaatttctctgatggacataatgcggacctcctcgcctgtaattatttataatattaagataatgataacacctgcatttcctgctgtaaagcaataataacgcccggaagaagcttttacatattttttacaccggtctgcctttcgcatgtcccaggacttccgaacaacgcatacaaaaaaccactacaacaattaatttgttatagtggcttacaaaaatctattttaaatttcacggttcggctaagcaactaactgctttgccgctgctatttacattcagcggcccttatttatttttaagcacatagaacggatcgatattctgtccgtctgccaatacctcataatgaatatgaggaccggtgctgtagcctgtactgccgacaaaaccgataatttcacccttgataaccttctgtcctgcagcaacggcaataccgctcatatgtccataggctgtttcgtagccattgccatgatttatacgcacatagcgtccatagccaccgttccagccggcctgttcaatcgtacctgcagccgtagcataaaccggtgcgccgaaatcaactgctatatccagaccaggatgccaatcatacccgccctcaatcggaccggtgcgcacaccgtaattactgctgatagtgccgccgtcggtcggccatttatccgggaaggatgccatcccgccaccggagccttcaacctcactcaaaagctcactgacagattgcttggtaccgtccagcatctttttgatattggcattttgcgctgtcagcactgccatagtcccggtgatatccattttagcaggcccgcccttgcctgtataggatgtattcgcagaactttcctttgctgctgttgaatcaaccatactggtaccttcgcccagctttctgctgtctacatcacggataacagcacggcgcagctttttctccagattagagatttccgccatatcgcgcagcattctttcgttatcctgcaacagcttctgcagctttgtctgctgctcagccttgttttgcttatatgcagcataatcggttgcttcgctgcgataatccgccagctgatgatataaatagccggctccgccgactgctccgacaagcaccaaggcagtaacagcaatgcctgccttgagcttagcatacgaaaactttactaccttgccgtttggcaagcgcagctcacatttcctttcctccattattttaattacctcacttgaaaagaccaaagcgttggcctactgccaacaatctgcgtcccacaaagggcacgttgtccaaatcctctttattcagaccaccgcaggcaagcagcgccaatgcatagacaggaacagctgccgccatagcaaacagcacacaccacatacccatgctttccgtaagcatcagcacgccgtaaatcgccgcgcccataacaccggaagcaaagcatggacggataatgctgccaacagagaagctatagcctgtcagcttgtaaataaagcccatattgataatcgctgccacggcaaaatctgctaccgtcgccatcgacgcaccacggatgcccagctccggcacagcagtaagataccagctcataacgatttttacaatgcaggcaataatcatattgattacagggattgccgtgcggccaaggccttgcagaatacctgtactgatctgatgcatacctaaaaacagaataccgatgctcattgtctgaatcgcaggcgccgcaccgggagcgttatacacaagcgccgcaaccttttctgccagacaatagaggcccataaagcacgggaaggtgataatcattgccacgcggaaggcaatgcggattttatcacggatagcatcaaagctgctcagcgcacgcgattcggaaatagacggcaccagactgatggtcatcgcagcagtaaaaattgttgccagattaaccagcggtacagccataccagtcagataaccgaacagctcagtcgcatgatgaatattaaagccggctgcttccagacgctgcggcacaatcaaaaggtccagatttgcacctatcggcagcatcagactggtaagagaaaccggcaacgccaacttcagcagacgcttgatgatatgtccggcgctttctaccggcgcactgtcatcctgctcagccatttccttttgcagacgctgcttcaggcggcgatagaaccacatcagcaccaaaagtgcgcagaacgcgcctacaccggcacccatgctggcaccgcctgcagcgaacgccagaccgtacggcatgaagaggtcggcaaaaacgagcatggtaataacacgtgtcagctgctcgacaatctcactgaccgccgtcggcgtcataatctgccagccctgcagataaccgcggaagctggccagaaaggttacgaagaaaaccgcaggcgccagagcgataatagaataatacgcacgactgtcgcggatgatatggttattaaccagccagtccgcaccgaaaaacagtgaggacgaaaacaaaaggcccgtcaacagcagcactcgcagcgaaacattaaagactcgcttggcaccgcggtaatccttgtttgccaatttttcggaggtaataatcgatattgccaccggtacaccggcacttgatacggttattgccatcagatagattggaaagcccatctgatacaggccgataccttcgccacccaatacacgtgataaaataatccagttcagagaaccgataaccttgaccactatactggaggccgtaaggattaaggttccctttaaaaatttgctattcgaagctttagaatctgcgctcataaaatccccttgtttatagataaatatacattataattatcctcttttccgcgtgattttacaagtacttttaacacatttgtcataaacacatcactgctttttgcttgcataactatctttatatgctaaaattaagttaagaccaaaattatgttgtaaaaggagcgatgcaaaatgaaatccacacatgctttattagctttcggtgcagcaatctgccttgcaagcacctgcagcctgagcgcctatgcttctccgctgaagaattatgacgcaggcaaggttgctattgatgcaggcattactctgccatccagtcttaaaggtgacaactataaattcagcaaatccaacagtacctatcttggcgcaactgtcggcatcggccaaaaaactgctttaaactacaaatggaataattacaaagcagacgaagccaaaacccgcgcccaacaattcaaccttatgtataaggttctgccgggtatttccgcttacgcaggttatctgaacgctgatacctccggtgactttggcggtaaaaccaaaaactccggtcaaatcggtctgcaggctgcctatgatattcccgcactcttcactgtttggggaaatgttggctatggcaacagaaacagcggctatgaaatcggcatcagcaagcctattctgaacaacctggaggttaacgcttcttactacaatcagacatttgatgatgcttttggcgaagacctcgacatgaaggctaaaggcgttaatctgggcttaactctcaaattttaatttgtcagctacggctaactaaattaaaataaaaactaacggataattattattgacaactgtgctggcctgtgttattatataagtgtcaagggcacacaagctgtgcaagtcaaaaataaaattaagcaatgcaatataaaaacatggagggaactaatatgaaaaaatttgtatgtcaagtatgtggttatgtatatgaaggcgaagctgctccggcaaaatgcccgcaatgcggcgctcccgcttccaaattccaggaaatggctgctgaaatgggttgggctgctgagcacgttgtaggcatcgcttccgacgttcctgaagatatcaaagctgacctgcgtgctaatttcaacggcgaatgttccgaagttggtatgtacctggcaatgagccgcgtagctttccgcgaaggctatccggaaatcggcctgtactgggaaaaagctgcttttgaagaagctgaacatgctgctaaattcgcagaactgctgggcgaagttgtaaccaactccaccaaaaagaacctggaaatgcgtgtagaagctgaaaacggtgcaaccgcaggtaaaaccgacctggctaaacgtgccaaggctcttaacctggatgctatccatgacaccgttcatgaaatggctcgtgacgaagctcgccatggcaaagctttcgcaggcctgctgaaaagatatttcggcaaataatcagccaataaaattcaaaacaaaataacgaggctcccgctgagtaatcctaaaggattacggcgggagctttttcggtttttaacagccatttacttttttggccggaatcattccgcaaatcttcttgccttatgtactttcttatgtttttcacacttaaaaagccttcaatatctttataaattgcttcagatatgatattatataaaggttaggaaacatatttaatgacactcattatcacgttcctataggtggttaattatatgcttattaaaactaattttcattatcctgctatgctgcgtgtaacaggcaaaaactgcgtaatcatcggcggcggtgctgttgctgcccgtaaactggcaacactgctggctgccgaagctaaagtaacagttgttgccccgcttttctgtgacgaggtgcaaaagctcgcctcagcgcatggatgcacgctcatcaaggattactacaaaccggaatatctgcagaatgcatttgtggttattgccgccacagataataaggctgtaaacaggcagatttcagaggctgctccctgcctcgtcaataatattaccgaacccgagctgagtaatttcactgtcccctcagctatcagcgaaggtgatattactattgcgttggcaacaggcggtatgcctgcttttacacgcctgctgaaaaaacagttggaacacattctgacacccgagctggctgacttcaacagctttctgctgctgcagcgtgaagctgtcaaaaaaatcgaaagtacgccacaggaacggacgcaattctggcgcagtgttttgacacaggatttactaaatttagttatggcaggtaaggctgctcaagcaaaggagaaggtattagatgcagttaacagttttaggactcaatcacaggaccgcccccgttgagatccgtgaacgtttcaatttttccaatgacagggtggcaagtattctgcgccgcctgcgcaattacgataatattcccgaagccatgctgctttccacctgcaaccgcacagagctgtacatggttatcgaaaatccgcatgaagcaattccttttatcaaatcattgctcaagcatttagcaggtgaacattaccaaagcgattatttttacaatctgaacggaacaaattgcgtcaagcatctgttccgtgtagcctccagtctggactccctgattgtcggtgaaggccagattctcagccaaataaaaaatgcgtatcagattgcccgcaataacggtatgacagatactattctcaataccatcatgaataaggcaattgccgtcggcaagcgcgtgcgtaccgaaacaaagattgcttacagcagcgtatccgtttccagtgccgctgtcgacctggccatcaaaattttaggcgacctgagcaaggcgcagattttggtagtcggtgccggtcatatgagtgagcttactgcacagcatctgttggacaagggtgcgcagactatttgcgtcagcaatcgccactacgaaagagcacaggacttggcaggcaagttccacggtacggctattccctaccgtgccatgttcgagcatgccgctgatgccgatatcattatcacctctaccggtgcgccgcattacgtgcttaccgtagaaaatttgggaccgctgctgcccaagcgcaacggcagaccgctgattctgattgatattgccgttccgcgtgacgtcgaccccagactggccgatgttgccggcgtaactatttataacattgatgatctggaaggcgttgttgataccaataaaaacttccgtgaaaaggaagctcacgttgccgaacagattatcagcgaagagattggtgccctcaaggagcgtctgcgttattacacaatgcgccctgttatggtacagctgcatgataaaatgaatttcctgcgccagaaggttttgaagaaggcctttattaaaatgccggagcttaccgaccatgaaaagcgcattattgacctgatgacccaacgtctggagcataaattcctgcgcgagcctatgaaggctatgaatgctgtagcaggcaccgcagaggaagaacgctataaaaagatgatgtgtgatttatttttattaaacgaaaccggagaggagtttggtgatgaaagcaaaattgacgattgggactagacaaagtcttttagcgctttggcaaagcaatcatattgcagccttactgcgcaagcaataccctgaatgtgaggttgtactgaaaaaaattgtcaccaaaggcgaccgtattttagacgtacccctggcgcaaatcggcggcaagggtttatttaccaaggaaattgaagaggatcttttagacggtactattgatttggcagtacatagtctgaaggatatgcctaccgttctgccggaaggcctgtgcctgacagcaattaccgagcgtgccaacgtcggcgatgcttttgtcagcaacaaatatggcagcttcgaagaactgccgctcggcgctgtagtcggcaccagcagcctgcgccgcaaggcacaactgttagctaagcgtccggatctggaaatccgcgacctgcgcggcaacgttgatacccgtctgcgtaagctggacgagggactgtacgatgctattattctggcagctgcaggcttagagcgtctgggtcacggtgaccgcatctccagcctgattcctgctgatgtctgcctgccggctgtaggccagggagcattggcaatcgaagcacgtaccgaggataaagaagtacgcgatatgctgagcttcttaaacgacctgaccaccaaacaggctaccgatgccgagcgtgccttcttgggcttactggaaggcggctgtcaggtacctatcggcgtacatgccgacgttgaaggtgaaaatattcgcattgaagcaatcattgctgccttagacggcagcactattctgcgtgatacaataaacggcaaggctgatgacgctgtcagcctcggtcaacagcttggcaaaaaaatgctggctgccggcggtcaggaaattctggcctctattctttaaggagagtgaaatcatgacaaaacaaggtaaagtatatttaatcggtgcaggccccggcgacccgggacttctgggactcaaggctaaggaatgcctgcagactgcagacgctgttgtttatgaccgtctggcagatccgcgtattctggccttcgcccgcaaggatgcagaaatggtttatgttggtaaggccagcgccaaccacaccatgcgccagcccgatatcaacaagctgctggtaaagctggctgccgaaggtaaggttgtagcacgcttgaagggcggcgacccctttgtattcggccgcggcggcgaagaagccatcgagctgcgcgaagcaggcctgccgtttgaattcgttcccggcgtaaccagtgctattgctgttgccgaatatgcaggtatccctgttacccatcgtcatgtagcaacctcctttgccgttattaccggtcacgaggatcctactaaaggcgaatccaccatccattggaaaggtctggcaacctctgttgacactctcgttttcctcatgggtgtagaaaatattgaaaaaatcagccgtgagctcatcgccaacggccgcagcgccgactgcccggctgccgttatccgttggggcactcatcccgaacagcgcactctgattactaccctcggcagagctgccgctgacgttaaagcaaccggtatgaaaccgcctgctatcttcctcgtcggcgaagttgtacgcctgcgtgaacagctgcaatggttcgataacaagcctctcttcggcaaaacagttatcgttacccgcgcacgtgcacaggccagcgctctcaccaaaaagctggaagcacagggtgccaaggttatcgaagctccggctatcaaaattgttccggcagcagattacgctccgctggacaacgctatcgccaacatcaatgactataaatggcttgtcttcaccagcgctaacggcgtagattacttcttcgagcgtctgggtgcagctaagaaggacgcacgcgccctggctaacgttaagcttgccgctatcggcagcgccaccgccaaggctctggcagagcacggcctcaccgccgacctcattccttccgcttacaaagcagaggagctggcagaagcactggcaggcgaaatcaccgccggtgacaaaatcctgctggcacgtgctaaggttgcacgcgaggtattgcccgaatctctgcgcaaaatcggtgccatcgttgacgttgtaactgcttacgaaaccgttgccgactgcgaaaacaaggacgagcttatcgaagccctcgaaagcggcgaagcaagcatcgtaaccttcaccagcagcagcaccgtaaccaacctgttcgaggttctcggcgacaagaaggagcttctgaacaaggctgctctggctgctatcggccccgtaaccgcagataccctgaaaaagcatggctatactccggctatcaatgccgctgaatatacaattgacggcctcatgaccgctatcacaaatttttataataaataaggaagtgtatcaagatgagtattaccggttttcctgtataccgtccgcgccgcacacgcgctactgaaaatctgcgtgcaatgatccgtgaaaccgaggtttccgtaaaggacttaatctatccgcttttcgtcgttcccggcgaaaacgttaaacatgaaatcgaatctctgcccggcaactaccactggtccatcgaccgcgttatggaatgcgttgacgaggttgttgaacttggtattcccgctgtcctgcttttcggcgtgccgtcctacaaggacgctgtcggcagcagcggctgggatatgaacgagcctgtacaacaggcctgcaagctgattaaagcaaaataccctgaactggttatcattaccgacgtctgcctgtgcgaatacaccgagcatggtcattgcggcgtgctgcaaaacggctgcaccgtcaacaacgatgaaactctgccgctcttagctaaggttgccgtttcccacgctcaggccggtgctgacatgattgctccctccaatatgatggacggttatgttaaggctatccgtgaagcactggatgcagcaggcttcaatcatattcctatcatggcttattccgcaaaatttgcttccgcatattacggtcctttccgcgccgcagcagactctgctccgtccgcaggcgaccgcaaaggctaccagatggaccccgccaacagcgacgaggctctgcgcgaggttgctctggatatcgaagaaggcgctgacatcgttatggttaaaccggcgctggccttcctcgacgttgtacaacgcgtacacgaaaccttcaaccgtccgctgtgcgtttataatgtcagcggcgaatatgctatggtcaaagctgcagctgaaaaaggctggattgacgaaaaacgtatagttatggaaaccatgctgggcttcaagcgtgcaggtgccaaaatgattattacctaccatgcgcttgatgtagcaaaatggctgcaaggcaaataaggagatataacaatggaacatacaaaatctcaggctgcttttgaggaagcacgccaatatatccccggcggcgttaacagccccgtgcgctccttccgcagtgtcggcggtgtaccgccgttcatttccggcggcaagggcagcaaaatctatgacatcgacggcaatgaatacatcgactacgttatgtcctacggtccgctgctcatgggccatgtgcctgactgcgtaaccgacgctatcaaggctgctactgaaaagggcacctcctacggcgctccgacaattgccgaaaccgagctggcaaaattagtctgccgcctcgttccgtccatggatatggtccgcatggtcaacagcggtaccgaagcaaccatgagcgctctgcgtctggcacgtgcctacaccggccgcgactgcatcatcaaattcatcggctgctaccatggtcaccatgacagcctgcttgttaaagccggcagcggcggagctaccttcggtgtacccgacagcccgggcgtacctaaggcagtagctgcaaccactattaccgtaccgttcaacgacctgcctgctctggaaaaggtttttgccgagcgcggcgaagaaatcgcctgcgttatcatggagcctactccgggcaacatgggccttgtgcttccgcatgaaggcttccttgaaggcgtacgtgccatcactaaaaaatacggcgctctcctcatctgtgatgaggttatgagcggcttccgcagcgctcagggcggcagccagtccctctatgacatcgaccccgatatcacctgcctcggcaaggtaatcggcggtggtctgcctgttgctgcttacggcggcaagcgcgaaatcatgcagatggtttcccctgcaggcccgatgtatcaggcaggtaccttaagcggtaacccgctggctatggctgcaggcattgctgcactcacctacatggagcagaacgatgtctgcaaccgtgcagaaagcctctgcgctattctgaccggcggcttggaaaaggcagcagctaaggccggtgtacctgtacagattcatcgcctcggcagcatgttcaccgttttcttcagcgataaaccggtaactgattttgacagcgctgcagcctgcgatctggaagccttcaaaatctacttccactctatgctggagcaaggcatctatctgcctccttctcagttcgaaacaaactttgtttccgttgctcacagtcccgaagatttgcaaaagactatcgatgctgcggaaattgccttcgctgaggttgccaaagcaagaaaataacagctaaagcatcaaaaaaataagcgtgcaggcttgcacaaactgacatcagtcagccgtaagcctgcacgcttttagttttaaattttaaaatcacatcttagccacgaatcagcttaatcgaaggcactgccgctctgacaaatttccacagcagcacggaaatactgcaatccataaccgaatgtagcacagtaccggcacccaccagcacgataacgctcatcacaaagccattggacagctgctccggcgtaaacatataaccgctgaagaaaaagggcgctaccacaagcacctcacccaaagcatgcaatacagcaagtcccagattcagaccgatacctgcaacgaagctctccataatattcggatagcgtttaataattaatgcaccgaccagagcgaaaataatatgggttgctgcacgcgcagcgataatcaggggcgtggttacgaaaaagcccatcgttgtacccaggcagacagctgctgccaccttaggcgaaataaacattgccagaaagattgccacatgcgcaccaagagtaaaggacatcggtccgataatcaccttcggcataaccataggtacaaccaagcctatagcgcacagtacacctgcgagaacaagttgataaatatttttatgttccaagagtatttcctcccattcatgtattagctagtgattatagcactatttgagataacttgcaagtactatgtaaaaatgatttttttaaaattaggttattcacttctcccggtggatttatcccgataatttcccacttatccccagtttttcacaaaagttatccacagtgtgcataacttttgtggattggtggataaaatctgtacattccctttataaaaatctccctatccataaacacttccgcctgctgcttattattccgctctcccagcctcctcgatttgacttattatccataatagcatataatttaagtaggtttatagataattaccgagtttaactcaaaggtggagaatcaatgaaaatatcaactaaaggacgctatgccctgcgcatgatgctggatctggcagagcatcagcaaaacggctttgttgccctcaaggacattgcggcaagacaaaacatttccaaaaaatatctggagcagattgtgcctattctgaataaatcaaacttcctgcaagccaatcgtggctttcaaggcggttaccgtctggtaaacgcaccgcgtgagtatactgtcggcagcatcctgcgcctgacagaaggcaaccttacgccggtagcttgtctggactttaaccctgtaggctgcgaacgccgcaacgaatgcattaccttgccgctgtggcagggtctgaacaaggttattgcagattatctggacaatatcactctgcaggatattctcgacaactataaagctcgcagcattgataattattcgatttaatgcttaaccgccggttgcagaaagccggcggnnnnnnnnnnatctgccggcggtttttttgcgctctaaataaaagaaagcagtccgcgcagactgctttctttgggttaggaaatgggatgtgatatgtattttatctgcttattcagcaaataacggagtggagagataacgctcgccggtatcaggcagcagcgctacgataaccttgcccttgttttccgggcgttttgccagcacagttgccgcatatacagcagcaccggaggaaatgcctatgagcacgccttccttatgggcaatggcacgaccggttttgaaggcatcctcattttcaacggcgatgatttcatcataaaccttggtatccaaagtgtcaggtacaaagcctgcgccaatgccctgaattttatgcggaccggcaacacctttggaaagtaccggagaacctgcaggctctacagcaacaaccttcacattgggattttgggatttcagatatccgcctacaccggaaagagtaccgcctgtacctacaccggcaacaaagatatcaaccttgccttcggtatcctgccagatttccggaccggtagatgctctatgggttgcagggttagcaggattggtgaactggctggggataaagctgttcggagtgctttctgccagctcctgagctttggcaatcgcacctttcatacccttagcaccgtcagtcagtaccagctgtgcgccataagccttcagcagattgcggcgttcaacgctcatggtttcaggcatagtcaaaataattttataaccgcgggcagcagcaacggatgccagaccgataccggtgttgccgctggtgggctcaataatagtagcccccggcttaagaacacccttagcctctgcatcatcaatcattgctttggcaattctatctttgacgctgcctgcaggattgaagtattccagtttgcccagaatctttgcttccagtttgttttcagcttcgtagtttttcagctccagcagcggagtgccaccaatcaaatcagtaatgctagtataaattgccataataaatcgctcctttatctttctataatcagtatttttcttcgtttagtttttgctctatatcaacaggtaaccaaagtcaacatcgtgtattatactgtaagctcctcatcggcaaaatccctcatttcctctgtttataatctctagtaatcatagctgatttataggtattattatactgatttttttcttactgtcaacaaaaagaactaaaattttcttctcttgacaaaaaaagctctgtaatgtaccatatgaaacatattaatacagtaggaattgaattttactcaaaatacgcaacaaaaagacgctgactctgtaaatctcacgccggtaagcgtataatagaaaagtaaaagcaggatttccgctattgaaggagaatgttttattattatgaagcaatttatctatgcagataatgcagctacaacaaaaatgagcgacgttgccgttaaagcaatgctgccctatcttcaggaaatatatgccaatgcttccagcgtgcaccttttaggtcagcgcagtgcagcagctctgtttggcgcacggcagcaggtggcacaggtgctgaactgtacaccgaaggaaattttcttcacctccggtggcagcgaagcagataaccaggcgcttataagcgctgcggccctcggcaaaaagcagggcaaatgccacatcgtttccactgccatggagcatcatgctattttgcacacgctcgaagctttgcaagcggaaggctttaccgtaacactgctgcgtccgcaggctgacggcatcgtcaccgccacgcaggtagcagaagctattacagatactacctgccttgtttccgttatgtacgccaacaacgaaacaggcgccatccagcctatacgtgaaatcggcgcgctctgccgcaagcgcggtgtattttttcataccgacgccgtgcaggccgcaggccatcttgctatcgacgtacagcgcgataacatagatatgctttcgctttccgcgcacaaattccatggaccgaagggaatcggccttttattcgccaagagcaatattcaacttacaagtcttatccgcggcggcggtcaggagcgcggcaagcgtgccggtaccgaaaaccttcccggcatcatcggacttaccgcagcgcttaaagatgcacaggaaaatatgcagcaaaatactgcttatatcaaaggtctgcgcgatgctctgcgtaacggcttagataaaattgacggcgccggtttcaacggcagccgtgagcattgcctgcccggtactgtcaactacagtttcctgggagtaaacggcgaaacactgctttcgctgctttccaacgaaggtatctgctgctcgtccggctctgcctgctccgcaggctcgctagagcccagtcatgtacttctcgccctcggcctgagccacgaaatggctcaaagcgccctgcgcttttcgctgtgcgaatacaatacaattgacgaagtccaaacaattataactaaggttacagaagcggtaaaccgcttacggaggtaaaattatgctgtcaacagctgccaatttaataaataagctcgcctgtgagcacaatctgagcgacgcagagctgttgacgctgataacaagcaccgaacctgacatcaacaacctgctcgcctgcaaagcggataaactccgccgtcaatattacggcgacaaggtctatatccgtggtctgattgaattcaccaattactgcaaaaacaactgctactactgcggtatccgcgccggcaacagcctcgcggaacgctaccgtctgacacaggaagaaatcctggcctgctgcgccgaaggctataggctcggcttccgcaccttcgtgctgcagggtggcgaggatgcgtattatacggatgacaaaatctgcgccatcgtcagcgccatccgcaagcagcatcccgactgcgccattacattgtccattggcgaaaaaagcagtgccagctatcaggcctacttcgatgcaggcgccaaccgttatctgctacgccacgaaactgcagacgtagagcattacgccaagctgcatccagactgcatgagcctggaaaaccgcaagcgctgcctgtttgacctcaaggaaatcggttatcaggttggttccggcttcatggtaggctccccctaccagacaccacaaaaccttgtcagcgacctgcgctttctgcaaaagctgcagcctgatatgattggcataggtccttacattacgcatgagcacacgccgtttaaggatatggcaagcggtactttagagcagacgttgcgactgctgtctatcctgcgactgctcttcccttacgcactgctgccatcgacaacagcgctcggcaccatccatcccaatggccgcgagctaggactccaggccggcggcaacgtcgtgatgcccaacctttcaccggtaagcgtgcgcaaaaaatatgagctgtacgccaacaaaatctgcactggcgaagaggcagcccaatgccgtggctgtctggaggcacgcgtaaaaatagcaggctataacatagtaaccgacagaggcgatgtacgccgcactttagataaatcagaaggagaaaaattatgaacaagaaagcactaatcgccatgagcggcggcgttgattccagcgtttccgcattgatgatgctggagcagggctacgaatgcaccggcgtaaccatgaagctttttgccaacgaggatatcggtgtttccaaagccaacagctgctgctccattgacgatgtagcagatgcccgcagcgtagcaaccggccttggcatgccttactacgttttcaactttgccgaccgctttgaacgcgacgttatcgaccgtttcgttgatgcttacgttaacggcagaacacctaacccttgcattgactgcaaccgttatctgaaattcgaccagctcttcgtacgcgcactagagcttggctgtgattatgttgtcaccggccactatgcgcaaatcagctacgatgaagccaaaggccgctatctgctgcgtaaggcagttgatcctttgaaggaccaaagctacgtgctttattcgctcacacaggagcagttggcacacgctatgttccctctcggaagcctgcataagacacaggtgcgcgaaattgccgaaaagcatggcttcgtcaatgctcaaaagcatgacagtcaggatatctgctttatccagaccggcacctacgctgattttatcgaagcacgcctgggcagaaaatttaagcccggcaacttcgtagacgaggcaggcaacgtgcttggcagacacaagggtattatccattacaccgtaggccagcgcaaaggccttggtctggcactgccgcagcctatgtacgttaaagagattgacaccaagaacaatgctgttatcctcacaacaaacgagggactgttcacaaaaaatgttacagccaagaatatcaacctcatcgactgcgatgctattaccgaaccgcgccgcgtgaaagcacgcatccgctaccaccagcaggagcaatgggcaaccgttacccagcctgacgcagataccctgcagcttgtttttgatgagcctcagcgcgctattaccaaaggccagtccgtggtaatgtatgacggtgacgtagttgtcggcggcggcacaatcgtataataccctgcaaatcaaaagcatcagttgctacaataattgtagcaactgatgctcttttattatactcgttctgaatgagtaataattttaccagttgtcagtaaaacctttttaagcatgattaatattttctttatatatacattgttaacactgactctatatgatagaatataaacaggcagatataaagcgaaacaatatttttataccgctctaaaataagtttgccagaagtaaggaggaataatatgaaatcattaaaaggcaccaaaaccgaaaagaacctgttggaggcatttgctggcgaatccatggcacgcaacaaatacacctggtttggtattgtagcccgcaaagcaggctatgatcaaatcgctgaattatttgagaaaaccgctaataatgaaaaagctcacgcttatatgtggttcaaggaattagaccagttaggcgatactgcagctaaccttttagcagcagctgaaggcgaaaaccatgaatggaccgatatgtatgtaaaaatggcacaagaagctgaggaagaaggtttccctgaaatcgcagcaaaaatgcgcggtgttgcagctatcgaaaaacgtcatgaagaacgctatcgtaaactcttacaaaacatcgaagaaatgaaggttttcagcaaagacagcggcctgaccatttgggaatgccgcaactgtggtcatattgtagtcggccccagcgctccggaagtttgccctgtctgcgctcatccgcaaggtttctttgaagtacatatggataacttctaagcttatacatctccccaaatgcataagagaaagtagaaaagtgtagcgtaaaatttacgttgcactttttctttatttccgtttcaaaaccaatacgcaaatgaaacgcaaatttttacgtttcatttctaatgcaacgtgaaagagccgtgcaaattatgcatggctctaatttcttataatgaatttttaggttaaggaatattttgtacccctacccttgccacttttaacaagcttatttttctccactaagctgttcaacaatctgatagtcttacctctactaaagcctgttatagctgaaatatcagagcttgccaaaactaaattagcggcaaagacttctaaaactgcttgctcatccacatcaagcggaagttgatactccacgctaggcaaagtaaccattacagcattgtcacttatagcaaaattcggtttcacgtcagcgttcctgtatgcttctaaaattctacgcactcctgtaccaaagatttctacatattttaatctgaagaacacattgcctaaagtaggattacgtaaaacagatacataccccttcaaatattcttccttgctaacacctaatggtaagccaccaggagaaactatttctattttatcagtatacatcaatactcttatattagcattgatatcccaagtgcgatgtactaaagcattagctaatgcctcacgaaatgccttttcaggaatctgttccttagtaattcgttcagctccctttatcagttcatatacataataacgcctgaatagcttgatagtcttagcaaattgctcaataactgatacattcttaatgagctccctatctaaaatcacatcattgctgctaccaaatttagcaatatcaatgcccgggaagctgttagtatctgccaaaagttctccggcattgttgaatctgtccttgctgtaatataaattcaaggttctgcatatatcttttgtcagcttcttaatgccaagcttagcctgcaattccttttctaaaatagtaaaccttaattcgctatttccagcaggaagttcatcataatattttcccgtaccaagtaaagtcaaacgattcaattcccctctatcaacctctatggtagaagtatcattacgtttataggcctttcccttgtacaaatacggtttgtccagaccttcagaaacctttaaagctatagtattattttgagaattaattctcagtgtaaaatcaggctttggtgaaatgctgtcattgatacgattttctaaatcaaggcataccttttcaggattatttataccgcaaggagttccgtcatcccttacgccaaataaaatttctccagtgccataattagcataagcactgactgttttcagaaatgtattggtgacctcagacttaaattccaggcttttagtttctttcatctgttacgcctcctatcactattaaacaaattgtagcagaactcagcagtaagtgcaacgtatttttttacgttttattttccttccactttcatctcatttttcatttcaaagccaatacgcaaatgaaacgcaattttttacgtttcatttctgttgcaacgaaaaagagccgtgccttcgcacgactcttttttactgcttattcagcttaacttaccaatgatacttttcgcctctgctgattttaaaagcacggtaaatctgctcaatcagcaataaacgtatcatctgatgcgtaaaggtcattttagaaaagctcagcgccaaatcggcacgcttacgcaatgcatcagtatagccaaaggcaccgccaatcacgaaggtgatatggctgttgccggcaagcgccagctcatctagctttgccgccaaatccgggctgctcagctgcttgccgatgacatccagcaaaattacataggaatttgccggtataattgccagcaggcgttgcgtttcacgctccagcacctgctgcttttctgcgggggaaggattgtcaggcatacgctcttcgttaatcgccagcgtttccagcttgcagaagggcgtcagccttttgctaaactcctctatccccgcagtaagatatttttccttaattttgcctacacaggctattgttatcttcaattgccgtaatccttcggaacctcttccaataccacagttctgctttctctctgaccgttacgcataatagttacttcggctctgtcgcctaccttgcatttagacagagcagtgcgcaggtcaagcgcagtctttaccttgttgccgttaaagctcaggagaatatcgccggggcggatatcagccttcgctgccggactgccgggaacaaccttaacgaggaagataccgccgtgcaggttgatttcaaagccatagcggttagcaatttcctgatccatcagcgaagcacccagatacggtcttgcaacacggccgcgctctgccagctcctgcagaatcggtttagctgtattgataggaatagcaaagccaatgccttcaacaccgcttacagcaaccttagcactgttaatgcctactacctcgccgtcagcatttaccaaagcaccgccgctattaccggggttaattgccgcatcagtctgaatcagattgaacttgcgctcgcctacttcaatgctgcggttcaatgcactgataacgcctgcggttacactgccgcggaattccagtcccagcgggttgccgatagcaattgccggttctccgacctgcagtgtatcgctgtcaccaaaggtggcaacggtaaggttatccgcatcaatttttactacagccaaatcggttacagcatcggcacccagtaccttgcctttaacggtacgtccgtcaggcaggctgacgatgatttccgatgcaccctcaactacgtggttgttggttgcaatatagccgtccttgtcataaataacgccgctgcctgtaccacgctccatcagttgcgtgcggttgaagaagtcgcgcacataagccttgttggtgatacctacgacagcaggaccaaccttcttggcggctgctacaatcggtgtattgcgtgccgcactcagctgttgctcagtcttggcagcaggcttttcatgtactgcggcggaggttttattgtcgccgcagccagcaaccagaattgccgcacccaaaaggccacagacaaaaatattagctgattttttccagatactcttgttcat

SEQ ID NO: 509 - DNA, 9164 bp, unidentified
  source 1..9164: mol_type = unassigned DNA
tcatttttcatccacaacctggaagatgtagaatttcagataatagctctcctgcgcctcccacagtattgggtggtcaggtgactgtgtcctgaactcgacctgacggagtcttttatgtacagctttagcggcttccttaatagtcttggtaagaagctcctgtgtcatgaagtgtgagcatgaacagcttgcaaggtagccgccgtctttgacaagcttaagtcccttcatattgatttccctgtagcccttgattgcgttctttgtagcttccctcgatttggtaaatgccggcgggtcaagtattacaacgtcatatttctcacctgcttcgttaagctttggcagctcgtccaatacatttgcacatttaaaatgtactgtatcctcaagtccgttaagctttgcattggctctcgcctgttcaacagcatattcagatatatcaagtcctgtaacttccctagcacctgcaattcctgcatttaatgcaaatgtacccatatgggtaaaacagtctaataccctcttgtccttgcacagcttctgcattgcaagtctgttgtacttctggtcaagaaagaacccggttttctgtccattcacaacatctatcatgtagtggacaccattctcaactatctcaacattagtgtcaaattcatcaccaataaagccctttactctctccattccttcaagagtacggactttggcatcgcttctttcatatactccacggatatcaatgcctttttcatgaaggattcccttcactttttcgacaataagcgacttaaatctgtcaatgcctaaagcaagcgattccacaacaagcacatctgagtacttatctataacaagccccggcagaaaatctgcctccccaaatataagacggcaggcaaaggtatctactgtgtcaaatctgtattcaaccgcagcccttactctctcctcaataaatgcctcatcaacaacatcagtgtgtcttgcgagcattcttactgtaatcttggattttctgttaataaatccgattcccatgaaataatcatcaaaatcaagcacctcaacaagatgtccgtcaattattccgtcagacatccattcaatttcgttatcatatacccaggcaccgcctgcctttaatgttcttccttcaccttttcttaatcgtatctttccgcatacgctgaataaatcttccattctgttccttcctgccagatttttctgacatgtatcataattattcataatatattaatccgttgacggattaccaagaaaataaaacatacatactcctgcaaccgtaataagaagcgacacgagcttaatccatgaaaatgtagtcttctcacttccaaacagcccgaaaagtcccagcagatacgaaacaattatctgcgcaactacaatcgtaacctccgctttagcaattccaagaccacttatactcttaataactgtaaatgttataaatgcacctatcacacctccaagaagtgtaatcttgttatcaaccttaaacagcttcatgatatcaggtcttccgtcaattacccacataatcgcacaagtcgccagtgctgtcaactgcacaaacattgccgtaacccacacactgcttgcttttgtaacatttgtattaaatgcgccctgtaaactcataagtgcacctgatattattgcaatcaaaaatcctgccattaactaacctcctcattaatctgcataggataattattagttaataacaggatatttattcataatgttatttagtactctgcgtactgttttcattattatttttagttgttttttctattgttgttgcaaatgtactgtaagctgtatcaacatttccaccatcatatacctgatgaagcataatctcatatctcatatacacttctcctactccgatatatttagcttttacaacagagtcagaataaatctggtgtaacttctggtagctttctgctctcttaacctttaaatccgcccttgcacagcttttcttagccatgttcccaagataatctgcataatcataagaaattgctcttgcaacagccttggatgcatctacattcttagtgtacggattaactactgccatcgtagtaacagacattgccttagaatcaaggtcatctcccattgaaggatactcacatattccataatctacatctgtaacattaatctctgcaagactgtctgcatctagcaccgtatagagcatatttccagtagaaaacagatccgcacattctttaagacttactgtatttctgtcaataccaaatgcatcttttaactgagcgtacttagtaagaaccttcttaatcttttcctcattaagagatacctcagccctgttctctgcattaactccgcctatattaatataggctcctgctgccgcataattaaggaacattgaatcaggatcccattcaaacaccattgaaacatcctgattctcatctgtaatctgataattatcacttatattacgaatctggtctatagtatcaactgcttctgcatatttcttattatatacaagaaatgaagtgttgaacgacactgggtaaccatataacttaccaccatacgaacatgcagtcattgcagccttaccatacacattctcattatagacttcaggatacatatcattctcagaggtaagacctgaaagataagccttctccatctcttcagatgtcagaaaatatatatcacacgcattgtcgtttctgaccgattcgtcatatatataagtaatatatgaatcagcctcaatatatacaggattaatagttaccagttcattagatttcttaaattgtctggcaacgaattcaagataagactcatatgcactgtcattataccagacattaactgtaataggtccactaagattaagcttcttcgcagcctgtgtcctgtcatctttattaccacagcctgcaaagactgtcagcatggtaacaatcagcatcatactgataaatcttcttaatttcataaagtaaactcctgattctagaaggatttcttaagcttagctatgcattcatctacatctgccttagtaattacaagtggtggaacaaatcttataacattagttcctgctgagaacagaataagtccgttatcaagtgctctcgcaattacgtccttaggattaactgataactcaagtccctgcataagacccattcctcgtctctcgacaacaacatctattgtctcaacaagctcatcaagcttttcttcaaagtaagcagatacttccttgacattatctaatacatgctgcttctcaaaaagttcgaacaccttggttgctgctgcacatgcaagtggattaccaccgtatgttgttccatggtctcctggaaccaatgccttcgcaacttcctctgtcgccgcaaatgcacctacaggaactccacagccaagagccttggcaactgtaaggatatcaggcttaacgccatactgctggaatgcaaacatacttcctgttcttcccattccgcactgaatctcatcaagtataagaaggattcccttctcatcgcataactttcttacaccttcaataaattctttagtagcaggataaattcctccttcaccctgtactgtctcaaatattatagcacaagttttgtcattaacaagttcctttacactgttaaggtcgttatactgtgcaaacttaattcccggtatcataggtccgaatgcttcctgataatgcttattaccagttactgcaagtgctcccatacttcttccatggaatgaatgctgcattgcaataatctctgcatcagcctttccgttcttgacataataatatttctttgcaagcttaactgcaccttcaatagcctctgttccactgttagtaaagaatactctgtccattcctgaagcctttgtaagtgcagttgcagcctctacagccggttcattatagaaataattagatgtgtgtataagcttatcaatctgtgcctttaatgcatcgttatattctttattgttataaccaagtgcaaatactgctatacctgctccaaaatcaagatattctttaccatctgtatcgtaaagtcttactccgtcacccttatcaagtactatctggtaacggttgtatgtatgaatcagcttctcttctgctgtttctataatctgctgtgtattcatgattactctcactttcctattcttatgagcacacattttcacatgggctaatataatattataacctcaacgcttacggttcgcaattatttatctgaatcaaagaatttttctgcatcatctgaaagaatagctgtaccaacacccttgttagtaaatatttcaagaagaaggcagtgtggaattcttccatcaagaatatgtactcttgatacaccatgctcaatagcatctatacagttattaagcttaggaagcataccgccgccgattgttccgctctctaaaagtgttctcgcctctgaagtagaaagctcagatataagtgaatccttatcgtcaaaatccttatatacaccttcgatatctgttaagaatgcaagcttttcagcactgacagctcttgcaattgcacatgctgcgtcatctgcattaatattgtatgcatgaaaatcatcatcatatccaatagggcatattactgggaggaaatcgtccttaagcaatgaatcaagaagtgttgtgtcaacatctgtcacttcaccaacatatcctatatcctcacccttagaatacttcttctcaacctttaacatgccgccatccttaccactgataccacatgccttaactccaagctgctcaatcattgacacaagactcttattaaccttgttaagaaccatctcggcaatctccattgttggctcgtctgtaactcttaatccattcttgaattcaggtgtcatgcctgacttttcaacccatttgctgatttccttgccaccgccatgaacgatgattggcttaaaaccaacgagtttaagaagaacaacatcctgaataacttttctcttaagttcttcatctaccatggcacttccgccgtacttaactacaattatctttctgttaaacttctgaatataaggaagtgcctcaacaagcacctgtgccttcataagttcctctgtcatatcttttgcgctcataataatctccatttcatatttattcagatatatttgctttaaaatgctgtgtcagatcagcttctgtaatcagcatttatcttgacataatcaaatgtaaggtcacagccccatgctgtagcgcttgcatcgccctgcttaacatcagcaatagcaattacaggattctgtgaaagtatttccgttgctttctcctcgctgtaatctgtagcagttccatctttaacaatctgaagctcacctgcttcactcttaaagaatatatcaaccttttcagggtcaaagtcagcaccagaatatcccattgcacagagaattcttccccagttagcgtcatgtccgaatattgctgctttagtaagacttgatgtaacaattgacttagcgagtgtcttggcttctgccttagttgttgcaccctttacctgaacctcgaaaagacatgtgcagccttcgccgtcacctgcaatcatcttggaaagctctgtaaatacatagcttaagccttcatagaaagcattataatcagcaccctcttctgtaatcttcttattgccagccattccgttagcaagaacaagagctgtatcattagttgatgtatctccatcaactgatatcatgttaaatgaatcatcaacaattgcacttgtcatcttctgaagaagtgccttgtcaatatcacagtctgttgttatgtagcagagcattgttgccatgttaggatgaatcattcctgcgcccttgcacataccaccgattgttaccttagtacctgcaacctctacttctacagcaacctgcttgcttcttgtatctgtagtcataattgcctctgctgcctgtgttcctgcttctaatgaagcatcaagcattggagcaagcttttcaattcctgcacatattctgtcaacaggaagctgcattccgataacacctgttgaaccgataagtactgcattctccggtacattaagaacctttgcaactgcctttgcttcttctgcacatgcgttatctccttcaacgcctgtacatgcgttggcaacaccgctgtttacaactacagcctgtgcaaagtcttcattatatacaatgtttctgtcccatttaacaggagctgcaaatactttgttagttgtaaatgttcctgctgtaacacatggcttctcgctgtatacaagtgccatatctttctttccgttcttatatttaatctgtgcttcacatccggcagccttgaatcctttagctgctgtaacaccgcctttaattatattcataacatcctcctattgtaccatcacatatactctgtcattgtgcatatttcgtcgtgtaaattctgaatttacgctacatttattatggaaacattggtgcaagctgtaatccctcattctctggaagtccgaagagaaggttcatattctgtactgcctgacctgctgcacccttaacaagattatctaacgcacccatcattataagtctgttagttcttggctcaatcttaaatcctatatcaacaaagttgcttccctcaacccagcgtgtttcagggcatacatctttaggaagtactcttacgaaatattccttatcatagtacttgtcatatgctgccttaacatcttcatatgtaacatctttggcaaggttggcgtatgctgttacaagaattcctctgttcattggaactaaatgtggcgtgaagataagctttaaatcatctcttccacatgcataacctaactgttcctcaatctcaggtgtatgtctgtgagttccgacaccataagccttcatgctctcattaacttcgcagaaaaggttggcaaccttagctccacgtcctgcacctgaagttccactcttggcatcaattataattgtatccggattgattattccttcctttaccattggataaagtgtaagaattgatgttgttgtataacatcccggattagcaatgattcttgtatccctgcttacttttcctctgttaatctcacataatccgtaaacagcttcatctatatactgtggtgctttatgctcaagcttgtaccactgctcatatacattaacatccttaagtctgaaatcagcactcaagtcgataatcttagtctttgaaagaatctcgtcattgacaagtgatgcacacagtccctgtggagttgctgtaaatataacatcaacctcattagcaagctgttccatattgtcgtccatacattttgcatctacaagtttaaacatgtttctatatacatctgaataattctgatctatgtaacttctcgaaccgagccatacaatctctgcatccttatgtcctaataataatctgacaagctcgttacctgcgtaacctgtcgcaccgataatgcctactttaatcataactcctccttgttttgcgaagcaaaatgcatatattcaacatttatgcataaaataacgcaaaatgtaaattgataacctacattatagcaactttttttcttatgtaaaggatattttaaagaaattttatatttatacattttaattgcatatccatgtataatatgcataattttttgttgcatttttaaataaagtagtttattataatctgcaggtgcatagcatatgtgttttactatgtaaacttaataatatacggaggaatatataatgaaagaaaaagttattcttgcttattctggcggacttgacacaactgccatcatcccttggttaaaggaaacatacaactatgatgttgtctgcgtatgtgcagactgtggtcaggaagaggagttggacggacttgagcagagagctctctcatgtggtgctgctaagttatatatagaagatatcactgatgaattctgcgacaactacatcgttccatgtgttcaggcacacgctgtttatgaaaataaatatttacttggtacttcaatggcaagacctcttatcgctaagagacttgttgagattgcccgtaaggaaggtgctgttgccatctgccacggtgctactggtaagggtaatgaccagatcagattcgagcttacaatcaaggctttagctccagatatcaagattatcgctccttggagagattctaactggaagcttcagtctcgtgaggatgagattgaatactgcagacagcatggtattcatcttccattcagcacagactgcagctacagccgtgaccgtaacatctggcatatcagccatgaaggtcttgagcttgaagatccagctaatgagcctaactacaagcatttattagttcttggatgcactcctgaggaagctccggatgaaccagaatatgttactatgacatttgaaaaaggtgttccaaagtcagttaatggcaaggctatgaaggtttctgatattatcagagagcttaacagacttggtgccaagcatggtatcggtatcattgatatcgttgagaaccgtgttgttggtatgaagtcccgtggtgtatatgagactcctggtggaacaattctttacgaagctcatcagcagcttgaggaattagttctcgacagagatacaacaacattcaagatggatgttggaaacaagtttgcacaggttgtttacgaaggaaagtgggagacacctcttcgtgaagcacttcaggcattcgttgagaagactcaggaatatgtaacaggtgaagttaagttcagactttacaagggtaacatcatcaaggctggaacaacatctccatattcactttacaatgagtcaattgcatcattcaagacaggtgatatgtatgaccatcatgacgctgacggattcatcaacctctttggtctttcacttaaggtaagagctatgaagaagcttgagaatgagaagaagaacaataagtaa

SEQ ID NO: 510 - DNA, 6407 bp, unidentified
  source 1..6407: mol_type = unassigned DNA
ctatttaatcgtccttagaatactttcaagctcttccatactatcagtctgaagtatgatataccctaaacggtctaaagagttttttatttttttttcagaataaggtcttatttcagaccgaaaaacagccgatgaccgggaagagcttagaaaatccacacaacgctgatagttgagcggattaaggaactgtaccgctgagcatttttcatgtttgcgaaggacatcaacgggcaaaccaagagaacagttcaccagatttctcagcatatctatcccggttgacaatggaaccaaatcagaggttatataatctcctccaagccggcaagcaatttctatgatataagcgcccgattcattcagctttatttctgtatgcgagggacaattattaagtccaatcaggcaaagtgcttttgatacggtctccgaaaccagctcccactcctgtttcgttatacgcgccggttcaatgtgcgtatcttcaacaaagaagccttctgcctcaccgatacaaagtttctccgtaatagtgacaacggtagttttattgttttgcgtatatgtttcaacactgaattcacggcctgttataaagccctcgacaatggcctttccggtacgggaataaccgagagcttcggaaaaagcaagtacaagttctttatgatttgtaaccttttttactccgcggcttgcagaggaatctaccggtttgacaatatatggataatcttgcaatgtgcccaagtccgtatctttatcacaaagcatgaaaaatggtacatcaatcccgttggccgcaaacatttccctctgcaagtatttgtttgtacagatttttgcgacctcagtggacatggacggaagccccagctgttccccgacataggaaaccacatttacaggcgcgtcacttgtagtaagtatgccgtcaacagagtgacgtttggcacattccaaaacaccttccttatccatcgtgctgacaagaaccggttccgaggcgtaccccattcccggagtattcgcatccatatctgcgactatggtatgcaatcccatatcgttcgcctttcggatgacaggaacctgcatttcacctgcgcccagtatcaataatcttttattcatataaccgaatttatcacatcacagatctttcttgcctgtgcttcactgaaccagaaatcattaaacaaattgacgatatgcttcacctccacttccgcaacaggagaagaaacacctttgaacatgtatgaaaccgaagggaaattagtcccggcaaacagaccggccttgaatattgcgtcaagaaccttctgccggttctcgatgacaatcatgaacctccagttctggaaatcatctcccatctgaatcgattcaggaagcagattcctgtatatcttgtttattttctctttttccgcaatcacttttgggagctttctttcaatgatgtcaaaatattcctcatcggtcatttgcaaatttgaggcgtccagccaaggatagtcagccggaagcatatatctgacattctccaggagacatttccttatatataccgaatgcttttgttcactaatgctatcatactaataatcaacaacttcgtaccccctaaaacttgcatagccaccataggaaagttctatgaatttagcatatccggtactgtaaaggcagagatccacattttcaggcaaggaatctaccaattcgggaatgcacaaacaacaatcatcaatgatacaaagattttgatcgagacttttcactgctcggtaaaattctttgttgtcatactttttcccgtaggcatgcacaaatacaagaccggaatattttcccgcctctatagctgtcaaacatttctcggttgacatggcatggctttcatctatgtctataaattcaaaaccgacacctgctttcataaacgacaggggcactacaggacacacatttgccggcaataagaacggtttatcaaaatggttgccagacagataattatacaatatggccgaagctctttgtgaagttacttgcatatcaacagacttttaaacaaattgacaaaccgtttgggaatatccggagtgatggcatgtcttttacgaatggccatcttatccaaattctcagcaacaagagtaaaggcagcggcatcggtataatcacccaccccctgaatcagcccttcacgcaaaaacatataatagtcgtactcctgattatcaacataataccctcctataacaggagttccacaggccaatgcctcattcatcatcgtagaggcaggcaatatggcgacatctacagtactaaacaagtctgcaatggaaccggcagacaaattcttctgataggttactttggggtcatcaaccatattctcggctgcatacgaatcaccgacaattgccgttatcttcttcacattgtctttggctttaattgcatgaatggtctgatacgtcaaattcaagaaatcagaaccaccaaaagccaccaatacatataaacctcctgaataattgttccgtttattctgcagcgcaacattgaagaaaggcctcctcaacaatgaaaattgaagcccaaaggcaaattgagtatatggttcacacgaatagtcatcacgcgtgtaacccaatccctgattgactataagatcagccacatagtgcttgtcgtgcatatcatccacacacaccagacagcaacctttttgcttgatggcacgctggtaatcagtagtaaagaaatagttgtcaagtaccacaatttcgtcaccttgtaaaagggaaaggaactcatcataatgcgattcttcctgtaaggggatgaaaggacataccttctccatctcactcacctgataaggggtaggatggcaagtaaagaaggtacaatcaaaatcgtccttcagcatatcggccaaagccagagtacgaataaagtgaccgtagccgatggcagcacttgcatcggcacggagatagattttctgcattacatcatttatgaagcaactcatacttcatctctgccaatgcccagtcagtctgtgtatcaaggtcctgcacttcaagttcggaaagtaccaacccggctgtattctcaccccaaaaagtccggctctccacaaagggagcagtgcgagagaaatagaactgaccggcatcgtgataaatcggttctaaatcttgggaacgtgcatttttgtattcgggataaaccatactaatttttccatccacgatgtgaaggctgcgctgtataggataggaataagccacacaagtgaaaacggaatctatctccgaattcatttttccgtatgcttcccggagtctttcgggagtgacaaaaggagccgttgagtaaatgcaacaaaccgtttcaaactccctgccttgctctttatacttcctcagtacttcaagaattacatcatcagtaccggcatagtcatttgacatctcggcactccgcataaaaggaactttggcaccatacttacaagctattccggcaatctcctcatcatcggtagaaaccatcacctcctcaaaaagaccgctttgtaaagctgcctctatggaatatgtaatgataggtttacccataaagggcttgatattcttacgcggaatacgtttactgccgccacgtgcaggaatgattgctatatttttcatttcgctacaaattctataaccttttcaatcacatactcctgttcctcgtccgtcagcgtgggatacatcggaagactcagacaatgttcgtaatactcttctactataggtaaatcgcctttcctattgccccactgctgatagtaaggcatcagatgaagcggagcataatgaacctgcgcatagacattgttctcgtgcagataattataaaggcccaagcggtcagctacttgaatgatataaaggtgataagcatgatagacatcggcagcattgaacggagtcttgatgccatctattccggaaaacgcttcattatagcgtctcacgatttcatggcggcgttcaagacctgctttcgcacgctccagctgagaaatacccaaggcagcctgaaaatcagtcagacggtaattataccctaactcctgcatctcataataccagccaccatgatgctcgtgtaataaagcagggtctttcgtaatgccatgcgtacggtaaagacaaagcctgtcatagagctccttgctgttggtggtcaccatgcctccctcacccgtagcgatatgtttcacgggatggaaagagaatacggcacagtcggcaaaacgaccgttaccacaatgttgtttcttgcctttactgtccatgaaatagccgccgggagcatggcaggcatcctcgataatccacaaaccgtactcgtcggcaagctttctgaactcttccagatccaaaggatagcctgcaaaatcaactggaacaatacctttgtaagtaccgcggggagaagctttaagcatggcttcaagtttacggatatccatgaggtaagtatccttgtcaatatcacagaataccacctcgccgccacaatagcggatgcagttggcactggcagcaaaggtcatgggagtgacaatcaccttgtcacccggctttacattcagtgcggtagctgcaagatgaagccctgaagtggcattgttcaccgctacggcatattgtgcacctacatattcggcaaatttcgtttcaaattccctgattttgggaccttgtgtcaggtaatcgcttttcaaggtatcgatgactgcccggatatcctcatctgtgatatgctgacgaccgtatggaataggcttgcttatcatttcacctcgaaattagggtcaacgtatttctttatattctcgcgcatagtctctactgtctcccactccgtattgttgtcactgctgtagtggaaaccgtcgggaacgggtactgcattgtgatgtctgatgaactcttcgcgactgtgcttgaaagatacggaaggaagaatgacataatatctgcccaaatcgattgtatcaagagcatcggttacagtaatcatctcctcgtgcagcttctctcccggacggatgcccacttccacctgcggcagattgggtgcaatggcggtagccacgtcctggatatgataggaaggaatcttaggaataaagatttcaccacccaggtgatgtccgatggcatacatgaccaaagcgacaccggcttccagcgaaatgttgaaacgggtcatgcgcatatcggttatgggaagttccttcgccccgttgtcacgcttgttgataaagaaagggattacggaaccgcgggaacccatcacattgccataacggactacggagaaccggatgttcttggaaccgctgatattgttggcagcagtaaacagcttgtcggaagtgagcttggtggcgccataaagattgatgggggcacatgccttgtcggtagaaagggccaccacatgctgtacaccggtggcaagagcagcctttatcacattctgcgcaccgtgtacattggttttgatgcactcttcgggattgtattcagcggtatccacctgcttgatggcggctgcatggataatcacgtccactccttcgcaagcccgcgtcaggcgttcgaggtcacggacatcaccgataaagaaacgcagttgcggatacttatgaccgggatatttctgtttcagctcaaattgcttcagctcatcgcgggagtaaataatgattttctttacttgcggataatcacggaggatggtttccacaaacttctttccgaaggaacccgttcctccggtaatcaatacggatttattgttaagcattataatgaaaagttttattcatcgatatattcccacggatagggattgtctgtcacattctgaaactcatcaaccgcttcctgctgtttgggagtaagtgataaggaatcccaggaggcgatgatggaacggccttcgtcggccaaagactcgtcgaacacttcaccgtagcaggcggtaagcagacggagcttcagtaaggaagcgggaagggcatcgagcacatcccaacaacagtccagcactttctggacatgccgctgcttttcgccatggtccacaaaagaggcgctgtaacccataagaagggcaagacagacatttgcctgctcgtcgatggtagtgccttttacacccgaccggtacaaagccatggtaagacggtagacctcaccgttccgccgtgacaagtcatcgctatagacgggactgccgtccatacccaaatacatcagttcgtgcgcagcacgctgaagagtgattgcttcttcggaaagagacat

SEQ ID NO: 511 - DNA, 26789 bp, unidentified
  source 1..26789: mol_type = unassigned DNA
cttggtttcgtaaagaatagcctggctttcgtaggtaaaggcttggctgacgtagagacaaaggatccgacagtgaatactgcaaaggtgcagattatggacgatgaggtagagctttatgttatcacaagctataaatatggcaaggcttactctaactccatcaccgtgaagattacagatattgaggtccctgacggagtggacgctgtgtctgtagacggtgcagtgaaggctaccttcgcacataatcttgttcagctcagcgaggctgcaaacgtatctgtgtactcagctactggcgcaaaggtgtatgctaagcagaacgtaagtagcgtaaacctcgcacagcttcctgcttctatatatataatatgtatagagaaggggggcaagcagaacctctacaagtacaacgtaaagagataaaaactcatattttgaaaccaaagggagcgtgcctctaaacttggtacgctcccttcactatgaatataaccataatagataataaatgaagacaaaagcattacttgcatcgctactcttcagtggcgcagctttcgcacagaccgcaccattcgtgatggttacaccctccgactataacattatgtcagcttcacctaatggtaagtgggcttgtggcatgtactacgatgccagcaatgaagcatacggcttccgttggaaccttgagagcggtgagattgacctgctcaacccctcgtcgccatcgcaggcgtatggcgtttctaacgatggtattgtggtaggtgtgtacaccgacaatagcttcaagaagaacggagcgtcgatacagctcgccggctattggagcaacaaccgctggaatcgccttgagatgccgtccgacgcagtgaacagcagtggcgcagctggcatatcgcccgacggacattatatcactggtaacgtggctgtaggcagcaactactcgggatatgtgtggaaggacggtaagatattccgccagttgaaagagaacaagaagatagcaatgccttacgctatatcgcccgacggacaatacgtgacaggttgggttatgaacaagaaccgccaggcttgtttctggggacccgacggcaacttcacaacactctccgaccaacagtcgccgttctgcgtgggcaagaagttctcgcccaacggcaaaacattgctttactttggcggttggcagaccgacgaagaggcaggcggagcagacaaaatacacggtgcatgggcaatatatgacatgaagacgggcaataagagtgcaatacttcctgcaggtactaaagatgacctcgacttcttcgatattagcgaccatggcaccgtgatgtgcgaggacaacaatttgggttatatataccagaacggaaaaggcacattcgcatacaaatatctgaaggagaaaggcgtgaacctggctgactatcatgttttcgtcaatccggatgcaccgaaagattctgacggcgaaactctttacaacgttacacgcgctacttccgtctcgtgtgatgacaatattatgggcttcatttactataacgataacaaagatgaggaaggcaactatgccatctcgtcgcagtcgatgattgtgaagttcggcagtccgatgttctcggctatgcctccggtgagcgtgaaggcacagcagatgtctggactcaacacggtgaagattacatggaagccgaatgttgcagccaccggcataaccggatacaaggtgtatcgcgacggcaacaaggtgagcagcgatgttgttaccgctgaaggatttgtagatgctggtgtgccggtaggcgaacacaagtatcaggttacggcagtgtacggcgatgttgagtcggctgacagcgagacagctactgttaccgtgcaagcacagaaagtctctaagccgacaggcttctttgcgcagcagcacggctacaattctgttttcttggagtggaacaacccagctaccaacttcggacagctcacctacttcgctccagacgatgcgcagcttgagacctttggtctgtcgtacgctaacctcagctacgagacagccattgcttttgatgcagtaacactcagtgcatacaagggacagaagctcacatccgtaggcttctatccgatggaggctcagggcggttggacaatcaatctctacactcgtgatgcagccggcaagcttcagaagttctacacacagcccgtcacgcaacagttgaactatggcgagcgcaatgtcgttacgctcacaacaccgcaggacgtgccagcaaacgatttactcgtgtctgtagaggtggctgtgacaacagcatctaagcgcatctcggctctcgacaatgttcatgcagtgaggggtaagtctgacttgctgcgcgttactaccgacgacgactttgaatcgattggcgacatcatggaggcagaaaacgttctctatgctgcttcatgggctattgatgctacggtagcaccagcgggtgccgacctcacgaaagacaatgtagcaagctataatatatatgtagacggcaagaaggtcggttcgtctgacgcgaagacattcaccgttgcttcggtggagaagggtacacatgagcttggtgtgagtgcagtgtatgctaacagcgttgagtcggagcagaccatcgttcagctcgatgtgacacccgacgacagtcagcttcaggctgtaagcggagtggaagtagctcctgtttcggcttcggctgtaaaggctacatggcagcagccgctcgaccgcgatgtcgttaaagtgcagtattgttcaggttcgccatcaagtcagatcgtcaccgcaccagccgacaacaactacggcttgatggttggcgcggtatatccgtcgaagacattccgtggacgcacaggctacgtgatgaagaaggcgcgtttctatccgcttacagatgcaacatacaccatatacgtgtataaggatgacgagataatcaacgagacagcagtggaggactacactgtgggtaagtggaacgaagtggaactttcagcacctatcgtggtagagaacggagcttcttatcgcttggctgtcgactgctacgatgttgtgccgaacaagcctgctatcgctttggatagcaatgcgccgatggaaggctactcggatatctatacgctcgatggcgagtcgtggagttcgatcacatctactggtgtctctgccaactggatgataggtcttgtactcgagactgctcagcctaaagcactgcctatcgatggttacgatgtctatatcgacaatgcgaagaagaatacggagaaagtggctgagacaacattcactcacgacttcggaactgatgacaagcagcagcacaccatccgcgttgacgtttactatacagtgaagtcgaagagcgtgaagggtggcgtgaccaagttcctcatcgcagttgctggcatcaacgagaacactgtaggacgtatcgaaatgcgccagggtgagaacgaactcaccgtgactggcgagaacgtagaatcggtagagctcgtgtcggctgctggagcagtagtggcaaaggcaaagggcgacaccgtttcgctcaacggcgtgcctgcaggcatgtatgtggtgaaggctgttgtggcgggtgagaccgtgatacgcaaggttctgctcactaagtagtaaaaatagtactcactgaataattgtttttaagcagtttaatcactattttcgtacacttatgctataattgaagacgtttgtgcccatatcgacaaaagtggggttgtgtattgcgtaatttatgattaattttgcatcgacaacaatagagttaaacttagatttgaccaacacaaactcttctatatatataaacaaaaagaacgctggcaagtaatgtcttgtcagcgttcttttatgcttttaagataagcgatgtgtgttgtaacgtattgtttgtcagtgtgtttttaatctttggtacgttggtttatctcttttcttttaataagtcgcgaatctctgtgagcagcaattcttccttggttggcttcggttcttcaggtgtgggttctggcttagtatcctcttccttcttttttaggtttgccagtttgtttatgcccttcacgaggaggaacacgcagaaggcgataatggtgaagtcgatgatggtttgtataaatgcaccataattgatggtagcaggtttcatcgtttccatgccgagatctactgcaggcagctcaaacttcaagtcgctgaagttgacaccaccgatgagccatccgatagggggcatgatgatatcattaacgatagaagtaacaatctttccgaatgcaccgccgataatcacacctacagccatatcgaccgcattaccctttacggcgaatgccttgaactcatttagtatttttcccatagtttctgtttgttaattgtttaattcctaatgtctgattgtatgtttcttgtttctaactatcttattttgcaaagtgtatatagcaaactgcgcttattatatataatgtatatagcccagtgaaattatatagcgattttttaaataatttaatacctctattggctgcaaaattagaaaataattattaactttgcgctcgataaagaaaaaaatgctcaaaagtattgctttttgaatgtttcagttcattggcaagtactgtggagcttgaaagtaagatttattttcaaccattaattaaaatattaaaaaatgacaaaagttgctattaacggcttcggccgtatcggtcgtctggctttccgtcagatgtttgaggcagagggttatgaggtggttgctatcaacgaccttacatctccaaaaatgttggctcaccttcttaagtatgatacagctcagggtggcttcgctggcaagttcggtgagggcaagcacactgtagaggcaacagacaactctatcatcgttgatggtaaggaaatcactatctatgctaagccaaacgctgctgagcttccttggggcgagcttggtgttgacgtagtactcgagtgcacaggtttctacacatcaaaggagaaggcttctgctcacatcgcagcaggtgctaagaaggttgttatctctgctcctgctggtaacgatctcccaactatcgtttacaacacaaaccacaagactttgactccagccgacacagttatttctgcagcttcttgtacaactaactgcttggctcctatggcttacgctttgaacaagtatgcagctatccagtcaggtatcatgtctactatccacgcttacacaggtgaccagatgattctcgacggtcctcagcgcaagggcgacctccgtcgttcacgtgcaggtgctcagaacatcgttcctaactctactggtgctgctaaggctatcggtttggttatccctgagttgaatggtaagttgatcggttctgcacagcgtgttccaactccaacaggttctacaactatcctcgttgctgttgttaagggtaaggacgtaactgtagagggtatcaacgctgctatgaaggctgcttctaacgagagcttcggttacaacgatgagcagatcgtttcttctgatatcatcggtatgcgtttcggttcactcttcgatgctactcagacaatggttagcaagatcgacgaggatacatatcaggtacaggtagtttcttggtacgacaatgagaactcttatacttctcagatggttcgtactatcaagtacctcgctgagttgaaataattcgttgactcgatttacgacaacatatataagcctggcattgtaaaatgccaggctttttgtatcaatacccctcctgaagcctcatttatgggtttctaactccatttcttctattccttttttagcggtatcagaaactttttgtaactttgccagcatgaaacaaacgatgataacgatattgggtcctacggcaagcggaaagaccgctgtggcagcagcactcgcgttgcgcactgagggcgagataatcagtgccgactcgcgccaggtgtaccgccgcatggacatcggaacgggcaaggacttggccgactacgaggttgacggtcagcacattccgtatcatcttatcgacatagccgaaccaggcacaaagtacaatctgttccagtatcagcaggacttccatgaagcctacgctgatatccgtagacgtggcaagcagccgatactctgcggaggcacggggctatacattgaagccgtgttgagcggttatcaactctcaccagtgccgcagaatcaagcgttgcgcgaagctcttgccggaaagtcgcttgccgaactcaccgaaatgcttgtagaactgaagcgccgtagcgggtcgaacatgcacaatcagaccgacgtggacactgcccagcgtgccatccgcgccatcgagatagagacatacaacatcgaacaccctacgtccgagcgccaactgccgcccatcgactccattgtcgtgggcatcaatatcgaccgcgacctgcgacgcgagaagataacgcgtcgcctcaaagcacgtctcgacgaaggcatggctgacgagatacgtgcgctgataaacgagggcatcgaccccgaagaccttatatattatggtttagagtacaaatacatcacagaatatgtcgtgggcagactctcttacgaggagatgttccgacaattggagatagccatacatcagtttgcgaagcgacagatgacgtggttccgcggaatggaacgtcgcggatacaccatacattggattgatgcaacgctgccgatggagcagaaggtggagcagatattaaaattacaaacgatatgattaacgacgaccgttggggcatactctactgcccgaaacatgagacattcaactccggcaaacgctgggagaagattgagcgatgcctgaaggcaaacggcatcgagtacgactacttgcagagcgaaaactcggcaagtgtggagcgtttggtgaagatgatgatcaataacggctacaagacaatcgtcatcgtgggtggcgactcggctcttaacgatgcagtcaactgtctgatgctcaccgagaaacgcatacgcgacaatatagcactcggcgtgatacccaacggactgatgaacgacttcgcccacttctggggatttcgcgagagcgactacgagcagacaatcaagtggctcaaacagcgtcgtgtgcgcaagattgaccttggctgcatacgctataccaacaagcatggtgaggcatgtcgtcgctatttcctcaactgtatcaatatcggactcattgccgcaataatgaacctgcgccgacagacacgccattacttcggttcgcgtacactctcattcattttctcgttcatactcatgatattccagcgcctggagtataagatgcacttgaagataaactccgacaccgtgaagcgcaacgtgatgaccgtatgcataggcaacgcccccggatacggacagacacctaacgccgtgccgtacaacggactactcgatgtgagcgtggtttatcaccccggcatgacgcagctcattgaaggtttctacctcttcgtgcgcggaaagttcctcaatcatcgcagcgttcatccgttccgcacacgcaaggtagatgtgcttgaggcacataaagcactcgtgggtatcgacggcagactgatgaaaacccccgtcggaccattctccgtgagtgtggagcaggaggttatcaacttcttaatacccgagtaaatacaaacgttttcatagctaaatcctcacattttgctggcaatagggcaaaatgtgaggttttttttaaatagttaatgttttattttgtgcataaacatatttttactacctttggtttcgtaaggtagcaatgccttttttgaaagactactacacttattatagctaactaataatgaaccttaatcataaatctatgagttatttgagattcgaaaaagctctgatgacaaacctcgaagagtcggtgccacgtgagttgttgcgtacaaatcgttcgggagcatattcgtgctctaccattgtcgattgtaatacgcgcaaatatcacggcttgctcgtcgtacccgtaccggaacttgacgacgagaaccacgtgctcctctcgtcactcgaccccacggttatacagcatggtgctgagttcaacctcggtttgcacaagtatcagggcaacaactacagtccgaaaggtcacaaatatatacgcgagttcgattgtgacaaagtgccgacaacactctaccgcgtaggtggcgttgttctgaagaaagaagtggtgttccagcactacgaagaccgcatccttattcgttacacccttgttgatgcacattctgcaacgacactccgtttccgtccgttccttgctttccgtagcgtgcgccagtttacgcacgagaattcagtggcttcacgcgagtacacagaagtaacaaacggcatcaagactcgtatgtacgcaggctaccccgagctttacatgcagtttagtaagaaggtggaattcgtcttccagcccgattggtatcgcggtgtagaatatccgaaggagcaggagcgtggctacgcttctaacgaggatctctacgtaccaggctacttcgagatggatatcaagaagggcgagagcatcgtgttctcggcatctacatcagcttgcaagacaaccggtctgaagaaactcttccaggatgaagtggacgagcgttcaccacgcgacaacttcttccactgtcttgtgaatgccgcacaccagttccacaaccgcacaaataaggacgagcgttacatcctcgccggctatccttggttcaagtgtcgtgcacgcgatacgtttattgccctgcccggtctcacgctctcaatcgaggaggaagactacttcgaactcgtaatggaaacagccatgcgcggactctacgagtttatggcaggcaagccactcacagcaaagatttatgagatagaccaacctgacgtactgctttggtgcgtatgggcagtgcagcagtatgctaagcacgcaggtcgagagaaatgcaaccgcaagtatggtaagctgctctatgacatcttacattatattatagacaaccgccacccgaacctcaaactctgtgagaacggactcctttactcggaaggtaaggacaaggctgtgacatggatgaactctacagcaggcggacgccccgtagtaccgcgcacaggctacatcgtagagttcaacgctctgtggtacaacgcgctgaagttctgcgcttctatggcagccgactatggcgatgcaacagaggcagccgacttcgagcggtatgcaacactctgcggtaagtcgttcgttgaaaccttcgtcaacgaatacggctacctcttcgattatgtagagccgaaggataaccccgactggagcgttcgtccgaacatgatattcgccgtagcactcgactactcgccactcacaccagcacagcagaaagcagtactcgacgtatgcacacgcgaactcctcacaccgaagggcttgcgctcgctctcgccgaagagcggtggctacaacccgatgtacgttggtccgcagacacagcgcgactacgcttaccatcagggcacagcgtggccttggctcggcggcttctatatggaggcatgtctgaagatatacaagcgcacacgcctctcgttcatcgagcgtcagatggtgggctacgaagacgagatgacgagccactgcctcggcaccatccccgaactcttcgacggcaacccgccattccacggacgtggtgctatctcgttcgctatcaacgtggcagagatactgcgcacgctcgaactcttggaaaaatataaatattaaaataggaggataagtatatatgaaagtattaatgttcggatgggagtatcctcctcacgtatttggtggactcgctaccgctaacttcggaatttctcagggtctgcacgctcagggcgatgtcgagacagtgctctgtctgccgcatccgttcggcgacgaggatcgcagtgcctgccgtattgtggctatgaactgcgtgcctatcgcttggcgcgatgtcaactacgactatgtcaaggaacgtgttggcaacatcatggatccagattattactatcgtctgcgcgaccatatttatgccgacttcaactatatgcacgtcaacgaccttggctgcatggagttcgccggcggttacccgtctaacctgcacgaggagattaacaactactcaatcatagcaggcgtagtggctcgtacggaggatttcgacatcattcatgctcacgactggctcacctatccagccggcatcaacgctaagcacgtaagcggaaaaccgctctgcatacacgttcacgctaccgacttcgaccgctcacgcggtaaggtgaaccccacggtttacgccattgagaaggacggcatggacaacgccgactgcatcatgtgcgtgtcggaactcacacgtcagaccgttatccatcagtatcatcaggatccgcgcaagtgtttcacaatgcacaacgccgtttacccactgcgtcaggagttgcaggacatcccgcgcccagaccatacaggtaaggagaaggtcgtaaccttcctcggacgtatcacaatgcagaaaggtccagagtacttcgttgaggctgccaacatggtgctgcagcgtacacgcaacgtgcgcttctgtatggcaggcagcggcgatatgatggacgcaatgatttatctcgctgccgagcgtggcatcgccgaccgtttccacttcccgggcttcatgcgtggaaagcaagtgtacgagtgtctgaaggattcggatgtatatgtcatgccgtctgtttctgaaccgttcggtatctcgccgcttgaagcaatgcagtgcggcacgccgacaatcatttctaaacagtcgggttgtgccgaaatcctcgacaactgtataaaggttgactactgggatatccacgcacttgccgacgctatctactcaatatgtagcaacgagtcgctcttcacctacctcaaagaggaaggcaagcgcgaggtcgaccagattacatgggaaaaggtgggcgcacgcataaagaacctctacgagcgcgtcctcgctggcgacatctaagccaaaggcatatacacaacgagtaaatcacaatacaataatcttaaaagcaaacaataatgaaaacgatttgtttatatttcgagatacatcagaacatacagctgaagcgctatcgtttctttgatatcggcaccgaccactattactatgacgactatgaggacgagcgtctcatcactgatgtggctaaccgctcgtatatgccggctcttgaggctttgggcgaaatgctgaaggagcatcctggcttcttcaaggttgctttctcactctcaggcgtgggcatggagcagttggaaatccacgctccgcaggtgcttgagaagcttcaggaactcaaccagactggttgcgtagagttcctcgcagagccttactcacatggtcttgcttcgctcgccaacgaagagagcttcgctaaggaagtgaagcgccagtgtcagaagatgaaggagtacttcggcaaagagcctaaggtgcttcgcaactcttcgctcatctacagcgatgacatcggtgctcaggcagcacagatgggcttcaaaggtatgctcacagaaggcgcacgccacgtcctcggttggaagtcgccgcactatgtctacaactgtgcgctcgctcctaacctcaagctcttgttgcgcgacgtgaacctcagtgacgacatctctctgcgctttagcaatgtcgactgggagggctatccactcttcgccgacaactacgttgaccgcattgccaacttccccggtgaggagcacgtagtgaatatcttcatggagctttctgctcttggtgtggctcagccgttgtcgagcaacatcctcgacttcatcaaggctctgcccgaatgcgctaagcagcgcggtctcacattctcaacaccgagcgagatctgcgacacaatgccaagcgtaggcgcactcgatgtgcccgacacactctcttggactgatgaggagcgcgacgtgagctcttggctcggcaacccgatgcaacgcgaggcgttcaacaagctctatagcgtagccgaccgcgtgcgcatcgccgacgacccacgtatcaatcaggactgggactatctgcaggcttctaacaacttccgtcagatgactacaaagccatcgcaggtaggcatcgaccgtggcatctatgcatcgccgttcgacgcattcaccaactatatgaacatcctcggcgacttcatcgctcgcgttaattcgctctatcctgagtctgttgacaacgacgagctcgcttcgctcctcaccactatcaaaaatcaggacgaggagattgagatgaagaacaaggagattactcgtctgcagaccaagattgagaagattgaggctgcggaggagaagctccgcgctaagcttgagaagacaaaagctccgaaggcagaggctgctcctaaagcaaagaagcctgctgcaaagaagcctaagtctgctgaagtgaaggaggaggctaaggaaactgagccaaagaaggcttagcaattagcaattcagaacatatagaattagaaagatattaaggttcttgtacaataaatattggttataaaggtttaaatgctctactgcgtgatgcagtggagcatttttacttttatgtattttgtatttctctcttttgcattgtttcatgctaatatcaaacacgtgacaaaatcggcagcaagttatctgagtttttctacctgcggcacactgattattcctctgctgaagtgtagtactccgtcggcttgcattgcgttgagtgcctccgacacattaagacgacttgtgccgagttcctgcgccaggcgagtcatctttatacgtatcactttagaaccgacaggcgagaggcagcgtagtttaaggaacgtggcgatgcgtgcccgtagctcagtaggcattggatgccacagcttacgctctgctttctgtgccattgctgacacgatgttaagcatattgatacggaagatgataaactcgtcggagatatgcataaggtcgctctgaccgatctccacagtgtcgctttcgtctacagatgtgaacgtgcgtgtgtagtgtggcgagagtcccatgaagtgctctatttgtaggatgcagggagccttgatgtgttcttctatcgagtagctgtggtcgtcggcatgagccacaaccttcacatcgccattcaatagaatggcgatgttgttgcatttctctccctccttcttgattatttcgttcttgccgaacttcttgaagctgaacttcgtctgaccgataatctgcatgaggttgtcgcttgtgagaccctggaataatggtatctcgcgaagcttgtcgtagagattaagcatttacttcagaatcttgtccttcatcgacggcgaataccatacctgcaacttgccttcgtggtcgctatatatgagatatgccatcagttcggggtgctgtttgagcactttctgtgctttctccatacccatcaccatgaatgcggtagcataggcatcggcttcagcgcagcgttttgcgagcacagttgcggagaggatgctatgctgcacggggtagcccgtagcagggtcgatggtgtgagcgtacttcttgccaccacgatagtagaagttgcggtagtttccgctggtagccatagcgcgatccttcacgttaagtacggtctgcagctcgttgttcacgttcagtgagtcgtccgacggcttcgtcacgccaatcttccacggcagacgcttctcgctgataccgtgcgtaaccacctcgccgccaatctccaccatatagttctttatgccgcgcttctcaagcagacgcgctaccacgtcgcagccgtagcccttggcgatagcactacagtcgagcatcacgcgtgggtcggtcttttgtatgcggtggttcacgagcttcaccttgttatatccaacgatggcacgcagcgagtcgaccatgtgctttgtcggtgggttgcccgtcttgaagccgaacccccatgcgttcacgagcggagccacggtgatgtcgaatgctccgtcggtcttgtcagagatgctctctgccaggttgaacacgctctcgaacatattgttcgtctccacgtcctctccgcggttgatgtgcgagatgattgattccttgttgaacatcgacaaagcgtcgtctaccttctgtagttcggcgaggatgtctgcctgtatagacgagtcgttctgataagtgatgtgatagaacgtaccgaatatctgtcccttatcgtgctggtaaggcatactgcgctgctgacgcactatatagactgttccgataatgaggaacaggaggaatggcaagcgccatagaagtcttttgtttgtcataattatatctcaaagatgatgttgaacgtgccacccaaacggcttctgccttgttttccgtagcccggaacataccaagtgttgccaatcttgccgtcgttgtgtgctatgcgtctgcggtagcgcaccgaccaacccaagcggaacggacctgcaatctttgcatcgacaccgaacactgcctccatccaatgatagttggctttcatgcccttcacgttgtatgtgatatcgtcgccccatacagggtctttcaatccgttgcccgacacgtcaaacttgtagtaagtcatggcgtagcgtgcgccggcatagacgcggtaagcgtcgtgcttgttctttgcgatgttgaagtctgcacccacacgccagtagggagccgatgtcttgtatctgaggtttgttgtagggttgtcagcgtcggctgtgccgtagcctaactcgaacacggggaagtagcgatccttgaggttgatgcgcagcgcagcctcatactgtccgtagtcgctgaacgccagttgcgtcagtcccaccacgtcagccgacaccgccacacctcggaagaacgccaccgagtctttctccgccttcgctgatttctccgcaatggcttctttcctgctctgagccgatacagtcgtcactgcaatcagcagcaggctaattgctatgacccttgaaacgaatgaggaagtgcgctttaccgtcattatatgttaccttattataatttatcgttatgttttctatcgcctcagtggtgaacttcacgtccgtgatggtgtggaagaactgcggattgcagtcgaccgactcgaagtgtgggttgttctgcttctctacccacactgtgtccgttgtgctcacttcgctatccttctgctttatcgtgaagacatacacgtccgttgtgcgctgatagctcatcggcagtgcgatgctgtcgaagtcagcgagtcggttgatgacgacggtgtcgttgtccttgtagtctatagagcgtggcacggctacggtcagcgtgtcttccatctttgttatgtcgccgtcgagtcggaacgtggcgtacacgcgattgttcagcggacagtctatcgacgagcacgcagccagcatgaacagtgccaccattgctatggctgttgatatagttgatgttcgcatttgttgtttatgggtttgttttatttctcgcagcgcagtgtcttctctatctgatagtcgttgcggttctgcgacgagcgactaacgaggtcgccgatgaagcctgcgaggaaaaactgtgtgccgatcatcatcacggtgagcgcaatgaagaagtagggcgagtcggtgatgagtcgctgtgggatgccatgcgctaagcaccatagcttgtctacgcccaacgcaaccaccgagaggaagccgatgaagaacatcagcgtgccgaggaagccgaacacgtgcatcggtttcctgccgaagctcgaaagaaaccacagcgtgataaggtcgagatagccgttgaagaaacggttccaacccataaacttcgacttgccgaacttgcgtgcctgatggtgtaccggtttctcgccaatcttgtcgaagcccgcgttcttagccaggtatggtatgtagcggtgcatctcgccgtacacttcgatgttcttcactacgtccttgcggtaagccttcagtccgcagttgaagtcgtgcagattgtgtatgccgctcaccttgcgtgccgtagcattgaagagtttcgtaggtatagtcttcgagagcgggtcgccctgcttgcggttctgcttgtatccgctcacgaggtcatagccctcgtccacaatcatgtgatagagtgcaggtatctcgtcgggcgagtcctgcaggtcggcatccatagtgattactacgtcgccctcagcttccttgaagccgcagaagagtgccggactcttgccgtaattgcgacggaatttgatgcctttcactgctggtgacttctgcgagaggctttcgatgacgttccacgagttgtcggtggagccatcgtttacgaagattacttcgtatgtgaagttgtttgccttcattacgcgttcaatccacgcgtagagttcggggagcgactcctcctcgttgaacagaggaactactactgttatatccatattgtgttgagatgttgttatgttgaggtgttgagttgaggtgttgtgatgttgttgtgttgaggtggtgagatttgtttatctaaccaactgactatccaactatccaaccaactatctaacgacctaattaactatttatctaatatctgtttcttcttccaataagtgctatcggcaagctgagtgcggcaccgacgaagaggttttgcatcataaacatgaacgcccattgcacgggtgtaatcatcgttatgaggtccatactgctcttgatctcttctttcgacacgccgttctgttcgtagacgggtgctacttgcttcatcgttgtagtgatgagctcggcaaatgcgccattgtccaagaactggaagtaagcgtactgcaccagtgcgaacactaatgaggcgtagatgaacacgtagagcgagtaggcgtaagcgcggcggaacgatatcacgccgtagagagcttgcgtgcggaatgcagcaaggcgcttgcctacgagaaacggcgtagccaatgctaagatgttgccgatgagtccggcgtttagcatcattatacatgcgaagcttgctgcccacaacaatgcgagcagcaaggcatcttggcgtgcgaacgcctttagttgtacaaggtgtgctacgtttatcattagcgcatcactttaaatgtgttattaccctgcttcacgatgaacacgccgtgctgtgcatcgcccgcaaccactctgccgctgaggtcgtacacggtgtagggcagggtagggttgaatttgccatgcgtgcccgctgttacgttgccgatagctgtggtcgcctgacccttcacaccgattatagccatgtcgcgcacctgccatgttggagcctcgcttgtggtgcttgtgtagtggaacacgatgtttatcttcttgcctgcccatgcgctgaggtctatgtcgcccgagttaatgaaagtccaatctgcgcctttgggccatgcgaagccttcgagctttgtcgtcttgccctcgcagcgcacctccacgctgagtttctcgctcggtgtcttagcgtagttcacggcgtgactgaatgtcatggttgccgacttgtattcgctgaggtcaatctcgggtgtgacaaccgagctctctgctgcaaatttcgttgcgtatgtgtttgttccttcctttatggcacccgtgcctttccaaccatatgattttgtgagttcccatacctctacgccctctttcggatagagcggagtttcgatggtgcattcgccatcagatgtcttgaagtttgccagatatatacacatcctgctttcgtcgcccatctccacctttgttgttacggtcttggcagggtcgaactcgtagctgatgctgtcgccccagatgtactccatgaggttaggaaagtcgatgaacgggttgcggttgccctggatgctgtacacgatgttgttgcgcttagcctccaggtcgctcacggggtcttccttcgcccacttgatgtagaggtcggaagcccacttctgcagcgtaggatagtcgcccgtttcgagcgatttcagaccctccttcacccacttgtagtcctgatagcacgtagccatgtagaggtatgcacgagcgaagtcgccctgccactctgggtagggttgccacagctttgtgccgctattgcctgagccaacctttatcacgccgttgtcgtacgtcgcctttgtcaccacgcccatgccgtagttgctctttgtggtgttcgccttagcgtcgctcggcatgaggttgtagaggtctttgtaagcctggcgttgctcaccgccccaccagctcttcgggaacgagtgctcgatgttcatcgaggagcacgatgcgccccattcgccgaactccactttgttaggcgagtagcggtcgatgacgtatccgttgtcgttgtcggtgaggtagaagccccaccatgtagctgcaatgcccttgccgtagctcaaaacacgagcctcttttatgatgttgtgcacggcggtcttcagttccgctcccttcttgcctttcagtgcgtcgtagtagccctccggaatttgtgcagaggctgtgatagagacgatggtagcgataagtattatcgccaaggctttaatgtttgttcgtttcatttgtttcgatttgaatgtttcttctttgtataagtccgtattagaacaacaaagttaccactttaagctgaatatgttatatatataatgtgtaaaaatgcttaatcgcctatttcgttatctcgccgcagatgctacgccccatgaggctgcgtatagcgcgcacgtccttgtagtgcgcctgcaggaacattagtttggtgatggcactctccacggtgctgtcgccgccactcactacgcctgcatcttgtagctggaagcccgtgtcgtagcgtcccatcttcacgaagcctgctacgcactggctgatattcaccaccgtcacgccacgctgtgtggcgtccttcagcagtcgcatgagccatggcttctgtggagcgttgccgctgccgaagcttctcatcactatgccgcgcagctcgggtgcttcaagcatgtggcgcaccacgttctcttgaatgccagggaaaagcgagaataccactacgttcgggtccatggacatgtggggtatcatcggttttgaatagtcgggctttaggatgtagtgtgggttgaactggaactcgacacctgcttcgcacaggtgcggatagttgaacgagttgaaggcattgaagccgtcggcactctccttcgtgctacggttgccacgcagcagtctgccactgaagtatatgcacacctccggcaccatcggtcgaccatcctcgccgaatgccgctgccaactcaatgctcgtcagcaggttctccttgccgtccgtgcgcaactgtccgataggcagctgagagccagtgaggatgaccggcttagtgaggttttcgagcatgaacgacagagccgatgccgtgtaagccatagtgtcggtgccatgcagcacaacaaaaccatcgtaggcttcatagttgtcggcgatgatgcgcacaagctgggcccatcggcgcagactcatgtctgatgagtcgatgggtggtgtgaactgatatgtgtctacctccgtcggcaggagtgcaaattcggggaagttagacagaagatggtcgaagttcagcggttcgagggctcccgtgtcggggttgtgtcccataccgattgtgccaccggtgtagatcaataacaccttgttgagtcgtgggcttacttgcttgttattcatatttgaagaggcttatgacacattattgactaagccgatgcgagctctcgcctacatcgctataatcagtggtatgctattacccgacaaaattaattaatttttgtgacaatatacccgcttgcgctatgttttttatgtacttaatgcgtttagtgcattaactcttgtcaaatagaacgtctactttggtcgtcgtttagcgtccgcggtctgcgtggacggcgttcgcaatctgatcggacggcggacgcaatctgatcggatggcgttcgcaatctgcatggacggcgttcgcaatcagtatgggtggcgttcgccgtctttcgtcaaagcagtacatttagtttctaaaatatgataaatgagtctgtaaaaacttgtcagtatcagaaataagtagtatttttgcagacgatatttaaacatagacagaataattgttatgaagaatctcttctttttcccggccttgattgcaataatcttgcttatgggcagttgcaagtcggcacagaaagtagcttacttcaagaatatagactctataagccttgctgcttcaaagggtttgtacgatgctcgtattatgcctaaggatcaactgacaatcactgtcgtcacttcagatccggctacttcaaagcctttcaacctcgcaatgggcagcacgttgagcgctgacggcaaactgggaggctctaccggttcgctcatcccgtatcttgtaaataatgacggtaatattgaatttccggttgttggaactcttcatgtggcaggacttaccaagaacgagtgtgaggaactcataaagagcaaagtgaagccgtatcttgccgattcggagaatccagttgtcactgttgcaatgtcaagctatcgtgtgacggttgccggtgaggtgacatcgcccaaagtggtgcccgttacaacggagaagatgagtgtgcttgaggctcttgcccaggcaggcgatcttaccatctatggtcgtcgtgacaatgttattcttatacgtgagagagctgatggtcagaaagaattccatcgtatcaaccttaatgatgccaatattatcaattcgccgtactactatgtgcagcagaatgattatatctatgtggagcccaatagtaccaaggcaaagaactcggctattggtcagtctacgacgttgtggttcacgtttgttggtatcttgacgtctgtggcttcattggtagttaatattgttagaaattagtgctgttaagcatatgataagcgtcgggctatttgtcttggcgcttaatttttacctatacagtaacaatcttcaatcgaaacacatttaaacacataatagaagtatcgtggaaccgttgaaacatgaatgcggtgtggcaatgatacgattgctcaagccgcttgaatactatcaggagaagtacggcacgtggatgttcgcactcaacaaactctatctgatgatggagaaacagcacaaccgcggacaggaaggtgccggaatggcatgtgtaaaattcgacggaatgcccggaacagaatacatattccgtgagcgtgccgaaggcaaggatgccattaccgagatattcggacgcgtgcagaaagagtacgcccgactctcgcccgaactgctcgccgatgccgagtttgcaaagaaccatctgcccttcgccggacagctctacatgggacacctgcgctactccacgaccggaaagaagggactcgcatacgtgcatcctttcctgcgccgtaacaactggcaggctaaaaacctctgcatctgcggcaacttcaatatgactaatatcgacgagatattccagcagatgctcgcgcagggtatgttcccgcgcatctatagcgacggttacactctgctcgaactgatgggtcaccgcctcgaccgcgaagccgaacgcaactttgttgatgccaagaagctcggactcgaaggcatggacataaccagctatatcgacaaccatatggatatggcgaacgtgttgcgcaccacaatgcccaacttcgacggtggctacgtgatgtgcggactcactgggtcgggcgagatgttctctatgcgcgacccgtggggaatacgaccagcgttctactaccagaacgacgagttcgtagccgtagcatccgaacgcccagtgctgcaaacgacgttcgacctcgaatgtgacgatatcaaagagttgcagcccggcaatgcgctgctcgtgaaccgcaacggagaggtgcgcatggagcgcatactcgaacagcgcggcgactcggcttgctcgttcgaacgcatatacttcagtcgcggttccgaccgcgacatctatcgcgagcgcaaacgcctcggcgaactgctcgtaccgcaagtgctcgatgccgtagatggcgatatcaaccacaccgtgttctcgttcataccgaacacagctgaggtagcttactacggattgctctcgggcttcaagaaatgtctcaaccgacagaaggtgcagcagatacaacaactcgaccacgaaccgaccgacgaggaactgcacgctattctcgacacatacgtgcgctccgaaaaggtggcgataaaggacataaagctgcgcaccttcatcaccgaaggcaactcgcgcaacgacctcgcgtcgcacgtctacgacataacatacggatgcatagagcctggcgtagacaacctcgtggtgatagacgactctatcgtgcgcggaacgacgctcaaggagagcatactgcgcatcctcgaccgcctgcacccgaagaagattgtcgtcgtgtcgtcggctccgcagatacgctaccccgactattacggcatcgacatgccgcgtctggaggagttctgtgcctttcgtgccaccatcgaactgatacgcgagcgtggtatgaacgacctgctacagcgcgtctacgaggcgtgcaagctcgaactgctcaaacccaaaagcatgatgcgcaactgcgtgcgcgacatatacaaacccttcacagcggaggagataaaccgaaaagtggtagatatgctccgaccggaaggtctgaagacaccggtcgaactcgtgttccagtcgatagacggactgcatgaagccatccccgaccaccacggcgactggtacttcacaggcaagtatccaacgccaggcggaacaaaactctgcaaccaggcgttcgtcaacttcatcgaccgacagaagtagaacaaggcttcgcatacatacatcgaagttgagccttggcgttgtggcgaacacaagtagaatacacgttttgtggttataaagaagaggatgaattccgaaacaaccatgaacaaacacgccctgaaagggcaaaagtgaacacagaggatcgacttttgcgcttccagggcgtctgtgcgcgataaaactaacaacgaataaaaattaattcgagaagatatataaatatgagaaatgtaactttagtattggaagacggaaccaagttccacggaaagtcgttcggttatgaagcaccggtggcaggcgaggtagttttcaacactgctatgatgggctacccggagtcgctcaccgacccttcgtacgccggacagctaatgactctgacctatccgttggttggtaactatggtgtgccaccgttcaccattgaggagaacggactgcctacattcatggagagtgacaaaatctacgcttcggctatcatcgtggctgactacagcgagcagtactgccattggaatgccgtagagagtcttgccgagtggctcaaacgtgagcatgtaccgggcatcaccggcatcgacacgcgcgaacttactaaggtgctgcgcgagcacggcgttatgatgggtaagatcctcttcgacgacgagcccgagaacgtgccgacagccgagtatgctggagttaatttcgtggataaggtgagctgcaaggagattatccgctacaacgatggtgctaagaagagggtggtgctcgtcgactgcggcgtgaaggccaacatcatccgctgcctcatcaaccgcggttgcgaggtgattcgtgtgccttggaactacgactataccgacatggagttcgatggattgttccttgccaacggtcctggcgaccccgacatgtgcgaggctgcagtgaagattatccagaagcagatgagcctctccgacaagcctatctgcggtatctgcatgggcaaccagctcctcgctaaggcagcaggcgcacgtatctacaagctaaagtacggccaccgctcacacaaccagccggtgcgcatggtaggcacagagaagtgcttcgtaacatcgcaaaaccacggctacgcagtagacgctaagacactcggtgccgattgggaagagctcttcgtgaatatgaacgacggatcgaacgagggcattcgccacaagtcgaagccttggttctcaagccagttccacccggaggcttgctcaggtccggttgatacagagtttatgttcgacaagttcgtagaggctatgaactaactgaagagtgaagaacaaaaagtgaaaatccaaatgtttaagttttgtgttgtcgggcgtagcctgattaaacattaaacattaaacattaatcattaaacattagaataaatgaaagacgaaaatataaagaaagtgttattgctcggttcgggtgccttgaagattggcgaagcgggcgagttcgactactctggttcgcaggcgctgaaggctctgcgcgaagagggcatagaaacagtgctcatcaacccgaacatcgcaacagtgcagacatcggaaggcgttgccgaccagatatatttccttcccgtacagccttacttcgtagaggaagtaatcaagaaggagcgtcctgacggcatcctcctctcgttcggtggacagaccgcgctcaactgcggcgttgaactctaccgcaatggcatcctcgacaagtacaacgtgcgtgtgctcggtacaccggtgcaggctatcatcgacaccgaagaccgtgaactcttcgttgagaagctcgacgagatcggcgtaaagactatcaagagcgaggcttgcgagaacatggagcaggcacgcaaggcggctgccgaactcggttacccggtcatcatccgtgctgcttacgctctcggcggactcggctcgggtttcgctgacaacgaggaagaactcgtgaaaatcgctgagaaggcgttctcgttctctccgcaggtgctcgtcgagaagagtctcaagggctggaaggagatagagtacgaggtggtgcgcgaccgctacgacaactgtatcacagtctgcaacatggagaacttcgacccactcggtatccacactggcgagtctatcgttatcgctccgtcgcagacactcaccaactctgaatatcacaagctgcgtgctcttgccatcaagattatccgccacatcggcatcgtgggcgagtgtaacgtgcagtacgccttcgacccgcagtcggaagactaccgcgtaatcgaggtgaacgctcgtctgagccgttcttctgctctcgcttctaaggctacgggctatccgcttgccttcgttgcagcaaagctcggtatgggctacggcttgttcgagttgaagaactcggtaacaaagaccacatccgcattcttcgagcctgcactcgactatgttgtctgcaagattccgcgttgggacctctctaagttccgcggcgtagataaggagctcggctcttcaatgaagtcggtaggcgaggtgatggctatcggtcgcaacttcgaggaggctatccagaagggtctgcgcatgattggtcagggtatgcacggcttcgtagagaataaggaacttgagattgacgatatcgacgcagctctgcgcgagccgaccgacaaacgtgtgttcgtcatctctaaggctatgcataagggctacaccgtcgaccagattcacgaacttacaaagatcgacaagtggttcctcgagaaactccagcacatcatcgacatcgatgaggctatgaagaagtgcaacatcaacactctcgacaaggagctcctgcgcaccgctaaggtgtacggtttcaccgacttccagattgcgcgtgccgttggtcttgaggacgagctcaagtcgatgcgcaaggcgtcgctcgtcgttcgcaaccgtcgtaagaactacggcatcctgccggttgttaagcagattgacaccctggctgccgagtatcctgcacagaccaactatctgtacgttacatacgctggcgtgaagagcgatatcaccttcgagaacgacaagcgttctatcatcgtgctcggttcgggtgcttatcgcatcggctcttctgtagagttcgactggtgtggcgttcaggctctgaacactatccgcaaggagggctaccgctcggttatgatcaactataaccccgagaccgtgtctaccgactacgatatgtgcgaccgtctctacttcgacgagcttaccttcgagcgcgttatggatatcatcgacctcgagcagcctaacggcgtaatcgtgtctactggcggtcagattcctaacaacctcgctgtgctccttgacgagcagcacgtgcctatcctcggtacaaaggctcaggacatcgacaacgccgaggaccg

SEQ ID NO: 512 - DNA, 11524 bp, unidentified
  source 1..11524: mol_type = unassigned DNA
atgaaaaaaggacataaatacggcacacaccgggtaatctccccgaagggcgtgcttccccagccggcagacaagctggacaacaacatggacgagatctacgacaacgagattctgatcgacgtacagaccctcaacatcgactcggccagcttcacccagatctcgaaccaggccggaggcgacaaagccaaaatcgccgagatcatgctcgacatcgtcgaaaaacaaggcaaacaccgcaatccggtaaccggatcgggcggcatgctgctgggcacggtcgagaagatcggcgacgcgctcgtcggcaagaccgacctcaaggtaggcgacaagatcgccacgctggtttcgctgtcgctgactccgctgcggatcgacaagatcaaggagattcgccccgatgtcgatcaggtcgatatcgacggcaaggcgatcctgttcgaaagcggcatctacgccaaaataccttccgacctgcccgaaaagctggtaatgtcggccctcgacgtggccggagctccggcacaggtagccaaactggttcgccccggcaacacggtgctgatcatcggcgcagccggcaaatccggcatgctctgctgctacgaggctcgcaagcgggtcggcgtaacgggcaaagtgatcggactctgttacagtcccgaggagaaggagcgcctggacaagctgggcttctgccacgaggtcgtctgcatggacgctcgtcagccgattccggtactcgaaaagattacggagctgaccaatggcgaaatgtgcgacatcaccatcaacaacgtgaatgttcccgacaccgaaatgaccagcatcctctgtaccaagaacacgggcatcgtctatttcttctcgatggccacgagcttcacgaaagccgctctcggcgccgaaggcgtcggcagcgacgtgacgatgattatcggaaacggctatacgaagggacatgcggagatcacgcttcaggagttccgcgaatgcgaagccttgagaaagatattcaccgagctgtacgcctaaccgatacgaacgacacctgccgcccttcctcatcgtccccgccggcgcaaattaaaaaagcaggacggatccgacttaccgaggcagggaggcactcatcgaaaatagccgtccgccgcatccgttttcgatgagcggacggcgaaaacaaacgctcgctacatcggcgaaaaaacacaaatcacaacaacgtaacaaccgaacgaaacaaataaaatcaaatgacacctctcacacccgcaatgagccgcagaaaagaattctttcccgaagtgaccgaccagcaatggaacgattggcactggcaggtaaaaaacaggattgagaccgtagatgagctcaagaaatacatcaagctgaccgctgaagaggaggaaggcatccgtgaatcgctcaaaacgctccgcatggccatcacgccctactacctgacgctgatcgatccggaaaatccgcactgcccgatccgcaagcaggccattcctaccgtcgaggagctgaagcgctcgcccgccgacctggaagatcccctgcatgaggacagcgactcgcccgtaccgggtctgacgcaccgctaccccgaccgggtactgttcctgattaccgacatgtgctcgatgtactgccgtcactgcacgcgccgccgcttcgccggccagcacgactgtgcaacccccgagaaacagatcgacgactgcatcgactacatcgcccgtacaccgcaggtacgcgacgtgctgctctcgggcggcgacgccctgctggtgagcgacgaaaaactcgaatatatcatcagccgtctgcgtgccattccccacgtggagatcatccgcatcggctcgcgcaccccggtcgtgctgcctcaacgcatcacaccggaattggtgaacatgctcaagaaataccacccgatctggctgaacacccacttcaatcatccgaacgaagtgacccccgaatcgaagcaggcctgcgcacgtctggccgacgccggtattcccctgggcaaccagtcggtgttgctgcgcggtgtgaacgactgcacgcacatcatgaaaaagctcgtgcacgaactggtgaagatgcgtgtgcgtccctactatatttatatctgcgacctgtcgctgggcatcggacacttccgcactccggtatcgaaaggcatcgaaatcatcgagaacctccggggacacacctcgggttacgccgttccgacattcgtcgtggacgctccgggcggtggtggcaagattcctgtcatgccgaactatgtcatctcgcaggctccgaaccgcgtggtactccgcaactacgaaggtgtgatcacgacctatacggaaccgaccgactacaaggacgaatgccactgcgaagagtgcgagaaagcacgtcggaaggaaggcgtggccgagttgttgagcggcggacgtctttcgctcgagccgtccgaattgagccgcaagacccgtaaccacaaccattagaacgtaacgctgcaagaccagcccgcaccggattgggattcgtaacgaacatatcggatttcggcagcctggccatcgtcggtctggagaagaacacgggtaaaaccgaatgtctgaactacattctgggacaactcggtggtcaggcggaccgtttcgccctgacttcggtcggaatcgacggcgagagccgggatcaggtgtgccagacggcgaagcccgagatcgagattcccgagggaatgatcttcgtcacctcggagaaacactaccgggaaaaacggctcgcggccgaggtcctcgacgtgagtctggagcggacggcgctcgggcggctgataacggcccgcgcgaggatgagcggcaaattgctgctctccggaccttcggacacggcgggcctgaaagccctgatcgaccggctcaaagcccggggcgtaggcacgacgatcgtggacggcgccctgtcgcggttgagcctggcttcgccggcggtcaccgaagcgatgatcctggccacgggagctgccgtcgcgggaaatattcccgaactggtccgcaagacgaaatacgtttacgaactgatcggaatcgaagagatagaggaggcgctgcgtacccggctcgatcctctgacacagggggtgtgggccgtcagcgacggcggcgaaccgatcgacctcgaattaccctcggtgctgatgctcgaacggagcggagagaacctgttccggcacggccggcggatttacgccatcggcatcgtcacggacaagctgttccaactgctgcgaacgcaacaacgggaagtggagttgatcgtccgcgactttacgcgggtgttcgcctcgcccgaagcgttttacgccttcctgcgccggggacaccggatcagggtggtacaccgcagccggctgctggccgtcacggtcaatccgacggctccgtcggggctggtgctcgactcccgacggttgtgcgaagcgatgcaggaggcgttgcaaataccggtttacgacgtaaagaaaatgcccgaataggaacgaatacggctcccacgaacagaatcgaggatcttaaaatcccctccgaggaggggagtcaaaggaaggtcagacgctctgacacggcagaaggccgtgaaataaatacgcgaaaccgtgcaaaattgcatcgaataaccagaaaacgaatgcgactcaaagaggccatacaacataccagcggactgcgctgcgtcgtcgaaggaatggagatctgttcctccgtcgggcgacgtatgctccatgaaatgacatggctcgacaaggagtcggcgatcacggaggaacacgaccgtatcgcctcggtgctgcgcctgctcgaaaccgaagagggacgcgaccgcaccgaaacgattcgccgcaaactggccctgctgcgcgacatccgctcaacgatcgaacgcacgggcggcaactgcgtattcgacgacatcgaactgttcgaattgaagtttttcgcgctgctggcggaagagcttcgaccactggcttcgcaagggcatcttgcggaacttcccgagctgaacggggtcgtcgatctgctcgatccggaaggcaaccggctcccccatttcttcgtctatgacgcctactcggaggagctgacgaccctgcgcaaacagatcaaagcacgcaaacaggccggagccgacgagtctcaagtgcaggagctctatttccgcagcgtggaaatcgaagaccgcattcgggagagactctccgtcgaattgcggaaataccacgaagcgttgcaacaggcactcgaccggatgggatggctcgatgtggtgatcgccaaggcgatgcaggcccgcgactggggccttacccgtcccgcgataacgcaggacacgacctccttccgaggcttgttcaaccccgagttgcggatttcgctcgaagcggccgggaagcgattccagcccgtgaacatccgcctgacgacgggacctacggtaatcaccggcgccaacatgtcgggcaaaaccgtgttgctgcacagcgtcgagctggcccagtacatgctgcaattcggattttacattgcggccgaaagggcggaaatagcccttgtggacgaagtgcactgctccgtcggcgacggacaggatcaattgagcggcctttcgtccttcgcggccgagatgatgcggatggacgaactggccaaaagcgtccgggcaggcaggcgggtgctggctctcatcgacgaaccggcccgcacgaccaatccggtcgaaggaagggcgatcgtgaacggtgtcctcgaatttctggccgactacgaagtcccttcgctcgtgaccacccactacaacggcatcgcggctccgtgctgcaagctgaaggtaaaaggcttctcggaaacgaacgcggaggagaagatcacgctgaaaaacatcaacgatttcatagactactcgctcgaggaggtcacgacggacgaagttccgcacgaagcgatccggatcgcccgtattctgggcatcgacccggagatcctccggcgaatcgaacgcaacgaagaactcaaaaacaaccaatgacggcagccgtacggcacagcctacatgaacgatatgaaaagcaaattaggaatagactttaaccaggtggaacacgcccggagcgtagcgcgcaagatcgccgacggggtgcaggattttgtggaaggttatacgacggtagccgtcgagcgaacgctgtgccgtctgatcggcatcgacggcgtggatgccaacgcggtaccgctgccgaacgtggtggtggaagagctgcgggagaaaaacgtattgggcgaaggcgccctgttcttcctcggcaacgcgatcgtcgaaacgggactcacaccccagcaaatcgccgaagagatcgctgccggcaaactcgacatcacccgctcggccgtatgtacggcagccgagcgcgaagcggcgctgaaaccgtatatcgacgccagcatcgccaaaatcgcagccaaccgccagcgtcgagaaaactacatcgccaccatcggcgaagggccgcgcccctacctctacgtaatcgtagcgacgggtaacatctacgaagatgtcgtacaggcgcaggccgcagcccgacagggcgccgacatcatcgccgtaatccgcactacgggccaaagtctgctcgactacgtgccctacggcgcgacgaccgagggattcggcggcacgttcgccacgcaggagaacttccggatcatgcgcaaggctctggacgaagtaggcgaagaggtcggccgctacatccgcctttgcaactactgctcgggactctgcatgcccgagatcgccgtaatgggtgcactcgaaggtctggatgtgatgctcaacgacgccctgtacggcattctgttccgcgacatcaacatgcagcgcacgctggtcgatcaatatatgtcgcgcgtaatcaacggcttcgccggcgtaatcatcaacacgggcgaggacaactacctcaccacggccgacgcggtcgaggaagcccacacggtgctggcttccgacctgatcaacgaacaactggccctgctggccggcctgcccgaggagcaaatgggtctgggacacgccttcgagatggatccgatgctcgaaaacggcttcctctacgagctggcgcaggcgcagatgacccgcgagatcttccccaaggctccgctgaaatacatgccgccgacgaagttcatgaccggcaacatcttccggggacatatccaggacgcactgttcaacatggtgggcatctggacttcgcagggcatccagttgttaggtatgccgaccgaagccatccacaccccgttcatgtcggaccgctacctttccatcgagaacgcccgctacatcttcaacaacatgaagaacatcggcgacgaagtggagttcaaggaaggcggactgatccgcaaacgtgccaaggaggtgttggacaaagctaccgcactgctcgaacgcctcgaaaaagagggactcttctcggcgctcgagaagggaatcttcgccgacatcaaacgccccatgaacggcggcaagggtctggagggcgtgagcagcaagggccgcaactactacaaccccttcgtggagattatgaaaaacggcagtcgcgccgcagcgaaaaaatgatattccgatgctgcaagcacgaccaaacgccttattttaactatattagcatattgattctatgagtggaggattatattcaaccgaaggcagggatttcgaccagaccctcgacctgaaaaagataaagccctacggcgacacgatgaacgacggcaaaacgcagttgagtttcacactgcccgtgcccgccggcgacgaagccatcgaagcggccaaacagttgatgaaaaagatgggcttcgagaacccgcaggtggtattccaccgggagctgacggccggttacacgttcttcaactgctacggaagctgtacccatacggtcgattattcgaatatccatgtcccgaaagtcgaatcgaccaaatgggacatggccgaaacggacagcttcatccgcgagcagatcggccgcccgatcgtggtgatcggcgccagcaccggcacggacgcccatacggtaggtatcgacgccattatgaacatgaaaggcttcgcaggtcactacggactggagcgctacgagatgttcgaagccctcaacatgggcagccaggtaaccaacgaagagttcatcgccaaagcgatcgaactcaaggccgacgccctgctggtttcgcagacggtgacccagaaggacattcatatcaagaacctcacggagctggtcgaaatgctcgaagccgaagggctgcgcgacaaagtgattctggcgtgcggcggcccgcgcatctcgcacgaactggccaaagagctgggctatgacgccggcttcggcatgaacacctacgccgacgacgtggcgtcgttcatcgcccaggagatggcccgcagaatgcaccgcaaataggaaacggtcccggattccagaaccgccccgtttcaagacagtacgacgaacagacaaaaacgacataaatctatggaaaaggaacagatcagagaaatcatcgccaaacgcgtggcgatggaactcaaagacggcgacgtggtgaacctcggtatcggactgccgacggccgtccccgattacctgccggaaggcgttcaaatcttcctgcagagcgaaaacggcctgctcggtatgggcccgacccccgcaccgggcgaggaagaccccgaatttatcaatgccggcggcggattcgtcacggccctcgagggcgcctcgtgcttcgacagcgccacctcgttcggcatcatccgcggcggtcatgtgaacgcttcggtactgggagccttgcaggtcgatgaaaaaggcgacctggccaactggatcatcccgggcaagaaagctcccggcatgggcggtgcgatggacctgctcacgggtgccgacaaggtgatccttgccatggagcacacggccaaaggcgcacccaaaatcctcaagaaatgtacgctgccgctgacggccaaaggctccgtgaacatgatcgtaaccgaaatgggcgtcatggagattaccccggaaggcatcgtgctgacggaaatcaaccccgaattcaccgtcgaacaggttcaggccgctaccgaagcgcacctgatcgtgtccaaggatcttaaacccatgaaaaaataggcccgccatgatcaaaacaggagataaataccgtcacgaagtgacctatacgcaggaaggcgtgatcgctttcgccgaaatcacgggcgacaaaaacccgatccacctcgatccggaattcgcagccaaaaccccgttcggccgtcccatcgtgcacggattcctttcggcctccgtattctcgaaggtcttcggaatgctcttcccgggacagggcaccatctatctctcgcaggagatgtcgttccgtgcacccgtcttcgccggggagaaatatacagccgaattcgaagtaatcgacgtaaacaccgaaaaacacatcggtacaatcaaatgcctgctgctcgatgctgccggcaaagagtgcatcacgggcaccgccaaactcaaacacaacaaagaattcatctaaaaagagataaccatgaaaagacttgagaacagagtcgccatcgtcacgggcggcacagccggtatcggcgaggcaacggcactgcgtttcgcacgcgaaggcgcacaggtagtcgtatgggcacgtaacgaagcccgcggtaaggaaatggagaaaaaagccgcagccgaagggctcgccatcaccttcgacaaggtcgatacgagcgatttcgaggcggtaaccgctgcggccaagcgcgtcgccgacaagttcggcaagatcgacatcctgatcaacaatgccggcatcaccaacgacagcacgctcaagaaaatgaccgtcgaacagtggcagaacgtgatcgacgtcaatctttcgggcacgttctactgctgcaaggccgtgttgaactacatgctcgaagccggctacggacgcatcgtcaatgcctcgtcggtagtagggctttacggcaacttcggccagaccaactacgtggccacgaaagccggcctgatcggtatgaccaaaacgatggcccgcgaactgggacgtaagggtatcacggtcaatgccgtagccccgggcttcatcgaaaccgaaatggttgccaagatgcctgagaacgtactcgacggcatgcgggccaaagttcccgtaggtcgcctgggtcgtcccgaggagatcgccgccgcctatctctacctcgcatccgacgaagcggcctacgtcaatggtgccgttttgagcgtagatggcggtatgactgtttaaaatcattaaaaaaccatacttataaaatgaatttcgaattgaccaaaaccgagcagctgttccggcaaatgatccgcgaatttgccgaaaacgaggtgaaacctctggctgccgaaatcgacgaagaggagcgtttccctgtggaaaccgtagagaaaatggcaaaactgggaatcttcggtattcccttccccgtcaactacggcggtgcaggcggcaacaacatcctttattcgatggccgtcgaagagctgtcgcgcgtatgcgccactacgggcgtggtcgtatcggcacacacgtcgctctgcgccgctccgatttatgagcacggtaccgaagaacagaaaatgaaatacctgcccaagctctgctcgggcgaatggctcggcgctttcggccttacggagcccaacgccggtacggatgctgcggcacagcagaccacggcagtcgatgcaggcgaccactatatcctgaacggcaacaaaatcttcatcaccaacgccgcttacgcacacgtttatatcgtgatggcgatgaccgacaagtcgcagggtacgcgcggtatctcagcattcatcgtcgagcgcgacttccccggtttctcgatcggcaagaaagagaagaagatgggtatccgcggttcggcgacctgcgagctgattttcgagaactgcatcgttcccaaggagaatctgctcggcaaggtcggcaagggcttcagcatcgctatgaagaccctcgatggcggccgtgtcggtatcgcttcgcaagccctcggcatcgcacagggggcgatggacgaaaccgtgaaatacgtcaaggagcgcaaacagttcggacggacgatcggacagttccagaacacccagttccaactggcagacctggataccaaaatcgaagctgcccgcctgctggtacgtgccgcagccttcaagaaagaccagaagctcccgttctcggtcgatgccgcccgggccaagctctttgcagcggaaaccgcaatggaagtgacgaccaaggccgtgcaattccacggcggatacggctacacgcgcgaataccccgttgagcgcatgatgcgcgatgccaagatcaccgagatttacgaaggtacttccgaagtacagcggatggtgatttcgtcggcactgttgaaatagcggcgggcgaccgtgcatccggttccggaataaaccccgaagccggtcgtactcccctcgcaaggacacataaggtaaaaacaataaaaaacagatattcgaatgaaaattgtagtttgtataaaacaggttcccgatacgacggaaatccgcctcgatcccgttacgggaacgctgatccgcgacggtgtgcccagcatcatgaaccccgacgacaaggcgggactcgaaatggctctggagctgaaagaccagtacggcgcacacgtcaccgttatcacgatgggtcctccgcaggccgacgacatcctgcgcgaagccttcgcaatgggtgccgaccgtgcgattcatctgagcgaccgcaaattcgccggtgccgatacgctggcgacttcgaacgctatcgccggtgctctccgcatgctggagttcgacctggtaattaccggtcgtcaggctatcgacggcgacacggcccaggtaggcccgcagatcgccgaacacctcggtctgccgcaggtgacctacctcgaaggcattaaatacgaaggaggaaaccggctcgtcgtcaagaaatggacggaagaggggtatcagttgctcgaggtggaaaccccgtgcgtggtaaccgtactctcttcggccaaccggccccgttatatgtcggtacgcggcatcgtggaggcatacgacaagcaggtggaagtctggggtttcgacaacatctccgtcgaagagtcgaaactcggtcttgccggttcgccgacccgcgtcttcaaatccttcacgaagggtgcgaaatccgcaggtaaggtcttcgagctggagccggccgaagcagccgatctgatcgtcgagaagttgcaagaaaaattcataatctga

SEQ ID NO: 513 - DNA, 20395 bp, unidentified
  source 1..20395: mol_type = unassigned DNA
atgaacatcacgctatccaacacgcgcctcttccgcggcattggcagtgatgagctgccgctgctgctgcaatgtctcggcgcggtgcaaaagcactacgaccggggcgagaccattctcgctgagggcgcgccgaccgagcagctcggcatggtgctctccggcatggccatgatcggctatgacgatgtctggggcaaccacagcctgctcggtcacgtcagccccggtgaggtgtttgccgagccctatgcctgcatcccgggcgagccgctgctcatcagcgtgaccgcctcggaggacaccgaggtgctgtttttgaacatcggcaaggtgctcacgacgtgcacgaacgcctgcccgtttcacgccaagctcatccagaacctgctgaccgtgtgcgcggctaagaacctgcagctctcgcagcgtatcctgcacacggcgccgaagggcatccgcgcccggctcatgtcgtacttttccgagtgcgtcaagcgcgccgggcaatacagctttgacattccctacaaccgccagcagctggccgactatctgggcgtggaccgcagcgccatgtgcagcgagctgtcacggatgcagcgcgaggggctgctgagctatcacaagaaccatttttccgtgcacgaagcactggagtaaatcgacgaaaggcggacacaacatgacgagagaagaatacgcaaagcggatgaaaaagcaccccgactgggccccgggccgggacgcgatcgaggcggcctttgccaagcgctatcccaagacggagccggtgtgctttgagagcgagctgcacgaccgcgcggccttcggcggcgacgaatatctcgacggcttcgccgtctatgacacgggcaggggctatcagcacatcgtcacctacggcatgagcgagctgtatccgagcatggcggccttcggcgccgagtacagcaagtggggctatgagatgacgatgaaggtgcgcgagagctatgccgagaccggcacatgggcgctcgatctgctggcccagctggcgcgctacacgttccagaccggcaatttcttcgagccgggcgcctacatccccggcgacggcagctccctgcacccggagctgggctcggccatcacggggctggccatcgtcagcgacacgaccgtcgccccgatcgaaacggtacacggcagggttgcatttttgcagctcgtcggtctcacgcagccggagctggacgcgatcacgcgcgacccggacacactgaccggcatcctggagcggatgcgcgcggagaatccggagctggtgctcgacatgcgcagaacgagatccttcgtgtgattgcgccagcgctggcagttttctccgtggatcggcgcaaatgtctgcaaagcccacgaacgaatcaggagaatagatacacatgaagtacattttctgcacggacatgaccgggcgccaaaaacatactcggcccgacggtcagtgctttctgtcagcagagctcccgcaggtcatgcgcgacgggcttgaacaaacggcacacacactgtcacaggcagaacggcggcacaagctgccgggcattttgctgattatgcaatatatctgcctggtgatcggcatggtctgctgcggcgggcttgtgcgtgcacttgcgggcagatcggtcagtctggcacaggcctaccacaatgcgcctggcattttctggaccggtgcggtcacattgtgcatagccggtctgctcgcgctctggcagcgtgttcagacggcttccgccgaccgcagcagcagtgtccaggcagcccgaaggaaaatgaacgatcagatccgcggtgcaaaagcttatctcggcattcccggccaggttcagcccgttgacattcttctgttcgactaccgcagggaagcgcagggcctgaagatcctcaacacggcacataataccgagttctggctctaccgggatcaaaacagcctctgcatcgccgacgagtatcaggtatacgcacttgcactgcaggaactgcagcgtatccgcgttgtgcagcgtgtgatcccgatgaccggctggaacaaaggcggccaaccagatcaggcacgttttcggcgcagcggtgtgatgtgtcacgagggcgcagctattggcctgcagttttgctgcgcattggaactgacccataacggcgagcaatacgcattgctgtttcctggctatgagcttccggaaatccagaatctgacaagattgtccgcacctgagctgcctgcggcagcacctgaaaagaagcgaaaagcagcacccaaaaagcatccaccgaacggcgaaaaaatccgccccctcttttactggcggattccgaagggagaaaatgtggcgctgtggttcacgcctttggcagacgtagagtttcaggcagcgcacccacggctgtacacttttctggtcatccttgcgatcgcgctgctggtagccccgatggcaggatatttgtctctgacaacgcactatttccccgacgcaaacagcccatggctgcttttgggtggcgttggtggtttcctggtcgggtgcagtctgttcaacatccttgcagcgtggctgcatcagtactttggacaaattgtaacgatttgtttggcagtgctcggtttcgcactgatggctatcagctgccttctgctgtgatcgatcgcttttcatcggtcggacaaaaaaccgtgaccttgaacagaggtctaaggaacgcatccgtgactttgagcagacgcacggtgaaattgcctgcaggatatatcaaacccttgaaaaaaacagccgcaccgtgacgccacggtgcggctgtttggttctcacagcttgggatcagttatcctttttcgcgatcagctccgcgcaggcttcgccgaggatgcggatgcccttttcgatcacctcatcgctgctgttggagtaattgatgcggaatgtgctgacattgcgctccttttcatagaacgggtcgcccgggcagatagcgacgcccttcgcgagcgcaacacggtaaagatcgactgcggacatgccattcggcagcttggcccacaggaacatgccgccctccgtcggcgtgaactccacgccctccgggagatatttgcgcatgcagtccatcatcagctccgccttgtgcttgtagagcactttcgtcttctcgatgtgcgcgtcgatgtcgttgtccgcgaggtactgtgccagaacgagctgcgagaagatgttggtgtgcaggtcggcagtcgccttgtagctcaggagcttttcacgcagcgccttgttgcgcacgcacacccagccgatgcgcatgccgggggcgacgatcttggagaatgtgccgagcatgcagcactgctcgcccagctccttgccgaaactgtcggtcgcggtgccggaaaaacgcagctcacgatacgggttatcctccagcacgatgatgtccgtgccccggaagatctccacgacgcggtcatgcactttctgactgtagctcaggccggtggggttctggaagttcgggatgacataagcaaacttcgcatccgggttggcctgcacggtcgccgcaagctcatcacagtcgatgccgtcggggttgatggtgacaggcaggatctcgggatcaaagaagtggaacgactgcagcgcgacgaggtaggtcgggttctcgacgatcaccttatcaccggggtcgagcatgcacgcgccgatcatcgtcagcacctgctgcgagccgttggtgatgatgatgtcgtcggccgtcacgccgtagacgcccatcgtctcatagcgctttgcaacccactcgcgcagcggcagatagccctgcgtgccgctgtactggagcgccatgacgccgtttttctccagcaccttgtgtgttgccttgtccatcgcctcgaccgggaaagagaccggattcggcagaccgcccgcaaaagaaatcaggtcgggagatgccgctgccgcaagaatgcttgccgtaaactcgccctgaaagtcgggacgcatgatttttttggaaagtctgggattcataatgatttctcctttcatgggcacttgtaatggtcggtcgatccgacaggcaagccctcataatgtgtcgattatagcgcacgcgattgcggcatgacaaggcgttgcaaaaaaatctgcgttctaacggaaagccgcgcttatgcaaagcagggttctgtatagaacgctcattcatctttgatatactgctcttccacctgctgctgcgcccggatcagcacttgccgtgcacgtgcgtatgcaccggcatccagcagccgaaccgcattcgtaatcgcgtgaaacaggggaaaacataatcgcatcgtatccataattgtcccttctgttgtgcgtcaaaaatgcgtcatttctgcattttatattaatatgacgctagaatttgtcaatccttcgtcatggagggtcggcaaaatgaaagacaacctgagccggtacacattgcgcatcgatcaggcgctgctggacaagctcggctacatcgcagaatacgaaagccggacaaaaaaccgcgaactcgagcagatgatcaaaaagcgcatccgggactttgaacaggaacacggcgagatcgacctgcacgacatatccaagctctgacaaaccatcagccgcaccgtggtgtcacggtgcggctgattctttcctgtatgcagggtcaatccagcacggaccggaggaacgactccagcgcggccagatacgcttccctgtccaccatgtagctcagcccatgtcccgcgcctggcacgaccagcagatgcttattgtgcgccgcgcagtgcgcatagttttcgtgccccatgtcgcaggggacgaagcggtcgtccccgccatgaatcagcagcacaggaatgtcgcaatgcgccagcgcatccgtgaccgtggcggactccaggtcgaaaccgccgaacagtttcccgcccaggcggatcaactggtagaccgggaaaatggggagatgctggtcgcggatgaccttgcgaatgatcgcggcgggcgagctgtacccgcagtcggccacgatgccgacaacattgcgcgggagattcaatccgccggccatcagcacggtcgccgcgcccatcgacaccccgtacagcaagatcttcgtgtccgcgccgaagcgcccgacggcgtagttcacccacgcacggcagtcatagcgctcctgaatgccaaacgtgaggcacctgccctcgctcttcccgtgcgcgcgctgatcgaccagcagaacgtgatagccgccctgcacggcgatctgcgccccgccgcagaagtcccgctccgcgccgctcttgtagccgtgcatcatgatctgcaccggtgcgcccggccggccggcgtagtatttcccgtgcaggtgcagcccgtcgtcggatcggatccatacgtcctcatatgggagcgcgagcacggtccggaccatctgcgtcatcgcttcccgatagggggcatactgctccgtgtccggcaggcggaagagatccgcctccgtctgtttgggcacggaaaagcagaggcggtagcacacataggatgcagccagaatgaaaataagaaggatcaagacgctccacacaacgaccatgttcgtttcctccggacattttttgacgcatggagcagtatagcacaggaaaagaaggctgccaaatgaaagtacaaaaaatcgccgctgcaatatgcagcccacggcgacgttgcttggtcagccaattttgaggacgtaacgaaaaaaccgacagctcgaacgagctgtcggtttttgagcggagcggactttgctccgacgtggcggagagtaagggattcgaacccctgtggcgttgccgcctaacggttttcaagaccgccccgttatgaccacttcggtaactctccacatatgcagatagagaaacaagacgccgaaatcggcgtcttgtctttggcggagaaggagggatttgaaccctcgcgccgcttatcacagcctactcccttagcaggggagccccttcggccacttgggtacttctccaagccgaattccactttccatatggacgcgcggccagcgcgctgcattatagtagcatattcggcagcggatgtcaacttgttttttggttgacaccgtacgcaaaatgcgttataagtgtgccagagcaaaggagagacatgatatgcgctatacatccatacttttcgacctcgacggcacgctgctcgacacgctcgccgacctgaccgccgccatgaaccgcacgctcacccgccacggcctgccggagcgcacgcggcagcagatgcgcaccgcgctcggcaacggggcccggcggctgatggagctgtccgtgccagccggaacggacagtgcgctgttcgaaacgctgctggcggaatacaacgccgactacgccgcccactgccgcatcgagactgccccctaccccggtgtcgccgcgctgctgcttaagctgcacgcgcaggggcgcaaactcgccatcgtatccaacaagccggacgaggccgtgcgcgcgctgcgggcagatttctttgccgacgcagtcccgatcgccgtcggtgagacggcggccatccggcgcaagccggcgccggacatgctgctggccgccatggaaaagctcggtgccgaccctgacaagacggtctttgtcggcgattccgaggtcgacattgccacggcgcgcgcggcaaatctgccgtgtatcagcgtgctgtggggctttcgtgaccgggacgtgctcgagcgcgccggtgcgcagcagtttgctgccaacatcgcgcagctgcaggcacttctgggctgaaaaagatccgccggatggttccggcggatttttcatgccgttttgcgcgctcagcccttctttttcatgaattgtcctgccgcgcgcatcatgaggcgcttggtgccggcagtctcgaattccacctcgagcagcgcgtcgccgcccatgggctggatcttcgtgacgacaccggagccgaacgcgcggtgcgtgactcggtcaccgacggcgaaggccggtgcagccttgcccgccggctttgccgcaggcggcgcggggcgcatgggcggcttgcgccgcggctccggtgcggagaccgtataggcgcgcggcgcgctctggcgcggcgggtactgctgctggtcgcggctgggctcggaatagccgtagccgcgcggaacgttgagcttctgaatatcgtcctccgggatctcctcgacaaagcgggagacgcggtttgccgtcgtgcggccgaagagcatgcgctggcgggcacacgtgaggatgaggtgctcgcgcgcgcgggtaagcgcgacgtagcagagacggcgctcctcctccatctcgtccggctcgccgatacagcgcaggccggggaaaatgccctcctcgcagccgacgatgaacaccgtcggaaattccaggcccttggccgcgtgcatggtcatgagcgtgacacagtccatggactggtcgtagttatcgaggtcggtatagagcgcgacctcgtcgaggaatcccgcgagcgtaggatcatcggcctccttgacgaaggcgatgatgttcgacttgagctcctgcacgttctcgatgcgtgcagcatcctcggccgtgttcttttcctcgagtgcgcggacgtaaccgctgcgctccacgaccagatcatagagctcgtccggcggcatggttttggcctgttcctgcagctcctcgatcaggatggcaaactggcgcaggcgcatctggctgcgctgcagctcaggataggcatccgcgtggcggataatgtcaaagaggcttgtctgctgcgcgtttgcgagctgtgcggccgtttcgaccgtgcgcgcgccgatgccgcgggcaggtgtgttgatgatgcgcgtcaggcgcaggtcatcacccggcgtctggatgacgcacaggtaggccagcatgtccttgacctccgcgcggtcgaaaaagcgcgtgccgccgatgatgcggtacgggatgccgttgcgcttgaaggcgtattcgagctggttgctctgcgcgttcatgcggtagagcacggcgtggtcgcggaagttcatgccgtggccgaaatcgtccatgatcttcgtggccacatagcgcgcctcgtcgttctcgttcgtggcgcagtagagcgtgagcgggtcaccggcttcggcctttgtccagagcgttttgccctttcggccggtgttgttggcgatgacgtggttggccgcgtccagaatgcggccggtgctgcggtagttctgctcgaggcggatggtgcgggcatttttatactgcttttcaaagctgagaatgttctcgatcgtcgcaccgcggaacttgtagatgctctggtcatcgtccccgacgacgcagatgttgccccagccgtccgccagcagggccgcaagccggtactgcagattgttcgtgtcctgatactcgtcgatgagcacgtagcggaaacgccgctgccagtgctcacgcacgtccgcatgctcgtcgagcaggcggacggtgttgtagatgaggtcgtcaaaatccatcgccccggcggaaaacaggcgctgccagtaggtctggtacacctcgccgatgcggatgctgcgcggattgtgcgtggcctgtgcacgcgccagatactgctccggcgtgatgccggcatccttggcacggctgatctccgtgagcacggcgcgatatgggaacgccttctcgtcgagattcatctctttgagaatgcgcttgacgaccgcctgactgtccgatgtgtcgtagatcgtgaagctgtttgggtagccgagcttgtccgcgtccttccgcaggatgcgcacgcacgcggagtggaacgtcgaggcccagatatccgccgcagcctcgggcccgagcatgcgctcgatgcggtccttgagctcgtctgccgctttgttcgtgaacgtgatggcgatgatgcgccacggctcgaccggctcgaccgccgctgcccgctgcgcgcgccggcgctcgtccggcgtcaggtccgtgcgctcgagcagcgcaaggtccgcctccgtcgccgcgtccggcacctcgtcggtgtcggacccgcggccgtactggatgagattcgcgatccggtggatgagcaccgtagttttaccgctgccggcaccagccagcagcagcagtgggccttccgtggtcaggaccgcttgcctctgcatatcgttcaggttcgcgaagtccgccgcaatgaagcgtctgcgcgcctgcacatagcgttgttcaaaagtcatcgttgtattcatagcgtctgattttaacacattttcccccgggaaacaaggcccgcattatccggcgcggagattgacaatcgcaggatgcggaagtaaaataaagaaaatttgatgattgaggtgcatcttatggacatcatctggcatggccattcttgctttgagctggtctccggcggctacagcgccgtcatcgacccgtttcaggacaccagcgtcggcacggcctatccccacgtgcggctgacggcggacgccgtctatatcagccacgaggaccgcgaccacaacttccgggaaggcgtcacgctgcgcagcaacagcaagacaaacccgtttgccgtcacggagctcgagacgtaccacgacatcatgcgcggccgtctgcgcggcatgaacacggtgcgcatcttcgccgccgagggcatgcgcgtggcgcacttgggcgatctgggcgcgaagcccacgccagagcagatgcagcagctgcaggggctcgacgcgatgatgatccccgtcggcggcatctacacaatcgagccggacaccgcctactatctctgcgagcaactgcagccgcgcgtcatcatcccgatgcactttcaggcgcccggccacagcaaccaccgtctgcgcgcaccggaggacttcaccggcatttttgagggcaacggcgcaaatgtccagcgctatgacaccaaccgcatgacgctcacaccggacatgccggcgcaggtcgtcatcttccgccgcccggaataaaaaacacgatacagcaaagccgccgctccccgatggggagcggcggccgttttctctgcaattatttcagaatgtccttcagctcgtgcataccatggttggtggtgacgacaaccacgcgatcaccgagctcgatggcatcgttgccggacgggacgcggcacttgccgcggcggatgattgaggcaacgagcacggagtccttgagcttgagcgccttgagcggcacatcgagaaactggctctcggcacgcacgataaattccagcgcctcggcctgcccgtcggccaccatgcgcagcgtctccacgccgctgctgtgcgcagagttctgcatccagcggacatactccacaatgcggccggccgtcacgtccgccggctggataatcgtcgtcagaccatacgattccgcgagctggatgaaattgtcctcatccaccttggtgacgatcttcggtactttctcatgatacgcgaacgaggagatgatgaggttcgtctcgtccgactccgtgagcgtgacgagcgcgtccgcctccggcaggccctcctcgcgcagaacgtccggcttcgtaccgtcggcgcagatgatggttgcctccggcaggagcgttttcatgacgcggcagcgggccgggtcgcgctcgatgatcgtcgagtggatgtgcatgcgcgtcagctccagcgccagccgctcggcaatacggccgccaccgacgatgatgacgctctcggcctcgtggcgaaactcaccgatcttgcgaaacaattcgtgcagctcgtgcggtgcaccgaccacggtgacatagtctccggcggcgagcacaaagtcgccgttcgggatcgtgacgctgccctcacgctccacggcacagatgaggatgccgtcgctgtagcggccgcggaaatcgttcagacgcaggccgtcgagcttgctgccctcgcgcagcttgaactccacgagctccacgaggccattggcaaacggctcgaccttcgtagcggccgggaagcgcagcgtacgcgagatttctttggcggaggtacgctctggattgatggacagactcagccccagctcatcctgcagcagcaccacgtcctgataatactcctcgtcgcgcacgcgcgcgatcgtatgcgtggcaccgagcttgcgcccgaccatgcagctgatgaggttcgtctcgtccgaagtcgtcgcggcgataagcaggtcggcatccgcaacgttggcgatgcgcagctggtccacattcgcgcggccctcgaccacgatcacatccagcgtggaggaaatataggcagcgcgctcaggatcactctcgacgacggtaatgtcatgcccttctgtcagaagctgttccgcaatggcataacccacgcggccagcgcccacgatcacaattttcatattctaagctctccagttatcatgttcaggcccctagtccgggtgactaaatattatagcagacattctcccatgtttcaacagcgacgcaggaaaattatatcgtgtttgtttgtgaataaacagttaaaattctgcaaaaccggcgtcctgccgcttgacggatgctggcgccgcgcttatcattatgttctaatactttttttagtatctaaggctgcgccgccgtgcagcgtccatataaaggagcatcccatccatgctggaactgaaaaacatcaccaaggtctatgaggccggcacgacgcaggttgaggcgctcaagggcatcgacatcgcctttcgtgagagcgagttcgtcgcaattctgggccagtccggctgcggcaagaccacgctgctgaacatcatcggcggtctggaccgctatacttccggcgacctcatcatcaacggccgctctacgaaggagtacgacgaccgcgactgggacacgtaccgcaaccactccatcggcttcgtctttcagagctacaacctcatcccgcaccagagtgtgctggctaacgtcgagctcgcgctgacgctctcgggcgtctcgggcgaggagcgacgtgcgcgcgccgtcgaggcgctggaaaaggtcggtctgggcgaccagctcgacaaggcgccgaaccagatgtccggcggccagatgcagcgcgtggccatcgcgcgcgccatcgtcaacaaccctgacatcctgctcgccgacgagccgaccggcgcgctcgacagcgaaacgagcgtacagatcatgaatctgctgcaggagattgcaaaagataagctcatcatcatggtcacgcacaacccggagctggcgtcgaaatacgccacgcgcaccgtgcgcctgctcgacggcaggatcgtcggcgacgacaacccgtgcacggagtccgaaacgtctgcacccgtgacggtcaaggtcaaggagcatacatccatgagctttgcgacggccatgagcctgtcgctgcacaacctcatgacgaaaaaggcccgcacgctgctcaccgcgttcgcagggtctatcggcatcatcggcatcgcgctcattttgtcgctttcgcacggcttccagtcgtacattgacaccgtacaggagcagacgctctcatcctacccgctgacgattgaggcaaaccccgtggacatgtccggaatgctctcggccatgtcaggcgcaaaagatgacagcaaagacgcgcatgatctcgacaaggtctatgccaacacggtcatgtacagtatgctcaactccatggtcagcagcgcgaccggccagtcgaacaacctgccggaattcaagaaatacctcgaaaaccccgacaacaagatccacgactacatcagcggcatccagtacacgtatgacatgggcttcgccgtctacaccgaagatcccaacggcaccgtcatcaaggccgatacgaccgagctgctgcaaaacgttatgaagtccatgtacggcggcgactacacggcctactttgactccatgggcggcttttactccgggttcaacgtctggcaggagctgctctccggcgaggacggcgagctcgtgagcgcctcgacgcagaatcagtacgacgtgatctacggctcctggccgcaggattacaacgaggtcgtgctcgttgtggataagaacaacgagatctccgacctgacgctctatgccctcgggcttgagagcatggacgacatcagcaacgccatgatgcagtccatgagcaaaaagcagatcgacacgacgcaaaacagctggagctatgaggatctgtgcggccgcagcttcaagctcatcctcccgtcggagggctatgtggccagcggctccggctacacggacatcagtcagacgaccgacggtctgcgccggctttacaacaacgattccgtcggcgtacagctcaaaattgtcggcatcgtgcgtccggccaagggcagcgtgaccagcaatacctacggctccatcggctacacctccgccctgacggactacgccatcgatcaggccgacggcaccgagatcatccagaagcagctcgcgaacccggacgtggacgtgttcaccggctccgcgttcccgaacgccgcgaccgccacgaccgagcagaaggtcgccgccgcacaggcctatctcaaccagctgagcgtggacgaccgtgcgaccgtctaccgcaagtgcatgaccacgccggatgacgccacgctcgacgccgcgctcacgcagaccatggcaaccttcacccgtgacgaggccaaagagatggccgacaacggcatcttcgaggccagcggcaagaccgcgcagcagatgaaagaaatgatcgacgccatggacgacgagacgttcacgcgctttttccgcccgtacctgcgcgcgatgctgtccatgcagatgcagcaggagactgtcaagtcctacagcggcatgacctcgcaggagatcatctcggccatcaacgccaagggcatcagccgcagccagtacgtggacgtgtacgacaactacgtcgcctcctccgccagcggctcgacctatcagagcaacctcaaaaagctcggctacgtcgacaaggattccccgagtgccatcaacatctacgcttccagctttgaaaataaggaccgcatctccgactgtatcgacgactacaacgccgacaatccggacaatcaaatcagcttcaccgattacatcggcctgctcatgagcagcatcacgacgatcatcaacgccatcagctatgtgctcatcggctttgtggccatctccctcgtcgtgtcgtcgatcatgatcggcatcatcacctacatctccgtgctcgagcgcacgaaggagatcggcatcctgcgctcgatcggtgcaagcaagcaggatatctcgcgcgtcttcaacgctgagacgctcatcgagggcttcacagccggcgtaatgggcatcctatgtacgctgatcttgctgatcccgattaatctcatcgtgcaccatctgaccggtctgccgactctgagcgccattttgccggtgctcggcgccattttgctgattctcatcagcatggcgctgacgttcatcgcgggcctcatcccgtccggcatggccgccaaaaaagacccggtcgtcgcgctgcgcaccgaataaacccaaaacgcatatttccaccacctccgtgcaaactaggagcagcctacatttgcacggaggttttgcaatatgaagcagaaaattcttgcggtccttggcgcgctggcgctgtgtacggcgctcgtcccggcgagctttgccgaacaggacacagccggtaccgcacccgtggccgaaaatctggagctgaccacattccgcaacacgtccatcggcggcacgctgagcgccaacgcgcccgacggcagcccgctcacctttcgcatcacgaccgagcccattaagggcacggtaacgctcaccgacagcggcacgttcgtctacacgcccgctgacggcaagcgcgggcgcgactacttcggcttccgcgccgccgacagcagcggcaacgaatcgcaggaggcgaccgtcctcatctccatcaagaagcagaagccggacgtcacctacagcgacatggccggccgcccggaggaatacgccgccgtcatgctcgccgagcaggggctgtgcgtcggccggcaggttggcgagcagtatctcttcgaccccgacagcacaatgccgcgtgatgagtttctcgccatgtgcacgcatctgaccggcacggagacactgcagggcgtgctctcgaccggcttcggagacgacgagcagatcccggcgtgggccaagacctacgtcgcgaccgcggtcatgaacggagacatcgacggctgctctgacggcacggcaatcgtgttcgacgcgcagcgcggcatcactgcggccgaggccgccgtcatgctcagcaactttctcgacccctcccccgccgccgcgctcgagagcgcctatattcccgattgggcgtgcactgccgtgtcgagcctgacgtcctgcggcgtgtatccggacggcagcgactgcgcggcccccattacgcgcgccgaggcggcacagatgctgctgggcgcatatgagctgctgcaaaagcgataaaaaagcacggaccgtttccgactcggaaacggtccgtttctttatgcatctttcaaaatcgcgtccagctccgccgggctgagctccgggaacggacgcacaggcgcgggatttgcttcgtgcgcaccgatgcacttttccatccagaccatggaataccacgtgccgaacttatagccgcagcgcggaaactccccgacaagccggtagccgaggtgcgcatgaaactgtgcgctgtttttcgtcaggtgcgcatcgtccgccccgtccggataaccgatgcaggcatagagattttgaatgtgctgtgcgcgcagcaccgcctcaagcgcggcatacagccgcctgccggttccccgatgccgctgatcctcgcgcaggtaaatgctcatctccgccgcccagtcataggcggcgcggctgccgaacggcccggcataggcatagccaacgagctcaccgccgcgctctgcgaccagatacggataccgccggagcgtggcgcgcatacgcgcggcaaattcctcaacatcgggcacagtatactcgaacgtgatggccgttttttccacatacggcgcatagattgtgcgcagtgcgggcgcgtcgctcaggcgcacggtgcggatacacagtgctgtgtcgtccatgttcttctcactttccgctgtcgccgtagtttgcgagcacgcgcgcggacggatcgtccacgtcgcagccggcccatgacttgttcggcatccagaaatcgacgatcatgtgtgcctgaccggggtaatactgctcaaacagctcacggtagagcagggattccttggtgaacggctgcgcaaagtcgtacttccggcgcagggtctcgaattcctcgtccgtgtacttgtcctctgcgtaggccttgagatcgtcgaccatggagtggcccactgcgtcgctgaaggccgccttctcacgcatgagaatgtcgtgcggcagccagtcgccctcaaaggcgtggcgcagcaggtacttgcccttgccgtagacgttgcacttcttggccgggtcgatggacatgacatactgcacgaagtccagatcgccgaacggcacgcgggcctcgagactgttgacggaaatgcagcggtcagcgcgcaggacatcgtacatatgcagctcgcggatgcgcttggcggactcctcctggaacgccgccgggctgggcgcgaagtctgtgtacttgtagccgaagagctcatcggaaatttcgcccgtgagtagcacgcgcaggtcggtctgctcgtggatagccttgcagacaaggtacatgccgatgctcgcgcggatggtcgtgatgtcataggtaccgagcagcgccacgacctccgggagcgcctgaatcacatcttcgggcgtgatgatgacctcggtatggtcggcgtgcagatactccgccacctcgcgggcgtacttgaggtcgatggcatcggcacgcatgccgatggcgaacgtgcggatgggctttttgagcagctttgccgagatggcgcacacaaggctgctgtccagcccaccggagagcaggaagccgagcggcgcgtcggcatcgaggcgcttttccacgcctgcgatgagcttctcgcggatgtgggtgcagacggtctccagatcgtcctcacagacggcgtcgacctgcgtcatgtcgcggtagcaggtgaacttgccgtcggcataatagtgtccgggaggaaacggcatgacatcgtgcacaaggccgacgaggtttttcgcctcgctggcaaagacgatcgcgccctcggcgtcatagccgtagtacagcgggcggataccgatggggtcgcgcgccgcgacgagaccgccgcgcttggcgtcgtagatgaccatggcaaactccgcatcgagcccgcggaacatatccagcccctcgcgctcgtagagcggaagcaggatctcgcaatcggattcactctcgaacgtctcgccctcggcaatgagccgctcacgaatgggacggaagccgtagatctcgccgttgcacacgagcgcactgccgtcgcgcgtgaacggctgcatcccctccggatgcaggcccatgatggccaggcggtggaaaccgagcgtcgccgcgccgatgtgcagcatacgcgtatcgtccgggccgcgagaaatggtcttgtcaaagccggcgcgcagatcctgcgcgctgatggacgagccgagataaccgatgatggaacacatgattttttcctcctgaatgaatcaaaaatacgcagctactgtccggcaataggacgagtagctgcgtatcgtggtgccacctattttacttctcacgggttctaacaaaccgcaccgggataacgtccggctttgacggcgcacctactgaggctctcgcccgttcagattgcagctcgggagtgttcttcacacaggctctgttatgcggctcgcaccgtcccgcactcgctgggaatgatcgcccgtgctacttttctccgtcaacgcttttgacagaagtatggaattgaaagaagagaaaaaagaaagagaaaacgatgttaacgcacgctgaacagcagatcaccgtaggacgggaccggccacttgtcggacggcgtcatggtctcgagctggtcgatcgtgatacgcagctccgccatggcggagaaaaccttgtcacggtagtagttcgccagtgcctgactgccctcaaccgtcttggcgcccatgagcgcctcatccaggctgcggaccttgcggtaggcgtcgcccagcagcgcagacatttcggggatgatgctctcttcatacgagcagtccgccgtaacggacacggcgtggatcgccgtggcggtctcggacagctcgcgcagatagctgctgacggcgggcatgatgtcgcgccgcgccatctcgagcatcgtcagcgcctcgatgttgaggatcttgctgtagttttcgaggtggatctcatagcgggcctccatctcggtgcgggtgtagacgcggtgcttggtaaagagcgccacgttcttgtcggcgaggtaatacggcagtgcctccggcgtcgtgcgcaggttcagcaggccacggcgctcagcctccgccagccaggcatcgtcatagccgttgccgttaaagaggatgcgcttgtgcttgatgagcacgctgcggatgagcgcctgcaggtcggcctcgaagtccttgctgccctcgagcgcgtcagcaaactgctcgaggctctcggcgaccgccgtgttgagcacgacgttgatgccggaaatggaagccgaggaaccgggcatgcggaactcgaacttgttgccggtgaacgcaaacggagaggtgcggttgcggtcggtcgtgtccttggggaagcgcggcagcgcatgcacgccgatcttcagcagctccttttcctggccggcgtaggacgtctcgttgacgatggcatcaagaatgttctcgatctcatcgccgacgtacatcgacacgacggctgggggcgcttcattcgcgccgagacggtggtcgttcgcggccgacgccacgctgatgcgcagcatatcctgataatcatccaccgcctggatcaccgcgcacaggaagagcagaaactgtgcgttctcggccggcgtctcgccgggctcgagcaggttcatgccggtgttggtggtcagggaccagttgttgtgcttgccggaaccgttgacaccggcaaacggcttttcatgcagcaggcagaccatgccgtggcgcgcggccaccttctgcatgatctccatcgtcagctggttctggtcggcggcgatgttgccggtcgtgaacaccggcgcgagctcgtgctgcgcgggcgccacttcgttgtgctcggtcttggcgtaaacaccgagcttccagagctcctcgtccagatccttcatgaacgccgcaacgcgcggcttgatgctgccgaaatagtgatcgtccagctcctggcctttcggcggcttggcaccgaagagcgtgcggccggtatagatcaggtccttgcgcttgtcatacacggacttgtcgatcaggaagtactcctgctcggggccgacggtcgtgcgcacggcggtcacgtcctcgttgccgaacagatggatcacacgcagggcctgccggttgagcgcctcggcgctgcgcagcagcggcgtctttttatcgagcgcctcgccgccgtaagagcagaacgccgtcgggatgcacagcacattatctttaatgaatgcataggacgtcgggtcccaggcggtgtagccgcgcgcctcaaacgttgcgcgcaggccgccggacgggaagctggacgcatccggctcgccgcggacgagctccttgccggagaactccatgatcacctgaccgccgccgcagggagagatgaaactgtcgtgcttctcggcggtgatgccggtcatcggctggaaccagtgcgtgaagtgcgtggcgcctttttcgatcgcccagtctttcatggcattggccacgatacgcgcggcatcgtcatcgagacgcttgcccttttccatcgtcgcctgcacctgccggtacgtttccttcggcagacgctcgcgcatgactgcatcgttaaataccatggatccaaaaatgtcagagatcttttccat

SEQ ID NO: 514 - DNA, 10492 bp, unidentified
  source 1..10492: mol_type = unassigned DNA
ttatacaaactgacactgccatacagatacaccactgtcctggaacacatcatgtaaacgctcctgcagctgtttggccgtaataccctttttcaatacaacctgaaggaaaccaccgcctcctgcaccacagatcatctttgcatcaataagatcttctactgccttaaaaatcatatcaatacaaacatttgtacatccgctgtcaaggcgcttgcttaattcccaatgttcatttaaaagtcttgcaaacgcatccacatcgcccttttcaagttcaaagcgcattaaaaccgcacttcgctggatttcatacagaacctcgactgcatctggattgccgcccacatatcgtcctactacatcgcgcagcaaatttctggcaagacgacgctgtccagaataaatcagacagaaacgctcatcaagttctttcattgtctgttcactcacaacacatggcatgcagctaatttgctgtctaacttctgcatgagatgtcaccatcttaattccaggtgcaagaccgcctacctgatcctgccagcctcctcctgtcgacataatctgttccatacaaagcacacggttatatagttcatcctcttccagcctgcgtcctgtaatttcatataatgctttcacacatgcaccggcaaggatagaagatgttccaagaccagagccacgaggaatattgattacccgtgtagataaatataagccactgcccaactgatttgtaatctcctcaattgaacgattctcactatacggaatcagaccacatgcaattaatgctgccttatgaagtgcaaatggatcatatggattacttgaatcctgcagctgcttaatatcagtaaattcctgctctgctccactgtctgcactagccaaaactatcttgtttccttcaatgcgacgtgcaattgcctcaattgggtaatttccatctaataatactgctgcattcagaacagttccgccatgctccatgcagtatggcggagtatcactccaaccacctccccagtttacacgaactggcagacgaacaattgactcttccttagaaagcttcgtttccctgctgcactcaagtcctgcgacagctgtatccaaaactgcctttccaatcgtatcaaaacaattgtccatatatgtttcttttacaagtgacagcatgtaataaatacgaatcttacggctaaactgttcaagattacgactatccaaacgttctgcttctctcaaaagcaaacgttcaacgcgtggtgaaacatttcctccgcaagatataaatgcctgttttaaatcaactttattgtcaatagcttctaaaagtgattccacacggaccttatcatctaatttatcctgccatggaagaattgctgtcacatcagccatattaaaactatcctttaatgaaacaaaagagtctttaataggaaaaccctgctcatatgcctgcagcgcagcatctactgcttcacgcatggtgcgacaaataggataaatttttgctgtccaaagcggctctgaaagcttctttccaaacaggctgcattcctttggattatcatttaccccatacatacgagcaacaaactgctcctcaccaagctttaaaccatgaatcacggcaccgtctggaatattctgtccatcaagcgtaacacctgacaccacacaattcgttccaatcactgttccatggtgaacatagctgtcctctacataagtgccctttccaatctttgcacgcttgctgatatagctgtttccagatgcatagccactgcggatgcttgtactattagtatttacaaaactattccatccaagatatacaaactgctccattccctctgtcatcaaatggcgcagctcttttgtcgttccgaaatggataaatgcagccggtgacatgcgaatcagcttcatatgaaatgtatgaagcacctcccaaagtttcatgcggcactcatggagttctggcgtaaaatcaccttccggtgtttccttataatactgctccagcgaggactgggatgccagcggatataaaaagtctgcataaaaagacagtcttgtattttcatttacataagcatcaaactgctctggcgtatctaccaatttatataatgcctttaacagatctgtatccatgataacagcacctgtatcaatatcaacatttccgttttcatcggcagcctgcagctcatgaagctgatctactgttttcttatgtaaaaatccacctacatttccctgctcatcaacacggtatacaccatgattttttccaatctcagcaggttccttaattgacaatgccgctgctccgtttccgtaaaaatcaatctgaagtggattaaacaacaaaagaacatcacctgaacatacaagcataccagcacgaatacgcgctgcaactccgcacatggaaatcataaactcatcaaaaagtgtagatcttctgccatttggaagcagacgcggaacaggcgagaacagcttgccacatgccgaatactgtggcacacgcttactgtctccgccagaatgaatcacgagaatacgcttatcatcaaaacttcctgcatcctgatgtatgtaacgcagcacatttaatgtagcgccgccgcttcccactcttttcccatctggatctggaagaactgcataatgaatagactttggcagcattccatgatcaagacggtactgaatctgcatacgatacgactgcgcctgtgattcatttgacgcagtcaaaatcacgtaatcccaaagcggcattttttgtttttcaagcaattccatatattgcctagtacaatcctcataagactgctgaagaaataatgttttgtgtgacatgttatcttttcctttcaccttatatattccctattatatcgtacttcttttttaacgtccactagatttcatacttaatcttatcatgaacattaacatcttttcccatctggacctcaattacttttagctctgtctctgcaataatagtatgacgacagcctgccttcatttcaataacatcacctggctttacagaccgttctttttcatttaaaattacacggcctgttccagaaataatggtccatacttcatcgcgaaactcatggctgtgataattcattttatgacctggatttaaagtcaccttaatcgtaaggctctctttctcaacgtctaaaacacgaaagcttccccatgacttctcggcaaacataactctatgatccagcgtattgacgaatggcttaatatagctcgactgctttttatctgatacaagaatgccatctggactagcagatacaacaacatcctttaatcccatacaaagcaccggaagattaagttcatttacgacatgcacattctggcatgtctcactaaaaagcgcctgtccaacattacggctgtccattgcctctgtaagagtattccacgttcccaaatccttccacattccagaaaaacgcattacttcgattttttcctcatgctcaacaactgcataatcaaagctgattttctctaatgtctcatatttatcaaacaaatcctgataatcagtaaaatcaatcagctgatgtgctctttccaatacatagccaagtcgaagtgcaaacacaccgccattccaaagagctccctgtgtaatataagtttgagcaacctcttctgttggtttctccttgaacatagaaactgagctgatattttccagcgactttggaataatataaccatactttgcacttggatatgtaggctcaattcccattaaaacaagattagccgaactttctgccgcacgcttttcaagcgcatcaagagcttcaaaataatcactatctacataaggatcaacaggacaaattacaatagcttcatctaacggcagatgctttttatccttcaaataagctgccgccagtgcaatagccggaaacgtatctcttctacaaggctcaacactaattccaacattttctccaagctgattatgaattgctgaaacctgagactttgatgttgcaattgtcacattagcatcaggatcaatacttctaatctgacgatacactctttgcaccatcgattcaagtgttccatcctctttatgaaaaatcttaataaactgttttgatctaatatcatttgaaagcggccataagcgctgtccagaaccaccagataacaatacaatattcatttttctatcctttcttatatgcgaaaggccgctgcccaaattgggtaacggccgcatttcatttaatcgttatcgttcagccctcatcgggttatttaaaaagtcttcataggacagacggattccctcctcaagctcagtcttgtatgtccagccaagatccttagccttcgatacatcaagcagctttctaggagtgccatttggctttgttgtatcccaattgatctttccagtatagccgattacttttgccaccaactctgtcagctctttaattgtcagctcttttcctgttccggcattgacagtctcatctccgctatagttattcattaagaatacacataagtttgcaagatcatctacatacaaaaattcacgaagcggtgaaccatctccccaacaagtaacttcctcaaggccatttacctttgcctcatggaaacggcgaataagtgctggaagcacatgactgtgagtaggatgataattatcattagggccataaagatttgtaggcataacactgatgtaatcagtgtgatactggcgatttaaaaattcgcaatactttaatccagaaatcttagcaagcgcatatgcctcatttgtcttttcaagttcagatgtcagcagacagctttccttcataggctgtggtgccatacgcggataaatacaagaagaacctaaaaattcaagcttcttgcagccattcttccatgcagagtgaatcacattcatctcaagagtcatgttttcatacataaaatcagccaatgcattctgatttgccacgataccgccaacctttgctgctgctaaaaatacgtattctggcttttcctctgcaaaaaatgcctcaaccgcatcctgacggcataaatccagctcagcatgtgtacgagtcacaatattcgtatatccctggcgctgtaattctctaacaatcgcagaacctaccattccgcgatgacctgctacatatatttttgcattcttgtccatcataatcgtcacctatttctcgctctttctaaattacagagcagcctccttcattgctttctcctgctttgcaagctgtctgtcatgctttgccatgatctcaactaactgtgcatatgttgtcttctgcggattccagccaagaacagtctttgcctttgtcggatcaccccacagattatcaacatcagtcggacggaaccatgccgggtttacacatacaagcatctttccagtctgtgcatcatagcccttttcatcaagaccatttccctcccaacggatcgtgatgccatttgctgcaaatgccttttctgtaaaatcacgtactgtatgctgctcacctgttgcaatgacaaaatcttctggtgtctcatgctgcataatcatccacatgcactctacataatcctttgcataaccccagtcacgtaaagaatccatatttccaagctccaaatgatcctgcagtccctctgcaatacggcctgctgccaacgtaatctttcttgtaacaaagttttcaccacgtctctcagactcatggttaaacaaaatgccatttacagcaaacatgccatatgcttcacggtattcctttacaatccaaaagccatactgctttgcaactgcatatggagaatatggatgaaatggtgttgtctccttctgcggaacttcctcaacctttccataaagctcagatgtggatgcctgatatacctttgtcttctttgtcaggccaagtatacggcatgcctctaaaatacgcagaacgccaagtgcatctacatcgccagaatactctggtacatcaaaagatacctgcacatgtgactgtgctgccaaattgtaaatttcatccggattaaccagacttataatacgaattaatgatgaggagtctgacagatctccgtcatgaagtgtaatttttcccatcaaatgatcaatacgtgctgtatttgaaatagacgcacggcgtgtaattccatgaacctcatatcccttctccaacaaaaactctgccagataagaaccgtcctgtcctgtaattcctgtaatcaatgcaaccttagccatagatataactcctcttttgattattcttgttttcagtttcctctttattttattctttttaaaagaaaaaaacagagcttatcttgcattatttttgcactatattggtttttaccattactgccactgcttgcggtatttttttggactgatcccctctgactttttaaacattctgctaaaatagcccgctccatccattccaacagcacatccaacctcatctatcgtcatttgtgtaaaacgaagcagctgttttgcccttgtaatacgccttgaaatcagatagctgctgatcgtcactccatacgtttccttaaaaattttcaaaagataatacttattaataaaaaattgtgcctctaaatcatctaatgtaattttttcaacataatgctcgtccatataattttttacagaaactagctccatacgcttctttgaaattgctgaattatcaggattccaagattcctgcataagaagtgttaaaagtgtgctcaaactttcattaattcgcatatcacgtatataatcagatgatcctgcaagcttatacaactgcttcaaaagctcttcaaatactttactattctccgggtgaaatattggcaatccacctcgttctttatatttttcataaattgccgtcatacttgttccataaaaatggcaccatgcaagtgaccataaattttctgatgtactgtggctgtatggtttttgacaatcaataaagacacaatctccctgttttagctgatattgacgtccttcatacgttaaacttccttctccatccaaaacaaggaaatataaatatgatgtcagccccgatctggtagatgtatgtggactgcgtgccttcagcgaccctacttcctgcaaattaagaagtgcactgcgcgcaaataaagatggggtatataaaatacggtcagactgaaccgatgcttcactatttaaaaataattcctgcataaaatttctactccgcctatttttctttaacttcattttctaatactgacagtatacaagacaatttcaagacatgcaagctaatccttcttcaaaggaaaacatatttgcaaattaataattttcttcttactcttacactcatgtttttccatcattttctttaacaacaacaagaacacctgataatccgtgtcatcctgaaaaataaccattctgcgtattcccctagccattgcatgataagttgcaccaggataccaaattcttttttgacgaataatatcaccctctctcttgtattttatcatgtgcaatactatcattgatgattatatgtaaatatagataaaagcactgtgcttttatctatatttacttttaatgtggtcactttgcttcctgatcacaaagctcaacctttatcctttttccaagagcgctagcatatttttgcaacacaactaatgtcggtactcttgaaccgttttcaaaacgcgcaatattggctggtaatattcctgtaatatctgctatatcctgctgcgttttcttctgatattttctttctgccactaattctgcaatcaatgcagatgacatttgcagcgtatttttctgaatttcttctgcataagccataagccgtttttctcgtgcctttttttgtgtccgatactcttccatattattagtcagagcgctgtccatctcttttgttttttcctgcatataatgcacattcttcctttgtctgttttgtgttatcatatcacgtatgatagatttttgcaagagttttttcttagatcccctgtatgttacactatgcatttgcttattcaaaactaattgtaaccggatcagatatacaaatctcatcataagaatcgccatccaaaactgctactttaaattccaaatactcaagatcttccatcggacaatactcatcatatgattcatacatgtctatttcatccttggatttcttatttggggctaaattagctgaatacacagcgtaaaacataaaatcatttaatgaagcatcctcatactgtacaatgatttttttatcagtaagattttctgttataaaattaatcgaatatccatcaccatactcatcttccttaattccattataagtaattataacagactcatcctgataaattacatctcctatttctgtaacattggactctcgcaactgctttcgttcttctttcaacactgcaatttgcttctccaaatcgtgaatctgcttctcaatctccgaaattcgatcctcatttcctgaaactacactttccgcctcagtactgtcctttgtttcttcaactgcctcactaatcttttcttccgtactggtttcttttgccattactggaattcctgataccaccaatgctgccgccattactgtaaaaaatctttttctcatttctacctctctcctcttccaagtttattacaaaatatttcttacaaaacaaagtaccaggggctggcacgtaattgcctactataccttatatgccatacttccttgctgcccatagaatcccatgcgcagagctattgcagcaaatctcgttatccatcaccatactgaccgcctgttctaacggcatgaccaatacctcgatttcttctgtcgcgtccaaatgctgcccactgaccttacggcaatgatctgcaaagtatatgtgcatatagtttgtaagcttcgcggaactttctactgttcttccaataaactgccagtcctcagaaatataacctgtctcttctagcagttctctctttgcaacctccagaccttcctcgcccctttcaaaaccacctgcagggatctcaatcaagtctcggccaaaacaatatcgatattcttttttcaatatgatatttccatagtcatctaatgctacaattgccgccgcctcgttaatcgtaatggcataaaaatcatcaatatgttgcccatttggaagctccacagcatcttttctcaccttcacccacttagtatcaagcagcgcttgtgagcatatcgttttccatttatccatgctttacctctaatgttattacgtggtaactgtcacatagtacctgaatctggtaacaatgtgatcaatgcctcactggctttttaatttttatttaaggcagataccattctcagtatatcacaatttcatacatttttacagacactttcttaccttcatcaccgcacaatacatcaatccgccaattattccatatcactactgctgaaaatggcaacatcataatcacgttttcaatgcactcggttgtcagcttctgttcgccattcactgtctcccatattccccagccgcccatgaccttggacaacgggttcatccacagattacgtttcaataatgttcgttagtaccaggggtctggcaccaatgttttctaaccgaagtacaaaaaatcgattgaaagttcttaggtgtcaatgccctctcgggcttataccccatttctacagattgtggaaactatttaaacacgaccggagctactgggtgtgtcaatgccctctcgggcttatacctcatttctacgcttgaatagtttgccaatgtataccttcaaatcagtggtgtcaatgccctctcgggcttatacctcatttctacgtcttgaagatctcaacaatttaccatttcactttactggtgtcaatgccctctcgggcttatacctcatttctaccaggttcggagagtatggcggaagatcttcaaattgtatgtgtcaatgccctctcgggcttatacctcatttctactacgatcgaagacttctcggttatcaaaaagtaagccacctgtgtcaatgccctctcgggcttatacctcatttctacctgttgtaatcgcgattggatttgctgtcatcatgtgtgtcaatgccctctcgggcttatacctcatttctacagttgaaaagagaatgcagagtattctcaatagctgtgtcaatgccctctcgggcttatacctcatttctaccgttgatgcgttggctgagcaggctgtaaacgaaatcgtgtgtcaatgccctctcgggcttatacctcatttctacggtaccccttcaaaa

SEQ ID NO: 515 - DNA, 7199 bp, unidentified
  source 1..7199: mol_type = unassigned DNA
  misc_difference 4444: note = a, c, g, or t
  misc_difference 4445: note = a, c, g, or t
  misc_difference 4446: note = a, c, g, or t
  misc_difference 4447: note = a, c, g, or t
  misc_difference 4448: note = a, c, g, or t
  misc_difference 4449: note = a, c, g, or t
  misc_difference 4450: note = a, c, g, or t
  misc_difference 4451: note = a, c, g, or t
  misc_difference 4452: note = a, c, g, or t
  misc_difference 4453: note = a, c, g, or t
ttgtctattgacgggcgaggctttctgtttttcttcataatacctattaaaaaagtgaatatttactgataatttgtatgttatgaggatatttatttgtatctttgtcgcccgaattgtaagctaacgattttaaaaagagagaagctttgggaaaatttgataaatacaaaattgacttgaaaggtatgcaggcagactctgctaagtatgagtttgtgttggataacctttacttcgctcacattgatggtcctgaagttcagaaaggaaaggtgaatgttacattgaccgtaaaaagaacctctcgtgctttcgagctgagttttcagacggatggaatggtatgggtaccatgcgaccgttgtctggatgatatggagttgcctatcagctcttctgataagctgatggtgaaatttggacatgaatatgcggaggagggagataaccttatcgtgattcccgaagaggaaggagaaatcaacgtagcatggttcatgtatgagtttattgcgctcgctattccgatgaagcatatacatgctcccggtaagtgcaataaagcaatgactagtaaattgaataagcatttgaagacaaatgcgaatgaggatagcgatgtagatgacagcttcgatgcaggtggtggcgaagacatcgtaatagaggaagaagtggaggaacaaatcgatcctcgctggaatgaattaaaaaaaatattagataataattaaagttttaagaaaatggcacatcctaagagaagacaatcaagtacgagacaagcgaagagaagaactcacgataaggcggtagctcctacattggctatctgtccgaattgcggtgaatggcatgtttaccacactgtatgtggcgcttgcggttattacagaggtaagcttgctatcgagaaagaagcagctgtataattagtacagtcatactgaaaacagcctgagggtaaatctctccggctgctttaagtattatagtattgctaatttaaaataggtttgatggaaaaaataaatgcagtaatcacaggagtcggtggatacgttccggattatatcttgactaacgacgagatatcaaagatggtggataccaacgacgaatggattatgactcgtattggagtaaaagaaagacacattctgaatgaggaaggattaggcagttcgtatatggcgcgtaaggctgccaaacagttgatgaaaaaaactggcgccaatcctgatgatattgatttggttgttgttgctactagtactcctgactatcacttcccttctacagcttctattctttgcgataaactcggactgaaaaatgcatttgctttcgacttgcaggctgcttgtagcggttttctctatttgatggagacggctgcgaattttattcgttcgggaagatataagaaaattatcatcgtcggtgccgataagatgtcgtcgatggtcaactatacagatcgtgctacctgtcctatctttggtgacggtgctgccgcttttatggtggagccgactacggaagatgtgggtattatggattcgatactgagaacggatggtaaaggattgcctttcctacacatgaaagccggcgggtcggtttgtcctccgtcttatttcacagtagacaataaaatgcattatctgcatcaggaaggaagaacagtgttcaaatatgctgtttccagtatgtcggatgtttctgctgcaatcgcggaaaagaatggactgacaaaagataatatcgactggattgtgccgcatcaggcaaatgtccgtatcatcgaggcagtagcccatcgcatggaagtgccgatggataaagtgctggtaaatatcgaacattacggtaacactagtgccggtacgcttcctttgtgtatttgggattttgaggataaactcaagaaaggcgataacatcatcttcactgcattcggcgccggatttacatggggtgcggtatacgtgaagtggggttatgacggaaagaaggaataagtacaaaagttactgaactataacactcaaaaacgcatcctatttcgattcgatgcgtttttttgtctcaaccaataaaatgaagagaaatgcataaagctggttttgtgaatatcgtaggaaatccgaatgtcggaaaatcgacattaatgaatgctttggtgggtgaacgtatttcgatcgctaccttcaaagcgcagactactcgtcaccggattatgggaatctataatacggatgagatgcagatagttttttctgatactccgggagtattgaaacctaattacaaacttcaggagtctatgttgaacttttctacttcggcattgacggatgcggatatcttgctttatgtgacggatgtggtagagacgccggataagaataatgagtttatggcaaaggtgcgtcagatgacggtgcctgtattgttgctcattaacaagattgaccttaccgaccaggagaagctggtcaagttggtggaggattggaaggaactgcttccgcaggccgagattattccgatttccgcagcttctaagttcaacgtggattacgtgatgaagaggatcaaggaattgttgccggattcccctccttatttcgggaaggaccagtggacggacaaacctgcccgtttctttgtgaacgagattatccgggaaaagattttgttgtattacgacaaggagattccctattcggtagaggtggctgtggaagaattcaaggaagaagccaagaagattcatatacgggcagtcatctatgtggaacgtgaatcgcagaagggaattatcatcggcaaacagggaaaggcgttgaaaaaggttgctactgaggctcgccgtgaattggagcgtttcttcggaaagacaatcttcttggagacgtatgtgaaagttgataaggattggcgcagttcggataaagagttgcgtaattttggttatcagttagattaagagtattcatgcgactgtgatagtcgtgaaaaacaaggtattgaactatgggaaatttagttgcaattgtaggacgccccaatgtgggcaagtctaccttatttaaccgtctgacgaagactcgtcaggctattgtgaatgaagctgcggggacgacccgcgacagacaatatggtaagtctgagtggctgggccgtgagttttcggtggtggacaccggaggatgggtggtaaactcggatgatatctttgaagaagagattcgtaaacaagtattgctggctgtagaagaagcggatgttattctgtttgtagtggatgtgatgaacggagtgactgatttggatatgcaggtagcagctatcttgcgccgtgcgaaaagtccggtgataatggttgccaacaagacggataatcatgaattacaatataatgctccggaattctataaattgggattgggggatccgtattgtgtttctgccataaccggaagtggaactggtgatttgatggatttgattgtcagtaaattcaagaaagaaacgtcggagattctggatgatgatattccccgttttgcagtggtaggccgtccgaacgccggtaagtcttctattgtgaatgcttttatcggtgaagaccgtaatatcgtgacagagattgcgggaacgacccgcgattctatttatacccgttacaataagttcggctttgatttttatctggtagatacggccggtatccgtaaaaagagcaaggtcaatgaggatttggaatattactcggttattcgttctattcgtgccatcgaaggttcggatgtgtgtattctgatgctggatgctacaagaggtatagaaagccaggacttgaatatattctctttgattcagaagaaccagaaaggactggtagtggtaatcaataaatgggatttggtggaggataaatcagtgaaagtacagaaaacatttgaggaagctgtccgttcgcgttttgctccgtttgtcgatttcccgattatttttgcttcggcgctgactaaacagcgtatcctgaaagtgcttgaagaagcccgtaacgtatacgagaaccgtacaacaaagataccgaccgcccgtctgaatgaagaaatgcttccgttgatcgaggcatatccacctccttcaaataaaggtaagtatatcaagattaaatatatcacacagttgccgaatacgcaagtaccttcatttgtctattttgccaacttgcctcagtacgtgaaggagccttacaaacgtttcttggaaaacaaaatgcgcgaaaagtggaatctgacaggcacaccgattaatatctatatccgtcagaaataagactcaccacagaggacacagagaacgcagaggtttaatataaaaagcaaccagatcggaagagcggttcagcaggaatgccgannnnnnnnnnaagtagttgccttaaattttattattttaggaatatccctttttatgattggagatattatgagatactcaccgaatcatttttgattatttcggataaatccattatttccctctgtgtcctctgcgtcctctgtggtgaacctatttttccaattggaaatctttgcggcgtagtacgaaactattactcaagtacttttcacgcacaatctggttctccgacaattcttccggcgtgccttgaaaaagaatctttccttcaaacagtagataggcgcggtcggtaatgctaagtgtttcctgtacgttatggtcggtaatcaggataccgatatttttatctttcagtttccatacaatctgttggatgtcttctacagcaatcgggtcgacaccggcaaatggttcgtcaagcatgatgaatttagggtcaatggcaaggcaacgtgcgatttccgtacgacggcgttcgccaccggacagctggttacccttgttcttgcgcaccttttgcagacggaattctgctatcagactttcgagcttttccttctgatactctttaggcttgttggtcatctcgagcacagcagcaatattgtcttccacactcatctggcggaatacggaggcttcctgtgcaaggtatccgattcccgtttgtgcccgtttgtaaactggatatttggtaatctccaagtcgtcgaggaagatacggccttcattaggggtaatcaacccgacggtcatatagaatgaagtcgtcttaccggcaccattcggtcccagcaaacctacaatctcaccttgcttcacattgatggaaacgtggcttacaacggtccgtttaccgtacttcttaaccaggtcttccgtgcggagcaccatcttgctttctgccatattctagttattttgcggcaaatgtagtaaaaataagctgaaataatgtacatttgcagacaaatagtgtgagttatgataaaagcattgagaaccgtcggaagatattttatgctgatggggcggactttttcccgtcccgagcggatgcgtatgtttttccggcaatacctaaacgagttggagcagctaggtgtaaactccatcggtatcgtcctgctgatttcgtttttcatcggcgcggtgattaccattcagattaagttgaatatcgaaagtccgtggatgccccgttggacagtgggatatgtgacacgtgagattatgttgttggagttttcttcttctatcatgtgtctgattcttgcgggaaaggtcggatcgaatattgcttcggaactgggaaccatgcgggtgacacagcagatcgacgcgcttgaaatcatgggagtcaattcggccaattatctgatattgcctaaaattacagcaatggtgactgttattcctatattggtgacgttcagtatttttgccgggattatcggtgctttttgtacctgttggtttgccggtgtgatgaatgccgtcgatctggaatatggtttgcaatatatgtttaacgaatggtttatctgggcgggtatcatcaaatctctcttcttcgcctttatcattgcaagtgtatccgctttcttcggatatacggtggatggtggttcgattgctgtgggaaaagcctcgacggattccgtagtatccagcagtgtgttgattttgtttgcggacttggtattaactaaacttttgatgggatgattgatattaaaggactttataaatcatttgatgacaaaacagtattgagtgatatcaatgcaacttttgagaacggaaagacgaacttgattatcggtcagagtggttccggaaagacggtgttgatgaaatgtattgtggggttgctcacaccggagaaaggggaggtcttgtatgacggacgtaaccttgtgctgatggggaagaaagagaaaaagatgcttcgcaaggagatgggaatgatcttccagagtgcggctcttttcgattccatgtcggtgttggataatgtgatgtttcctttgaatatgtttagcaacgatacgttgcgcgaccgtaccaaacgggctatgttctgcctggatcgtgtcaacctgtccgaagcgaaagacaagtatcccggagaaatcagtggaggtatgcagaaacgtgtagctattgcacgtgctatttctttgaatccgcaatatttgttctgcgacgagccgaactcgggactagacccgaaaacctcattggtgattgatgacttgattcatgacatcactcaggaatataatatgaccaccattattaatacgcatgacatgaattccgttttgggaatcggtgagaaggtgatttatatttatgaaggtcacaaggagtgggaagggacgaaagacgatatcttcacttctaccaacgaacgtctgaataactttattttcgcctcagacttgcttcgtaaggtgaaggagctggaagtacagaatatggaaggctgattatatataggcaataaaaaaacttctgtcatcgggtggcagaagtttcttttttcttagctatgtagcgtcggcatttaagctttaggtctagcttctttaactaccatggtgcggcccatgtactcagctccgttcaattcagcgatagctttagcagctgcagcatcgtcttccatttcgatgaaagcgaatcctttggatttaccggtttcacggtccataataactttgactgatgatactgctccgtag

SEQ ID NO: 516 - DNA, 13670 bp, unidentified
  source 1..13670: mol_type = unassigned DNA
ttacatatactcgctgaaaggagtatagatattcctaatatcattagaattcctgccgttttcattttcgtcctccgtcaaatcaataatgtcaaatccttcatcaattccgtgtaaaaaaacaatgtgcgaaaattcacgagttgagataagctgaatagctatttgatttctcattaaatcattaatcgattttaaatggatagataaaataaacgacgtaccgcttgaaaatccgaattttattgcctctacttcatccgagtttcctatttcatcgcaaactattaattcaggcgaaagcgttcttactgccaattcgattcccttagcttttttatacgaggatataacatctgtattaattccgatatcaaagccggaagaaagttctttcctttcatcaataacgcttatttttttatattttcctgcatatccgcttgataaaagccgtgtcatatctcttaatattgttgttttgccgcttgaaggcggacctgcaataataacacttggcgttgaattggcgaaaagaatatttaaaatattttttgagcaatcaacaacattatgagatattcttatgttaagactgcttatattcttaacgcttgaaattaagttgtttttataaacagcttcacctgctatacctattcttgaaccgaatttatcggttacgtatccgtcaatcattgtttgcatatttgtatgatacgaattattacaaaaactgtcgagaataaatataaactcatcatcgctgataaatctgcaatcgttcaaataatgattaataagcttgtcatatttactgataaaaaaaggtttatcaagaatgtaaataactataggtttattaactctaagcctaatctcagttatttttgacaaaacagatacatcaaatgacaaaaagcagttttttaaatcgcttggaaagtgctctaaaacagaaaaaatattgtccataaaatcaccttgcttaatagtatgctgaatttttgaaaaatataacaaattttcagttgaagtagaaaagcaaatgtgatattatatgtatataattataatatttacggaagtgcggttgcagtaatgaatagcaatataactatcaacacaaaaactaacaaattcattaacggcgaaacggttagctatactcttatggctacggtttcgctttttgttctgtttgcgttaaaacagatattaaaagtttttatcggcgttgctgttgctccgagctgtatcatcgcttttatcacggcaagcattatttcatttttacttgaaagaaaatttgtgtttggcaaaaagatgttagcttcaaacgctaaacaaataatattttttataatcagagcagcagttaacttcggcttttataaactttcggaatttgggtttaaaaatatgcttgatatgccaatcacgtttgtttggtttatagccgttgtaacttcttttttatttaactatatctatgacaggacactcgtttttgattgcggatatgaggcaataagtgtaaaacagtcaagaatatataaaaccttttataaaaatagatatgtatttttatcctctgccttggcactcttatgtataagcattctttatatcatttattcaacatttccgtttggcgatacaactgttatgagaatggacctttatcatcaatacggaccgctttttgccgaactttatgacagaatagttgaacacaaaagcctgctttattcttggacaacgggcggcggctcaagctttttaggcaattatctaaactatctgtcaagcccgctttcatttttaattttcctttttaataaggaggatattgcatttgccattacctttatagttggattaaaatgcatattaagtgcaaccacattcagttactacttaaagagcagctttggcaaaaataattattacgtaagtgcattcggcgtactctatgcctttagcgcatatttccttgcatattattggaatattatgtggcttgacggaatgattatgctcccgcttattgttctcggaattgaaagaattttcaataaaggagacattaagctatatactatttcaatgattttgcttttctttgcaaattattatatgggctatatgagttgtatattcgcagtaatatatttcgttgcatacttcattatttcatacaaaaatgacggcaaactcaatcctaatgcaaaatttgaaaagaaatattcaacaaaagcattgatgaataacacttttattaacagagggattaaatttgcatttgccagcatcattgcagcaatgttttgcgctattactttaataccggtgtttatgatattaaagaacagttctgcaacgtcaggcacgtttcctgatacattcacaagctattttgacattcttgacttcataacctctcactttgcaattctcgaaacaactataagaagcagtggcgacaacgttctccctaatgtatataccggcattttgacgcttatattgctgccgttattcttactcaacaacaaaataagtcttaaagaaaaagcgacttacgtgcttttgatggttttctttattttcagtttcaacaataactgtgcaaactatatttggcacgcattccattttcctaatgatttgccatatcgtttttcgtatatgtattcatttatagttgctgttatgggatataaaaccttaattaatttcaaagcaattaatattaaagatatcgtatattcgggacttggcgttattgcaatcgttattttagctcaaaaatttcttactaacaaaatgactaacggcaccatttatgcaacaattattttagttgcactttggtgcggatatcttcttatcgttaaaaacaagaatattcaaaaaagactgacagcatttgtgcttatagtatttttagtcggtgaaacagttataagtgccgttaccggaataccgcttaatcaggaaaacggaaactataaagaaaatttttccacatataacgatgcaatcaaatatattgactcaaatgataaagacttctacagaacggagctttgctatctaaatacacgtatggacccgtcttattacggctataacggaatatcagtattttcgtcaatggcatacgaatcatattcagagcttcagcatagcttaggaatgttcggtaatagaattaacagctatacttacaatcctcaaacgcctgtatacaatatgatgtttaacattaaatatttaattcaaaccgatgtaagcttagctccttcttctaatctttataaaaagaaatacacaaccaaaaacaaaaaggcaaatgtatatgaaaacaagtataatctgcctatcgcctactgcgttaattcaaatattgaagattggataacagatgagggcaatccgtttgaaattcaaagtgactttataaagcttgcaacgggatattcaaatgtgtttaaaaacgttgattatatcagtaccgactttgactcagtaacaggtgatgacgttactgaaaacggaacatattggcttaataaaagcgatgcttcatcaaaatacggcacagaaacaattacgctgtcacctactatcgacggaaacctttatctttatgttaagtcaagcgatttaaagagcataactgttaattctgaaaaagtatctgatattacacaaaacacagatgaggaatatttacttgaccttggtttccacaataaaggcgatgaagttaaggtctcgcttgacggcggaactatggaaagtgagagcacatcgtttgatatttattgttacagttgcgatgactcggtattgaaaaatgcttataattctctttccaagaacactttaaatgtatcatcttatagcgacacatcaattaaaggtactatttcctcaaaagaaaattgttatttatattcatcaattccttatgatgacggttggagcgtatatgtcgatggcaaaaaggcagaaacatttgaaatcggcggtactcttcttgcaattgaattaactgcgggtaatcatcaaatcgaatataaatatactccatcaggccttgtttacggcatagcggttacggcaattactgcatttggattatgcggttattatatattcagtaaatcttctttaaaacttaacaaaagagcgagaaagaaggagaaaaatattgttgaataaataaaaatcagtataattcttaaaaatctatttacaataatgtgcttttattgtagaatacacgtgaacatttgagaggagtttcatattactatggcaagacaaacagcaatcagtattaacactattccaatcggtccacttggcataatcggtatgccgggatgcgaagaattaacggacaaaattgacaagtacctcgttaaatggcgcaaaactcaagcaagtgagcatgctgagtcaattgctttctttggctatcagagagatacatataaaattgatgtatctattccacgttttggcagcggcgaaggcaagggtgttattaacgaaagcgtaagaggttacgatatttatattgtgtgcgacgtatttaactacagctgcagctatgatatgtacggcagaaaggtttatatgtcacccgacgatcattttgctgaccttaagagagttatttcagcgctttgttcaaaaccaaaaagagtttctgttattatgcctatgctttacgagggcagacagcacaagagaagttcaagagaatcacttgactgtgcaatggctcttaaggagctcgttcatcttggtgttgaaaacattattacgtttgacgctcacgaccaaagagtacaaaatgcaattcctgacaaatcatttgaaaatgttatgccgacttaccagatgattaaggcacttgtcaacaatgttgaagacttaaatgttgataaggaccatttaatgattatctctcctgacgaaggcgcacttcacagatgtatttattttgctacacagcttggagttaatcttggtatgttctacaagagaagagattatacaagagttgtaaacggcagaaatccaatcgttgagcatcaatatctcggtgattccgttaaaggcaaagatattatcattgttgacgatatgatttcatcaggtgaatctatgcttgaggttgctatgaagcttaagaacttaggttgcggcagaatttttgtgtgcacaactttcggtctcttctgcaacggtcttgatgtatttgataaagcttataaagacggtgtattctacagagtgtttactactaacggtgtatatcagccgcaggagcttttggacagagaatggtatgtaagcgttgagctttcaaaatatgccgcatatttgattgacacattaaatcacgatatgtctgtttcaagtcttctcgacagctctgcaaaaattgatactttgttaaaaaataaaggtttaaaggactaagatattatggcaaaagtaaaattgtctaaagctaaaacagctataattattattgccgcaattattttcgcacttttggttgcaggcggaatttattgcgttgcaacagaccaaagccctgctactgcaattgaagcagcaacagcgcatcaggacaagcttgtcggcaagtggcaaagccaaaaatcgccgggattatccgcttatgtattttatgatgacggaacgtatgattcttatttgtctacagttaatttttcaggcgaatatactgtaaaaggcaataaaatcactttgacaaatcctaatactaacgcacaggttgtttataaatacaaggttaaaggcaaggttctcacccttactcttatggaagacgacaaagaggcagaatcaaacgcttatgattctgttgatgaacttcaaatgaaaacgcttgcagatttaatcggcgattctattaaagacaacaatacaactacacaagcacaataattaaaaacccctcgtcattgacgtggggtttgttctatttttagttcactttccatatacattaccaaggaaggtgaaattctttgattggtaatgtggaaaaacgttgtatcgatttaggacattatataattgaaacaggtgctactgtcaggcaagcggcaatagttttcaatatcagtaaatctaccgtacataatgacgtcacaaagcgccttgcaatgattaatcccctgctttgcagtgaggttaaagaggtacttgagcgcaacaaggctgagcgtcacataagaggcggacttgccacaaaagaaaaatacagaaagttaaaagataacaaaaacattgattaataagcaaaataatgctattataaaaaaagaaaatcaaaggaagtgtaaatatgaagataggttttataggctgcggaaatatggcaactgccattattaacggaattacgaataataacgtcgtaagcgaaaaggatataaatgcttatgacatttttgacggtgcaaccaaaaagcttaaagaaaataaagatataaacatttgcgaaaacgaaaaagacgttgtaaaatcaagcgacattatttttcttgcagtcaagccaaatgttcaggcaagcgtattaaaagcaattgacggtgaaattaaggataaattaatcatttcaattgccgcaggaaaaacaattgaatttatcgaaagcaatttaaaatgcaaagctaaaattgttagagttatgccaaacatcaacgctaaagtcggtgaggctatatctgcttattgctttaatgattcagtaaccgaagaggacaaaactaacgttgaaagccttttaaacggaataggacaggtactttgccttgatgaaagctacttccctcttttcggtgttatcggcggctgcggacctgcttttgcatatatgtttattgacgcaatggcacgtgcaggagttaaaaacggaatgaaaaaaagcgatgcacttaaaatttctgctcaaaccgtattaggcagtgcaaaaatgattttggaaagcaacgagcatccatggcagcttattgataatgtttgctcccccggcggtacaactatcgagggtgtaacctcacttcaggcagacggctttgaagcggcagttcacaatgcagttgataaagcgcttgataaagataaaaaattataaaattaaagttcggttttgggttactccctttaccgagcttttttctaaagtttttataaagatattattaaactattgacaatgtttattttatatgatatacaggacttggaggtggttatatgaaatattcttttaaagattatcttattgatacacttatgtttggtttatctgtatcaattaccccaattatatatttgtcaacatttataatagtaaacaaatttaattatataaattcccctgttaacttatatttagcaattttcatttcatttttgttaccgtttatattcggcatttttctttcaagaaaactttgcaaacaatctgtatgttcatatttaacagttttcttaataatggaaataatttgcatatttcatatcaaaattccggatagttattttgtttttttacttcctcaggaagaatggataagaggattatttaataagtataatgaaatcagagaaataataatatctattattacaccggttttatacacactcttatattttttaggttcaaaattaaaatcaaaaaaacaaattaataaataaactataaaaaataaaagctcggagcaatccgagcttttttcgcataatttttatagtatgattacatatactttttgatttcatcaaccatatcggtcttttcccaagaaacaccgaggtcttccctgcccatatgaccgtaagcagcaacatttttataaatcggctttctaaggtcaagcctgtcaataattgcagacggacgaaggtcgaacaccttattaacaatatctgcaatcttttcgtcatcaagcttacctgtaccgaacgtatcaaccataacagaaacaggctttgcaacgccgattgcataagcaagctcaacctcgcacttatctgcaagacctgcggcaacgatattttttgctacccaacgagaagcgtaagcggcgcttctgtcaaccttagttgggtccttaccgctgaatgcaccgccgccgtggcgagcatatccgccgtatgtatcaacaataattttacggcctgtaagacctgaatcaccgtgagggccgccgattacgaatctaccggtaggatttacaaaatattctgtatcatcgtcaataagatcagcaggaatagtagttttaataaccttttcaataatatcgtttctaagttgagaaagctcaacgtcagcgctgtgctggcttgaaacaacaacagcagttacctttacaggcttgtcatcgtcatattcaaccgtaacctgggttttaccgtcggcataaagataaggcaatgtaccgttttctctaacctctgtaagcttaagagcaagcttgtgagcaaggctgataggaagcggcataagttccttagtttcattgcaagcgtagccgaacatcataccttggtcgccggcgccgttgaggttatattcatcttcttcgtcattcttaagctctaatgatttatcaacacccatagcaatatcaggtgactgacggtcaagagcaagcaaaacagcacaggtgttgccgttaaagcctttcttatcatcatcatagccgatatcgcaaacggtttttcttacgattgacgggatatcaaccgtagctttagttgtaatttcacccataacaagaacttggcctgttgtgcaagtagtttcgcatgctacacggctttgcgggtcttgctcgagcattgcgtcgagaatagaatctgaaatttggtcacaaattttatcaggatgaccctttgttacagattcacttgtaaacaaatgttttgacataatatattcctctcatcaaaaaaatttgttaattgctttagaaagaaaaaagcacacgtaacgagcgtgtgcacttagctatcatcactcggtaagccgcaggtattagcaccttacaaatgcaggttgctgtggtttcacagggcctgtccctcaaccactcttgataaagcatattaacatcacacatataatacaacaacgattagataaagtcaacaaatatttataaaaataaaggttattttgtatttactattgtaatttcttaataaatagtttataattatatagcaataaaaggcatatagccttataaggaggaaaattatggcaaagaaaaccgtatttattaccggtggtacaggtaatatgggttgggctgccgttcaggaaatgcttaagcatccaagtgatatcaatatcaagatgcttgcaagaaaaagcccaaagaacgaagaaaagcttaaggatttaatggcaaagccaaacgtaaaggttgtttggggtgaccttaatgattacgattcaatccttgaaggtgttacaggctctgactatgtccttcacgtaggtggtatggtttcaccgactgctgactggaaaccttacagaacacaaaagacaaacatcggtgctgcacaaagcatctgcaaggctgttcttgctcagccaaaccctgatgcagtaaaagtttgttatatcggtacagttgccgaaactggcgaccgtaactatcctatccattggggacgttgcggtgaccctatcaaaatttcaatttacgaccactatgcaatttctaagaccgttgctgagcgcacatttgttgaaagcggtattaagaattgggttgtaatgcgtcagtcaggtattctttatcctaatattcttaagaatatggatcctattatgttccacgttccaatcaacggcgtgcttgaatggtgtacagtagaagattcaggcagacttatgtgcaaccttgttcttgaggataaggcaggcaaccttggcgctgacttttggaatcacttctacaacatcggttcaggtaaggaatacagaatttctaactatgaattcgagcaacttcttctcggaacactcggtcttgcaggccctgaaaagctctttgagcctaattggtttatcactaagaacttccacggtcaattctatgcagacggtgacaagcttgaagaatacttacatttcagagaaaatcttcctataaaggactatttccacagacttgctgaccacgttgaattctatttcaaaataccaagatatcttccaaagaatcttgtagcagcttgtgcaaagccgtttatgaaaaagattgcttctactcctgacttcggtactcttgattgggttaaaacaaataatcctgaaagaatgtctgcatactatggttcacttgaagaatacaacaagattcctacaaagtgggaagactttaaaatcatcaagtttgataaggatagcagcgcagcagaaaagtttaagcttgaccatggttatgatgaaagcaagcctgaatcagagcttgacattgaagatatgaagcaagcagctaagttccgtggcggtgaatgtctcagcgaaacaatggttaagggagatatggctacaaagcttaagtggaaatgcggcacttgcggtgctgaatttgaagcttcacctgcacttattcttcttggcggtcactggtgccctgaatgctacattccacagaaggaatggaactatgatgaggttgctaagactaacccgttcttcgctcaggtttggtatcctaaccacactaaggaagagcataatgtttacaagtttgatgacctcttccatattaacggagttaaatgggacgatattaagcactaagcactgacttaaatacatataaattactaaacaccttgcattaatttgcaaggtgtttttcattttttgaaatatctaaaacaataatataaaaaagctgtcatcaacgatgacagcttttaaaatacgatattaaaatgttttatgtattagtcaaacaaaatgtcagtattagcaaatgaaagcggtacatattcaccgttatttacataataaactgcagaaagcttaacggcaactgcatattgcttacctgaacatgtaaacatatagcaatcagcaccatttacagtcttaatactattattaaatgaaattgcgctgtttgatgcatctgaactgtaacctatttctctccaattatcgtgaattgtttgcttaagcatacgcttagcatcattaacattataatcaggagtagtagtaatctcgtgtggattagaataaaggtcatatacagccggttttttgctttcctctgcaacggttgtttcctcaacaacaggtgcgacataagcagtgtttacatacataatgatgaagtaaattaagaaccaaataagaagaaggagaattatcataaggataatctttcctgccttattttgatttgcagttgatgaattagcaaattcctcttcggtaggaatttgaacaggaacgaaaggtttacctttctttgcacactttttctctaccttggcattcttcttttctaatttcttaacatactttccgtatgctttagttgtagccttttcagccttgatttccttctttgtttgatattcatcaacattaggaattgcgataggaacaaattccttaccgtctttttgagccttagcctgaagctttgcattcttcttttcagtatcctttacgaagcttgcataagctttagcatgtttcttttcagcctttgctttatatttagcatttgctttttcagctttagcttctttcttttcagattttgcctctttcttggcaagtttctttgtttgcttttcttctttagtcaaggcacaattacccccttataagtctaatagtagtataccattaaagatattaaatttcaacaaaaaaatatacagaaatggcagtattttatgaacaaattgtaaacattaacgctttttgaactattttgtaacagaaaaataaaaaatttagaaaaataagacaaaagttgaatatttacaaatatagttattataaattaaactgaccaatatatagtatatttatttagtataaagcgaataagtgccgtgattttcacggctgataaattctttcttttcaaaaggagaattaatattaattgccgcctcaataagtttctttgtaagctcaggtacatcagaacgatttaaagcctcatcaacgtcaagccacaacacctcgctgttttcatcattgtcagaatgttccctaccgcttacataatcagcggaaaatgcaacataccaatccttaagattaaacctaacagcgataatatttttaggctcaatcacaactcctgtttcttcaagaaattctctttttactgcctgttcaggagtttcgtctaaattaagatagcctcccggaacaataagaaaatccttaccggcaccgtatgtatgacgagcaaggagcactttgttgtccctaagcaccaaagccgtgacagattgcttataacacgtattttcgccgttcatattatagttcctccgccaatgactgtatcgccgtcataaagcaccacagcctgtcctttggttattgctctttgcggctcatcaaaaataagtttcagtttgtcgccgtccaaataagcagttgctccctgctctttcatattataacgcacacgggctttacacttaaattcattgggtaaatcaggaacaagcaaattaaaatcaactgcgtttacttcccttgaaaacagttcgtcattagtacaaagagttaccgtattcttttcaatatccttatcggcaacatacataggcttgccaaaagcgacaccaagccctttgcgctgaccgtttgtgtatctaataataccatggtgccttccgattacattaccgttaatatcaacaaaatcaccgtcgggatatattttaccgagataaccttcaataaacttagcgtaatcaccgtcgggaacaaagcaaatatcctggctgtcacgcttgcgtgcattcaagaaatgctgctcctctgcaattttgcggatttccgttttagaatattcgcccaaaggaaattgaatatgcgcaagctgattttgagtaagcgaataaagaacataactttggtctttagtatcgtcactaccttttttaagataaaaccagccgtctttttcctcaacaattgcatagtgacctgttacaacataatcgaatccgagttcgttcatacgttgaaaaagcttttcaaactttaaatatctgttacaatcaatacaaggattaggagttccgccgttttcataagttctgataaacttatttataactttttcctcaaattcgtctttaaaattaaaaacgtaataaggcatagaaagacggcgtgcaacagcccttgcatcttcaatatcgtcaagcgagcaacaggtcttttccctactgataccgatttcctcgttatcataaagtttcattgttgcgccgatacattcatatcctttttctttcattaaaaaagcggcaacgctggaatcaacgccaccgctcattgcgataatacattttttattcat

SEQ ID NO: 517 - DNA, 7024 bp, unidentified
  source 1..7024: mol_type = unassigned DNA
atgcgtgtcgactggaaaccgggaacaatgatttatccgttgcctgccgttatggtgagttgcggaaacgatgagagtgaatacaacattattacggtggcatggacgggaacgatttgtacgaacccgcccatgtgttatatatccgtacgcccggaacgccactctcattctattataaagaagaatatggaatttgtcattaacctgacaacggcggatatggcctttcccaccgactggtgcggggtacgttccggacgcgattaccataagtttgaagagatggggctgacaccgggcaaatcgaccgtggtgggtgcgccgcttattgaagaatcgccgctttgtatcgaatgccgggtgaaagaaatcctgtctttagggtcgcatgatatgtttatagccgatgtggtgaacgtgcgtgcagacgaacggcacctgaatgccgaaaccggcaagcttgaactggcagaggccaacccgttggtgtatgtccatggcggctattacgaactgggcaataaaataggaaagttcggctggagtgtagagaaaaagagatgattgaatcaaaaaacggatcatttaaactgaataaccaaaccgggcaatcaaccggattaattaactgaataaccaataccgatatgccaatcagaaaaaaagaaaaccgtaaaggcggcatgcatctgaagcgacgcctggctttgtatctctgcagggcggtggcgatatggatatgcggtattgccggcgtgtggcctgcctttgcacaaagaaacatgcaggatatcatcgagcgtcccaataacagtaaattcaatatcggggtgaaagccggcttcaatgcctctatgtttctggtgtcggattttaagattcaagacgtcacgatcgacgaaattcagaacaattacagagtcggctatttcggcgcgcttttcatgcgcatcaatatgaagaagcacttcatacagcccgaagtatcctacaacgtcagtaaatgcgaaataacgtttgacaaattagggtcgcaccacccggatatagaacccgactatgcatcggtcatttcgatgatacacagcgtcgatttcccggtactatacggttataatgtggtgaagaacgggccgtacggcatgtccatttttgccggccccaaactgcgctacatctggggaaagaagaacgaaatcacttttgagaactttgaccagaagggtatcgatgaacggctttatccttttaacataagcgcggtgatcggcgtgggagtcaacatctcgcgtatcttttttgatttccgatatgaacaggggttgcacaacatttccaaatcggtgacctacgacaatatcaattccgatggaagtacaggagtaagcaatatcaccttccggcggcgcgatcaggtactcagtttctcgctcggggtgatattttaatagataaatctggatatttttgtcggattatcattctttttccataaatttgtgcgcttaataaagaatctcgcattaagaaacttatttttattataaaccagaatgaaaagagacgatttaattttcgatattatcgaaaaagagcatcaacgtcagctcaaaggcatcgagctgatcgcatcagaaaactttgtgagtgaccaggtaatggaggcaatgggctcctgccttaccaataaatatgccgaaggctatcccggcaagcgttactacggcggttgcgaggtggtagaccagagcgaacagatcgctatcgaccggttgaagcagatttttggcgccgaatgggccaatgtacagccacactccggcgcacaggccaatgcagccgtgttccttgccgttttgaatccgggagataaatttatgggattgaacctggcacacggcggacacctttctcacggttcgctggtaaatacttccggtatcatctatactccatgcgaatataatcttaatcaggaaaccggccgtgtagactacgatcagatggaggaagttgccctgcgcgaacgtccgaaaatgattatcggcggcggttcggcatactctcgcgaatgggattacaaacgcatgcgtgaaattgcagataaagtgggcgccatccttatgatcgacatggcgcatccggccgggctgattgccgccgggctcctcgacaatccggtaaaatatgcgcacatcgtcacttcaactacacataaaacacttcgcggtcctcgtggcggcgttatcatgatgggaaaagacttccccaacccatggggaaagacaaccccgaaaggagagatcaaaatgatgtctcaattgcttgattctgccgtattccccggcatccagggtggtccgttggaacacgttatcgctgcaaaagccgtggctttcggcgaatgcctgcaaccggaatacaaggagtatcagaaacaagtacagaaaaatgccgccgtattggcacaggccctgattgatcgcggctttacaatcgtttccggtggtacggacaatcactccatgctggtagacctgcgctccaaatacccggacctgacaggtaaagtagcggaaaaagcattggtatctgccgatattacagtgaacaagaacatggttccgttcgacagccgttcggcattccagacttcgggtatccgtctgggtactcctgccatcacaacccgtggtgcgaaagaagatctgatgctcgacattgccgagatgatcgaaacagtgctttccaatgtggataatgaagaagtgattgcacaggtacgtgcacgtgtcaataagaccatggagaaatatccgattttcgcatactaagaaatcagacgaatagcaaggaggtatcttgcaaatggagggtgtgtcaaaactaaaatgaccactctaaaaagttacagattgtaactaacaattataaaagagccatatcattactcaaaaacagagtttgatatggctcttttcatcattgatttagggagtcaagtttcagattaaaagttgtcttttcatcaaattacgttttgacacaccctctttttttatccgtttgtgaaccttagctccctctcccacggagagggctggggagaggctcagctcaacccgtctatctgtccgtcgacaatatcgatatgtttggcttgcggctctttaggaagccccggcatacgcatgatttctcctgcaatggccacgatcatttcggccccgttgttcagtacgatgtcttttatgtggaactcgaaattattgaccgcaccgtagattttcgggtcagcagagaaagagtattgtgtttttgctatgcagaccggataacgggtgattcccatctctgcggccaacttgattttcttacgggctatcgtgctgtaagtgatgacactggcgccataaatgttggtagccactttctctattttctgttcgatgctgtcatcatccttataggtgaacgacaaaggagcggacggctttttctcgatggtttctaccacaaggttggccagatctatagccccctctcccccttcgttgaaggcgttgttgatggcaaatcctactcccaattcttcgcaatgttgccgtagaagttccatttcttcatccgtgtcactggcaaacttgttgaatgccacgattaccgtctgcccgaaggaatgcaggttgcgcacgtgtttgtcgaggttgcgcagtccctctttcagcccctccatattaggctccttgatacggtcgagactgactcctccgtgcattttcagtccttgtgcagtagccacaatcacagtcagacgtggctggatgccgcttttacggcatttgatgttatagaatttctctgctccgagatcagcaccgaaaccggcttccgtcactacataatctccgaaggtcattgccatttttgtagcaagtatggagttgcatccgtgtgcgatattcgcaaacgggccgccatgcacgaaggctgccgtattttccgttgtctgcaccagattgggatggatggcatctttcagcaacacggttatggcaccggccacaccgaggtcttttaccgtaaacggcttaccgtcataagtgaatccgaggaggatgttttcgatgcgtcggcggaggtcttccacgtcactggccagacaaaggatagccatgatttccgaagcgggagtgatgtcgaatcccgactgcatggtgatgccgtccgtcttggctcccagtccggtgacaatgttacgcaacgaacggtcgttcacatcgagaacccggcgccaaagaatttctttcaatccgaaaccgtttgcctgattctgatacaggtaattgtcgagcaacgcggaaatcatgttgtgtgccgaggtgatcgcgtgaaaatcacccgtaaaatggaggttgatcttatccataggaagcacctgtgcatatcctcctccggcagctccccccttcatcccgaagcaagggcctaaagagggctcgcgcaaggccacaatcgccttcttgccaatcctgttgagccccaaggcaaggccgatggaaacggtagtcttgccgattccggcttttgtggcggtgatagcggtgacgagtatcagattgctttgtttcactttctcctcatcaatcagctgttcggggattttggcgatgtagcggccgtagttctccacctcttcacgagggatgctgatgctttctgcaacttgttttattttcttaagctccgtactgcgggctatttctatgtctgatttcatacggggttgttattagttacttttaaaggctgcaaaattaacaattaactttggataaaagttgcataggtataaaaaatgaaacaggctttcatttttcttcgggtttgccgggaaaggaaatttctttcatgaatggattatcggcaaatattttctatctttgcgtttataaaacctacggatatgaaaaagctgatattgtctctttccctgctgctggcaacggttgcagtgtccgcacaatcggaactgccgtcggacagcataccgcgctctcccagtgaaaactacaaggagttcggtggctttttgcttgatatgggcttgatgagtgtcatgccccctcaattgccaaaaatgaatttcgatatatccgatgccggtaaagactacaaccgattgttccggcttcatccggatgtaacttattctcagggattgtcggacgtgttttcacctttttattccggattcggatggtcgggtttcggttcgtcacaaaacctgcaaatgggctcgttcaagttgaaaaacggtatgcgtatcaacacatacggagaatacaatgcagacggatacaaagtgcctgaccgcagcgcgctgccgtgggagaaaaacacgtttaaaggcgctttcgaactgaaatcggccaacggtgcctttggcatccgcattgaagtgcaacagggaaaaaatccctattatccttaaaaccaagaagtaatgaatatattgattatcggtgccaatggctttacaggacgccggatgctggatgacttggtatcgtgtggaaaatacaacatgaccgccagctcactgcgcgacgacatagcaccgggagacggttatcggtttattcgtgcggatatacgccgtgcggcagaagtgcaggctctttttaaggaagtttgcccggatgtggttatcaatacctccgccttgtctgtgcccgatttttgtgaaacgcatcacagtgaggcccgtgcaaccaatgtcatagccgtagagcatctggcgcatgcctgcgagcaatacggcagccggttcatccatctttctaccgattttgtttttgacggtagaagcgaatgtctgtataccgaagaggacgcccctaatccggtcaattattatggtgtcaccaagctggaaggtgagcaacgcgtgagtgaatattgcagtaactatgccatcgtccgcgtagtagtggtgtatgggaaagcgttgcccggacagcacggtaacatcctgcaattggtggccgataaactccgcaacggtgaaacggttcgtgttgtttccgaccagtggcgtactcctacttttgtcggtgacatatccgaaggagtggaacgtctgatgcaccatccccgcaacggcatatatcacatttgcggaagcgattgcgtttccattgccgaaatcgcttatcgggtggcggatgtattaggactggacaggtctcttattcagcctgtcaccacggaggaaatgcaagaggccactccccggccccgtttcagcggattggacatagcaaaagccaaacgtgaaataaactacctcccgcatactttggaagagggaatcaaggagatgttctcataaacggccattgtaagctcaagggcagagcagatgttccatttgtccgatgatatgtgatttccaggtttgaagcatttcatggaagtcttcatcgccattgagaaagaccgaagtgcttagtttttttgccaggaaaggaaataccagaagcccgtagaaggtataaaatacaaaatgtatgggaacctgtttcagttttccggaatccatttctttttgcagcttgacgcctatctcatgaaaatagcgttccagttccaatgcacgagccgtactgatcaaatgtggcatatcccgttctatttcccttactatgaatatcgggagggaaggattatcggtaaatattttgaaataggcatcgactaccctgcctatccgttcggatatgggtttgtcctgcaccataatcccttgaatttcgggagccaaagaaagtatgatgtttccaaaaacggcttggaacattttatcttttgtccggaaataataatgcaatgtagggcggtttatacctacggctgctgcaatatcactcatgttggtgtctgtaaacccgtttttcacaaataattgctgggctgtttctattatcttgttttctatgttattgtcatttgtagccat

SEQ ID NO: 518 - DNA, 6004 bp, unidentified
  source 1..6004: mol_type = unassigned DNA
atgggaaaaccgacaggatttatggattatgaaagacaggataaaccggcagagagcccattggaacgcatcaaacatttcaatgagttccatacgcctcttagcaaagaagaacaggaacttcagggcgcacgctgtatggcgtgcggagttccgttctgtcagtctggaaagccgcttgcaggaatggccagtggatgtccactgcacaaccttgtgccagagtggaatgacttgatctacaatggaaattggaaggaagcttatttacgtctgaaaaagacaaacaattttccggaatttacttcccgtgtatgtccggcactgtgtgaaaatgcatgtacctgtggactgaatcaggaagcagttgcatcaaaaagtaatgaatatgcaattattgaaaatgcatatgagatgggatatgcaaaggcaaatccaccgaaagtgcgtacaggaaagaaagtcgcagtgattggttccggtccgtccggacttgcggcagcagatcttctgaacagaagaggtcatcaggtaactgtttttgaacgtgaggacaaaccgggcggattgctccgctatggaattccgaatatgaagctggagaaacagattatcgaccgtaagattgcgattatggaagaagagggaattatcttccggactggatgtaatgtcggaaaagacgtgaaggcggcagatatcctgaaagaatatgaccgcgtgatccttgcatgtggagcatcaaatccaagagatatcaaagcaccgggaagagatgcacagggaatttattttgcagtagatttcctgaaatcaacaacgaaagcactatgggcaaatgacatgaagcttaaaacaggaagctacatttctgcaaaaggaaaaaatgtaattgtaatcggaggtggagatacaggaaatgactgtgtcggaacatctattcgtcatggagcaaagagcgttctccagctggagatgatgccgaaagcaccggacgagagaacaccgatgaacccatggccggagtggccaagagtctgcaagacagattatggccagcaggaagcaatcgctgtgtttggttctgatcctcgcgtttacacaacgacagtgaaagaattcgtaaaagacaagaaaggaaatctctgtaaggcagtccttatcaagcttgagagtaagacagatgggaagaccggacggaaaatgatggttccggtagaaggaagcgagtataccgtagatgcagatcttgttctgatcgcagctggattccttggaagtcaggattatgtaacaaaagcattcggtgtagaagtgaatgaacgcacaaatgtaaagacagaggcaggaaaatattctacaaatgtgaaggatgtattcacagccggggatatgcacagaggacagtctcttgttgtatgggctatccgtgaaggtcgtgaagtggcaagagaagtagatgaaagcctgatgggatatacaaacttatatattcagtagaaaataaaagatcatacagtgaaacaggagtctggaaagtttatctaagaataaagagaactttccagatttttttgttacaaaaatgttacgaaaaaatgaaaaaagtaagggaaactattgaaaatattacataaatacgctataatattgaacgtagaatgtaaataaaataccctcttgttacgagaaatatgttgaaaaaacacaatagatgttgtattataacatatgagtatgtggaattataatgtaactatttacaatgaattgtgatatgaaaaattataatgcatcacatgggggactagataaaaataaggataggtggaaagatgaagttaaaaaaagtaagcagtatgattcttgcagtaacacttgcatgtacaatgactgttacaccggtacttgctgacgaggtcagtgatctgaagcagaagaagcaggagacacagaatcaggtaagtaatcttcagacacagctgaattcacttatgaccaagatctctgatcttgagaatgatctgatcgaaacaggtgaggaaatctctcagacagaggaagatctgaagacagcgcaggaggaacaggaacagcagtatgcagctatgaagcttcgtattaagtacatgtatgaagaaggaacaggcactgctacagtggagaaggtactgacatccggagatatttccagtgtactgacacaggcagaatattcccaacaggtacattcttatgacagagacaagctcgaagagtatgttgcgacagttcagaaagtagaagatcttaagacaacacttgagacaaagatggctgatctgcaggagacacagacagagtatgatgcgcagaaggatgaactgaatactacaatcacagagaagagtagtgagattgcaaatctcgatgttaagattgataaagctgtaaagaaagcagcggaagaagaagctaagagaaaggcagcagaagcagcagcaaagaaagctgccgaggaagcagctaagaagaataactcaagcagtagttcttctaatagaaataactcaagtaatagttcttccagtagttcaagctcaagcagctcaagctcaggaagttcaagcagctcaagctccagtagctcaagcagtagttcttccagcagttcaagctcaagcaactcaagttcttcctcatcaagcccaagctatagtgcagataagggaagcattattgtaaatgcagcttattcacagatcggagttccgtatgtatggggcggatctacaccgggagttggacttgactgttcaggacttgtacagtattgctacagacaggcaggaatttcaattccaagaacaagtggagatattcttgcagcaggaacaattgtaaatgatccacagccgggagatatctgctggacaccgggacatgtagcgatttacattggcggcggacagatgatcgaagcacagcagacaggagtaccggttaaggtaagttctgtacgtgttacatattatgtaagatattagaaccaaaaaaggaatcagtgatgctgattcctttttttaaactttttttatttgcccggtacaatttccagccagtatccgtcaggatcttcaataaaataaattcccatagatggattttcgaagcagatacatcccatctctttatgttttttgtaagcagcatcgaaatcatcgacagcaaatgcaagatgaatctcattatctcccagttcatatggtcgatccatatcacgcagccaggtgagctctaaaagatgcggggtcacaccgtctgtgagatatacaagcttaaaactttcgtcatcggcaagtttttcacgttctacttttaaattcagagctttctggtaaaaatccagagatttttcaagatcatatacattcaggttattgtgtgcaaatgtaaaattcattttagtacctccatagaattataaggtttttattcacagtcaagtggaatgatgactggaatctactttctaaggatatcacaggaggggaggaaaaatcaataatgcatagataaaacctgatgggatagagtgataacacagaatatagtgataaatgaatgaaaaacatttttgaaatgcaaaacatgtggaaataaagctaaaaaaaacaaaaaaataaaaaagaatgcaagaacccattgacgaaacgtcaaaaattatatacaataacaaaagtgaaaaaataaagaaagtggaggattcctgcaatgactgcatataaagatttgagcaaagaagagttattggaattaaagagtggcctggaggcgcagtttgaagaagtgaaggcaaaaggtctgaaactggatatgtccagaggaaaaccgtcagcagaccagctgaatctgtcaatggggatgatggatacactgacaagtggtgttgatctgacttgtgaagatggtgttgactgccgtaactatggcggacttgatggaattgatgaagcaaaacagcttcttgcagatatgatggaagttccgaaagataacgtgatcattttcggaaactcaagtctgaatgtgatgtatgatacggtagcacgtgcaatgacacatggtatcatgggaagtactccatggtgtaagcttgataaggtaaaattcttatgtccggttccgggatatgacagacatttcgcgattacagagcatttcggaattgagatgatcaatgtgccgatgacatcaacaggaccggatatggatatggttgagaaacttgtaagcagtgatccggcaatcaaaggaatctggtgtgtaccgaagtactctaacccacagggaatcacatattctgatgagacagtgttccgttttgcgaacctgaagccggcagcagaagatttccgtatcttctgggataatgcttactgtgtacatcatttatatgaagataagcaggattatctgattgagattctgatggagtgtaagaaggccggtaacccggatatggtttacaagttttcttctacatccaagatcagtttcccaggatcaggaattgcagcaatggcagcatctgatgcgaacctggaggatatcagaagcacaatgcgtgtgcagacaatcggacatgataaggtaaatcagctgcgtcatgtaagatttttcaaagatattcacggaattgtagaacatatgaagaaacatgcagatatcctgcgtccgaagtttgagactgttcttgaagttcttgaaagagaacttggcggacttgagattggatcatggatcgcgccacgcggaggatatttcatctcctttgatgcgctggatggatgtgcgaaagcgattgttgcgaaggcgaaagaagctggcgttgttatgacaggagcgggagcaacattcccttatggaaaagatccacatgacagcaatatccgtatcgcaccgtcttatccaacaccggaagaacttgcagttgccgctgaagtatttgtattgagtgtaaaactggcaagtgttgataagatccttgagacaaaataaataacagcattttataaagaccttttgcaagtggttgatctgccggcagaaggtctttttctgatggttgacagttactgtttactcccgtgtcaatcattccgctgattgacacggaggatgcgtgttttgatttgaatgcatctcgccccatcgccaaaggcgatttaaaatggcgagatgcgttgctggtcgcacatcgtgtgaacagtaacggttgacatgcgtttccagggagattataatgtagtgcatagcagaaaagaggaatgacatgataaaaggtgtaatatttgacgtagatggtgtccttctcaattccatgcctgtctgggagaatcttggagaattgtatctggatcatttgggaattgaggccgagaagaacctgggggagacattatttgagatgagcctggaggaggcggcagattatctgatctcacattataacctggagaagacagtggaagaggttgtacagggactgaataaggaagtggaagactattatgcaaaacgagttccattgaaagaaggggttcgtcagtatctggaggaattcagagagcggaagattcctatggtgatcgcaacaaccggtgaccggaagaatgcagaagcagctctgagcagattgaaggtattaccttattttcaaggagtttttacagcatctgagatcggaagcggtaaggatcagccggatatttattttgcagcacttttgcagctggatacggagccggaacagacctgggtgtttgaagatacttaccaggctttgagaacggcaaagcatgcgggatttaagacagtagcagtttatgataaggcaaatgacaagaatctggcgcagatctggaatacggcagatatctatttgccggaatttgatgattttaatgttttttggaacagggtgtctgaggaagagaaagaacagttgctgattgtagaataa

SEQ ID NO: 519 - DNA, 24126 bp, unidentified
  source 1..24126: mol_type = unassigned DNA
agtttcagggtgtttgcagttgagagtatggaggttttgtagtcctgtgtttctcggtattcttcaaaagtgttttttactttttccgccacttctgattcatacacacctgccgtgatgagcagcttccgtaccttgatgggatttaatcccagctcatctccgatggcctgcaaggacatctcagaatcataaagcgtcacagcactttccatctgctctttcagatttttcccggcattgtactctggcttcaacttcttccggccaccgcctggttttcttgttttcttcattttactcgtgcagctccagcggcagtccatccgggtcatggaagaaagtcatcttcttgccggtataatcgtcaacacgaatcggctcacattcaatacctatctccgccagctccctcaccgtctgctccacactgtctacgcagaatgcaaggtgacgtaggccacaggcctccgggcggttcacacgcttcggcgggttttcttctgcaaaaatctccagctctgtgtgttcgttaacacgcagatccagcttccaatctttacgctctggacggtagttttctctgataacagagaagcccagcttgttcacatagaaatcctttgaagcttcgtagtcagatacgataattgcaatatgatgtatttttgataaattcattttatgtcacactccatttcttttatttccgttataaactatatagcgaccttcaaaaaaaccgtgtgaacttctggagttcagtttgtccacacggccgatctcatttcagtttttcgaggatttcatccgcactcatgccgctggccagcagcttcttcagcacagcctctgcttcggtcttcttcgcttcttcagcggccttagcatctgcctttgccttcttcgattccagggatgccacttctttttcggccttcttcagagcagacttcttctctttcagatcagccttcaaagtatcaatgttggcagtgatggatgcgatctcagcagtcagggaagtgatagattcctgcttctctataatctgggttgaatagttggtattgggtttgggacggtttttgctgccttttgttctgggcataggtgataacctctttccttttatagttgtttaagtatagcactgtgttggggtgagggcaatcttacggtagcataattcctttagacagaagatatgccttaaaagcaccatacaatacaggaattccagctgttgcaccagccaccgcaatatctccgcccttatctttaacatattcccaaagaggatgcgtctcgtctatctctttctttatcaagttcatcagttctttttcaaccagaactccatcttctccagaagcaaaaatattctgcaatatttctaactgtttttggccggtttccaattgtttttgcaatgtttcatttgctttttctagcaattcaatatgtgacgattgctggtcaatcttcttttccaaacgttcattagtcacatctgtattatgtgctgtgcgctccattgcttcctgcatccgttttctattctgatatgcttgctcgcccacttcttgagtctgacgcatcatacggtcctgttctgctgcaatactttctgcaaacattctttgcggttgtatactagcattaaattttgaaatcatgtcagacgtaagtagggttccaaatttgaaatcatctgccattaatcttctcctatatatgtaaacatccttgtaataatctaatagcggggtccagaggtacggcctctaggtgtagtttcgtttattaacgctttattcttcgcttagctgttttcttcatgtaagtgttggctacgaaccccaaatacacccgtagggaatcccatctgaacccacatatacgttacaatcagactgttcatcacagcacctccatcaatctcaatgtctttgacaaatccttcggtttcgaattttaacttcatgcaactcagccaagttccaaataaaacaataagcgacaaattagttcttcttcacatctcagccgatcataataaatcgttgcctgctgcccaccacgaagaggtgtgtgattatcagagcagcgtagggagctatcgctcccagtatatcacaatttcatccagttttacagatactttcttgcctttatcaccgcacaatacatcaatccgccaatcactccaccgactgtgttatagaagatgtctgatagctgaaacgttcccaagcgaagcaataattgtagcatctcaatgcttatcgaaaagataaatgctatcttcccgctataccacagtatcttcttccaactgtttcctatcttctttccgaacgtccacatcactactgctgaaaacggcaccatcatgattacgttctcgatgcacgtcgtttacagatcactgaacaagtcagccttaattcccattccgaagcggctaccgataccagcagccatgataagtaatgttgttttcattgcctttcctcctcatttattatcgttgctaaatacattcttttccccatgccactttaatccttaatgcttaagtcctaccaggttccatctgccagttattctctcagtgtacttctttattacaatcttctcatattctttgaaattattttagcgtgaatattatataactattcttcattattaaaactattgcaaaataattatgattcccatatttccactgttcagattcagaacgccacatatctgcaatatatcaatatagaaaaccatatcttaaaacaagcaactaaaattatatttttcactttttctcagaagttaagttttaatgccttatcatgatttttagcctttgttttacaggggacaaagctcttctaattttttcaagcatcttcattgatccgtatttttttaaacaatactcgaatccttttagcaatcagcctttgaaattcttcatagtgaactggtttaggtgagggactatttaaatttttctgattaatatcatttaacgaacattcgattatatcaaattcattttttactgtttcaaatattttctttcccttttcggaatttatgataacagatgatacacccaatttatcttcaaatgtctcatttgcatttttgatattccaaaagtctccaattgttatgtctccctgtcgttccatgcttgagaatttacatgaataacaagaatctcttaatatataattattggtaaataaacgataaaaattatctacccatataggagcatggtatattcgtccattttcaaatttaatatataattcttgatttctccaaccatacgctttctctcgaaattttagttctgttatttgagaggaatacagcttttcttttccctttaaaaatgcgtttaataattcactacttggtacaccatgacaaattaaatccaacgtatataaattatcatattcttttctcaaatatttcttcaaaccagctacctcacatggcgtacctgtaaacaacacctcttttccttccttcagatctttctgtaccatacaaaaaatcgaatgtttatcactttgtacatatttagagccttgaaatttccgagcatcttcaagcgttgtcgctcttccatgttttacttgaaaatcattgttcatctccacaccatacacaacgccatcattgttcaaaatatattttgcaacttctacaaatactccacctgaactactttttgctcgttcatgctcatctttattttttactccataagctattttttcaaactttttattcttttctttatcttttaatggacaaaccttttcgcataatccgcaattaacgcatgaatcttttctaatttcaggatacaaatatcccttttcatcatgtttcatataaattgcatgtttaggacaaatattcaaacatgctgaacatccacaacagtcctctttatttatatataacttttccatcttattttcctttcatatttctcaatcttataagtatcgttctaaaattgtctcttgcaaatataatatgaaaaatacaaataaaaactaaactataaattccaacacagattgcgtaaacaaaccatgtaataagacttgttggcgtaaactttattagcattggtgccgtaacatatattactataatcattaaaattgcagtacaaatatttaacaaagtactttttctagtcatatgtgttaccattttgggtataaaaaagtacaaatcaatacaacgatataaattagataagcaggaagctaacatgattccagctaatccccattttattccaaagcaaatacctcctatcaataaaatagctgcttgaaccgtactttgaactcttgtttccttatataaccccgccgctatcactaacattccttgaggtgtttttagattgtataagattccattagctacaaataaaatagcaagtgtaagatttgtatattgaatatcatcaactccacttgtatagacccctacaaacggtaggattgtaactaatgtaatagaatatataacgctaaccataaaataataaagatattcgaaatcactatatgccttttgaaatgctgtcttatctttcttaacaattaattccccaaaacctgctgagacacccgtagaaaatacagacattactccattaatcccagacatcaccatattataaactgaataaacacttaccattttaagagatgaaaaaatggttgtcataactgctggagatgcattttgtacagtttgaactatctgtaaatataacgcactccatctcttatccatcgcaccataatcaggttccacgtcataacatataaagtggtaattagttttaacatacacatacaatattaatgttctcacaagtattgataacaatgcaataattctcaacaagacaatattaatatgcattattgataaggccacgacaatgatagtatttaaaactgtatacacaatcgaagccaatgaaattacatatgtcctttgatcagcagtaagcaatgctctgtattttgccaaagtaaaaaattctaacgagccattaactcccaacacaagaactaaaacgaaaatactagtttgatctaaaacagttgaatctgtaataaaaggataacatatagccaagattacaaccaaacctacaaaaatgaatcctgatttcacataaaagtgcttcgcagcaactactatccggttaatcctattgtagtctttctctgcgataggtttgtacaaagaataaacagctgcacttgacaaaccagcctctactagattgaagtaactaataaactgtagaatagatgatatcaagccattaatttcagatccatatgctgtcaacataaatctaggagttataaaacctgcaatcattgttacaacctgtaataatgctgtcgtaaccgaattcaacataaatttttttgagcgtcccatattttaccttgcctttattcctaacattcccataatatagtatattttttgtttaattccgttttccccaactacttttaatttgttataataaatttttacttcacttttcattccgtattcatttgccaatcgaagataaaaacgattaaagtgtacaaatacttttcgagtgtatatattctgatcattgaagtcacatatattctttacaagatcatataatgtattttcatgttcttgaaatcttcggattgttttttcataattattattatcttgattagaatgactgtttttatgtagaatatacttatataacgttttatcaatgtatccaatttttttttcgtgatatgcaactggcaataaaatctgataattctgcccaattcggctctcatttatatgtctacttggcacatacttaaaaaatacatctgttctcatgatataaattcccggacaaaatacaacatttttactgaataataaatcttcaaaaaaattatctttttcaggtttaattctttgtaaacgctttattacatttccactctcatctacataatcagccccagacattgccaatggaatatctgggtgttgttccatgtatttcaccttttcgctaatattgtttcgatacaattcgtcatctgaatctggccaaataaagtattttccttgaatatatggaaagcccaaattcatagcctttgcttgtccaccattctcctgctttaaatacacaaaacgaatgtttctttcttcaaatttctccttatacttatagacaatattttcagttctatcagttgagccatcattaataaaaattatttcatatttttcataatcctgttccaaaattgagataaaaaatgcatctaaatatttttcagaattatatgacggagtaataatactcactaacggttccactttaacacctccactcaaatctaaaacttccatttaatagttcttttactgaccatataagaagaatccgctacttttatatttgaaaccaacagaataataataatcaaaacaattagctggcatggataatataatgtatttccagtaaaactatagactccaaacaaaataatccaataaatcaaaagtatattccaaaaaacaggcttttctttaactacagatattatcttgaacagcatcaagataataagtaatgtcattaatagaaaaccaacgattccagtttctgccaaaagctgaatatatacattatgtgcctgataattccaacgttctccataatatcgaaatcctcgataaaaagcataatcattaaacgataaaaacccttttccaaacaatgggttttgccgaaacatttccattgcataattccaaaacacttctctacccgaaagtacgtctccttcattattcacaatgcgatcgatgattaaagacgcactaggaactagtacatatgcacctataataaatatagtaattcctaaaccaacacctgccaattttataaatttattgtttttagaaaaaagtataacataaatcagcaaaactgctattggtataataaaaagcgtcctttttcccgtcatcattagagctaccattacaataagactctgaataatatatttatatgatttatgacagatatattctgcaaaaatcatccctagtcctagattgcagataaatgccgcatatgccttttcaaaagcgagacctgcgattgctccgcctgatgtaagcgcacgcatagtttcatctccgaatgacgcaaatctaaacaatctatgaaaaatatccggcgatgccgcttctaaaaacatagaaaaaataaatatccaaaatagcgccctgaagattttcaataaatagcgataaaatatttctgaaaacctaaaaaggacaatacttatgcccgaaacaaagtatatactataatctatagatccatcagagctagaaaaccaaatgcaaccgacaagtagaattgaaacaaatgcaacatatagacctataaacttattcatttttactgtataatctttttttgaaacgaacaacacaaaacacaaaacgattatgaagagcgataggtgttttgtgtacatcatcaacttgttattggtagaaaaaataaccagattaataagtaaagcaattattatttctaatgttttagtaccagttaaattagaatgaccttccatcttcattcaaaaccctctcaaaatactgatttgtttttatatattgttttctgatctgatcatcggcaaaattaaaatctctactaacatttaatctacaatcctctaatgttttcaccttacatccatctaaccctgttaaacataacaaagattcgactctatcattaggcttaaaatctttttgtaatgcttccacataaaaatctttatgaaaaataacagagaaggctgttccatggaatgaattagtcacaacatagtcagcatattttatatatcccaaaaactcttctactgatgccgaatacactccttttatatccggagttttcatttgatctactacatcaaaattcaacgccacaatttttctgcccgttaatttagataattttcttgcaaagtcaaaaatcaaattcgatgtattcaatttgtaaattaatatataattcttaagtttaggtttctttgcaagtttttcccattcttctgcggtcaataaaaagactggatccacagataattccgaatcttttccggttagtttttttacaatctgttgtcctgcattttcacggatagataattcagaaaaagttgatagcaaacttttataatcatttacatagctgtctggaatctccttcataccaaacgaagcagcataggaaagtttgttatcacaattttttacaaattgtaaaaaatatgttttatcgaaatctgtacatgcaaaattgaaaacctgatcgcttcctgttataaacttatcgtagcgaagattcgccttatctatattaaacttatcataaacttctgtacttattcggacattttgatccaaaaatctgtaaaattctctttttttcttatatgtgtttttaaaattcaacattcctctaataatctgttttacagacttgtcctttattgtgaatgttttataaaaattttccatatgttcacatcgataatctataacctctgcatcatagttagaaacatttaaaaatttctgtaatgcatatgtttgcaaaactgccccataattaattgctctgtgaaacgtaataattcctattctcataaatatccctctataaatcaatttattttagatagtatctcaaaaactcgtatcaatttccatttaagcgaataatatacaacaatatttttcaaatttgtcggctgatataagtcaataacacgcattatctcctgatcattcaaaagtattctataaaagtctttagcatctctcgttttagaaatcttatttatattgaatctcaaggtaaaaaaagtccgattaattattcttcgtttcaaattatagtctttcaaaacatctccaaacagtatgcaaacttcattatataaatttacaattctttttaagacggatacatcaattcgatgcgtaaacgaagtgtcattaacacggtataaatatacagcttcagtgcaaaaggctatttttttagcatgtgtcataaacatcagcttaaataacaaatcttcagaataaacatctcgttcggaaaaaaattgtataccctcattttcaattatatctcttttgaaaatgctatcccataccgcaatacatccagagtatccatctttctcttcgtaagaaatcatatcagccattgcagccttaatttctttgcagccaattaaaattttatcatttagtggatgttcctttatgatctttccatcatgcatatcaactattctacaagaaaccatatctgcatttgtttcaatcgctctttgatacagtttttcaagcatattctccttatactgatcatccgaatctaagaatgcaatatattcacctgtagatttttttataccaaaatttctttctaagccttgccccacatttttattagtatataattgaatcctattatctctttttttatatttttcacatatcagaaaagaattatctgttgaaccatcatcgattaataatagttcaatatctcgcaacgtttgattcaatacggactcaatacattgctccagataaagttccgcattatatattggtacaattacactaatttttggtctcattcatcattccccatacactatcacaaattctagtttcttttaatgtcatcatattcttctttttaatttgattctggtatcaaataattattttgtattcttctcgtcacttgatgtaattaaataatcataaaagttatgtccgtgtttaatatcagcatctaatttatatgtcaacttatgaatacctgtaagttttttgatccaattccatttctcttctgaataatcatcagctaaaaccttaacaagatactcgctataatcactgttcatatagggaattgctttctcaacttccggattactcttcaccaccaatgttataatcaaatttggtagcagatactcaattacatgttcgtttttgagccaatatgagaaagcaacatttcttacttctcgaatagtcttatttcccttttttgcatgtaggaaccaagccggatacagcacaggattgtcaatcagcaacaatgaattacgcacagcgaaaaaatcactgtttaggatcgtatctggaagtggttctgtaaggtacacagttgaatcgatccacgttccaccataatgttccagtaatgcaaatctcatcagatccgcatatccagccatcggaatctggccagcgtcctttttcttttcaatgtaatctggcaatcgaatgtaatctgcaagattttggtcattcagcaaaatgattttttgattcgaatgtttacatacagattcatagcacttttgaataatgatcggtgcctgttcaatacctttgttccaataaatccaaatcggattctctacatcattttcgggaaaactaagcccctgaacatctgtgtccttatactttaaatatagttttatcttggaagaagctcgttcctgccataataccttccgcacctcataatccttgacaagatgcaatttgataaacataaatgcccctcgtttgacggcattaacaattccatatctttgaataaagcctttcatgccaatattttgatagtagtcattcagcataataatttaattgtctccctttatcttgcagaaactactattcaaaaggctcatagattccgcaccagataatggtaaactgtttcctccttatcaatagatggttctaatttataggttagtttatgtatcccagtaagccgcttaatccaattaaatttttcctctgtaaatttatctcctaatactctaaccagatattcgctgtagtcactattcaaataaggcatctttctctcaacctctggtgataacctcattatttgtgtgattacaatattggaaaacagatattctggtacatgattatttcgtttccagtaagcaaataggacattacgaatctcacaaatcgttctattatgttgcttggcgtggatgaaccagaccggatacaatacgggattatcaatttcaccgagtgaattgtgaaacacaaaaaaatcactatttaatatttcctgtgggatttcatctgttagcagtattgttgcatccatccatgtcccaccataatgttccaataatgctacacgcatcaaatctgtataaatcgctaatggaaggactccgctttttaatttctcattcagataatccggcatatttatatagttctgcacattgttttctgtaagcaaaacaacttgtctgccggcatatttttttacagattgatagcacgtccttactatctcaggtgcctgctccaaccctgtattccagaataaccaaataggttcatctacttgggtttctgggaacgtcagcttttcaggagcgatatctctgaacttcagatattttttacaaaccgctgtgccaccccccgattgccaaagcagttttctcagctcataatctttgacaatatgaagtgggttacgaagaaatttgttccacattcttttctcctcgataaattttcatcagttttacatagtagctctctgtcgtttcataattcacctgactacaattctttgtatatctttccaatacatcttgtgtttgaagaactttctttatcgccttcatcagttcttccacattacccgcttcaaacaattctccggttttaccaggctcaattaattcggggatacctcccattttagacccaacaacaggcgtacccaaaagtaccgactccataacagagtacgggcagttttcataccattcagacgggcagacactgattgctgcctcagcaataatgcgatagagttcttctccagtcttaaatcccagatacttcacattgggaatatccttcattttatcaactgatgggccatagccaataaacacaaattctgtatttggcatcttcttggctacttcaagcaaagtatctgttcccttgtctcgcgacagatgcccaaactctaatacataaccctttttttgaatgttatccaagtgcggcatctcttttttgaaattatgcaacccgatggttttatcacggaatcttttctgcgtgtccagctttgatttaagaaaataactacagcaaatataggcatccacatatgagtatgctttactatatttccacatatatccatccagtgttccaagaagactttttgctctggaatttttcaagcatttagtttgaagacaatgaatataatgaccatctaagcatcgttcacatggcttcatgttcacatcaaacattccatggctgggacaaacaagttggtaatcatgtgtcgtgtaaacaatcttacattctttttttgtttctttacgccatttgttaatttccaaaataatagaaggggtcaaatgatactgtatattattgagatggactacatccggctgaaaatcatctaaaaccgcacgaatttttttgcgtgcttctcttgagtagataatacgaaaaggcgcatttaaatttgcctttatcccttgagaaaaatccatattcgtcacatatgagcccactcgatttcctactgtatttttttcattctcaagcccgaagtactggacttcgtgcccgtgttcttctaacatttttcctacatcgaatgtgtacgtttccgctccaccttttggaaatataaatttatttacaagtaaaatccgcatatcttaacttccttactttcattttctcctgtacaatttcagtgtttcttccacaacatcatcccagttatattttttacaaatataatctgctgcctgttgttttagctccattattttttcagtacgatcacaagcttcttgtaatttattctgtaaatcttgtacattcgactttttaaatatcagagctttatcttccacaacctctgtacactcttgaatgtcagaaaccaagcaacaatttccatagctcattgcttccaagaggctcaaaggcattccttctaaatcagaagggagtgtataaatataagcattactgtatagttcttccaacatctgaccttgaacaaatcccgtgaagataattcttttatcatctttcgccaattcttttagctctttcataaaagaatctgtatcacttgatccaccggcgatgacaagtttcttttctgtcttaacgttcttgaaagcctcaaccaaatatcgaatacctttttccggtactaatcgtccaagaaataatatgtaagaatcttttgtcaatccaaatttatcagtaatcaattctgcttttctaatttccgttcgattcacaccgtttgggataaatcttgtctctcttccatactgatttctaaagtaatcatgtacgcctttgctcaaaacgatgatttcatcagcatatttcacagcatttttctcgccctgcttgataaacttagatccgaaacccgatttccatttttcacgttgccagtccaaaccatgaaccgttactattactcttttccctaacaacttcggcaaccatgaaaaaaaggctggtccttcggcatgaatgtgtacgacattatattttccaaatgcactataaagtgccgcaaagaatgatgagctaacagctgcaagacctttcttttcgatggttggaacgcatttctgattaattccttcatattcagttttcttatcatattctgcaccactcacatgatgtcctgatctgttataacaagtaactgtataaccattcttcgccattcttgtgcaaagctctttgacgacaatttcgattccgccttctctgcttaatcgtttttgtccaaacatagcaatcgccatctttttactactcatcacacacactcacccgaatctccccatcctctttcttcacatcaaacacaagcggatgctccttcccccactccggatcttccttctccttctcattccattccttccatttctgaatgaaaccattgtggatcaggttctccgctgcaagtcttgcttgcaccgcttcgtcataattatcaaaaagaccaacataatagcgctttcccttgaatccgatatccacacgataccgattagaattcttcaattggaaaacgccccggaaaccactcatgttatcttttctgctttttcttttttctagtacttcaacacaggttccgtctacgagatgtcgtctctgcgcaatttcctgacgattcttcttttgtaaacaaccgcagctatgataattaccatgcacaagacctgctgccgtcacgtcaacttcatttccacaatcacagacacaatgccaataaacggagccccgtttatctcttttctccgtcgcatacttggctgtcaacataccgaactttcttcctgacagatctgctggtcttcttcccataagccttcaccctttttgcaaaaaatttcgtagagtagattactctacgaaatacgctttttctttaaattgtttcaaatcttagtataattatcgtgtccagtctactcttttcaaacatttctgtcaatgtgtatacgttcatttcatgaatttatacaatctcttagcaaaaaaagtcgaaaaatagacactttcgtcattttaatctccttttttgaatggatttttatctattcgccgtcaaatttatggtcaattgtcagtcaatttccaatctatccgatcagaaaatttaaaatagttatcttaatttatctaagtcacttcgcgcttttacaatcacaagtatttaaaaatcaatcataattataaatttcacagcatttatttaccgtcaattttttggtcagacacctgaaagccattgatttccaaggctttccgtaaaaattcgtagagtaatctactccacgaaatacgctttctttttctattctgaacttttctctttttccccatacacctcaaagaaactgccccggattataaatacaattatttccacacggctgaccatcaaatattttcttattcaattgatcgatatatctccctgtctctttttcttctctttgattctcctccagaacccccaacgcagccttcagattccgaatatcccggatcatatcttccacataatttcctcgtcctaccagtttcagatgggtaatccctgccgcctccagctgtggcagcgcacacagagcacatccactcttcccacagagatattgttgctcttgttgctcttctatttccaatgttctttttctcactcgttccatacgctcttccatctcagcatctccccagtaggtcgtcctgcacagataacccatctcgtcacagtgaagggaattgcagaatgctcctgtgaactgacacaattcattcaatgcaaaggcctcaaattccagtttttctgcatttacagcttctatcatctgccgcatcgatgcaactgtatttttcctgtggaagatgattcgaccgattcccatttcccggaaaactttgattgccccccggttcatttctccggcttcaccgctgagatggatcttacaggatatgcctttctgtctcaggtacaaaatcaatgctggatcggcaaggatgaagctgtcgaatccgattttcatacactgtttcacaatgtctgcaatctcttcatattgttccggaatataatagagagaattcatcgcgatatgcaccggctttctgtacttcctgatcattgctgagaggatctctaattcactgaaagaaccgagctgcacattataagccagcacttccctgcggttcagtggaagtacggttccgtatttttttgtccagttgtatggcacatatccgcaaaacaattcgtctgctcctgcctggacatatggaatatattcatccacagagccaagtcctgcaacgattttcatccttcgctctgctttttctttttcattctgttttcttttctgtgtctccattcttccatcatccttctgtttttcacatttcacaatagattgaccacaaggcggttccattttattccgagttctctcttcaactgctccggttcatccagcagatgtttatccaatgcaaacagactgttgtattttcccttcatatataaatgctttggatagaagaagctatgttccagacacggagccggacattcttgtctctccctttgttttccacgttcgccgtgctccaacacagcgcaaagtgtacaatagctcgacgtatttgtctgatagaacggcacatggagatggttctgtatcttttgcggtatttcctgtgtataaccgcagctttcccactcataacaactgattccaaagctttcttccagataggtgcgataaaatcctgcattcagattattctgttccaacagcgtcttatctcccatcttgtaggacattctcggatctttcttccgcttatttaagagcgtcccaagacacgggatcagatgttctgtccgcttcacaagatgtgccagtccccaatcattgactacaacctcaagtcgtttcttctccgccccggaagtcttctgttgttcacaccactgatccagatgtgtcaacagctgttctgtctgtgtaagcctgtcttcccgaataaaggaaaagacaacggtcacttccatccgttctttatctgctttctcaagaagtgcaaagaactgttcttctttcggaaatagatgtggacagaattggttgccgagatacaaccggtccggttgtcttcccaggatccgcgcatctttgattccatgctgctgccagtattctttcatgaaccgttcaatcggtctggtcagatattgttcgtatagtttcggatgatccagttctactgctaattctgccggcagatttcggaagatctccgcattctgaaaccactctttattttgttctgtttcattcttgaaatgttcctcttcttcctgcgcgggataactggtcatttcttgcgccagatgtgcatcatcctcttccagcttgagcgaaatgtatcggctgtattcgacacagagcttctgaaaggcttctttataatcttcctgagctgtgaaaatatcataggcttgatagaattctgtctgttccccggcctctatctgaaaatgacgaatttcaatctcccgatactctacctgatccatctgatagaagcagatcttgaatgctttcggataaatgttctcctctgctttccctctcctgcaaagccggatacggaatccttcggatgaaatctctgtcaggcggacttctctttgcctctcttctattgaatcttctgtcataactccggccagaagaccatatggaatcatctgaattcctttaatccttcgctttttcatttgcttcctctctcttttacaaaatccctgtttgaacaaagaatgtgcctcggcacattcttacgcctgcggcggtcgcttgccacacttacattatacgccgcagtgtgcatcctaagcggagcgttttttatatattaggaaagcactttcctaatatataaaagatcgtgctgtcagcagaactctccgctgacagcacgattcctatactttttacttatataattcgattagatgttcagaagatcactgaatactctcagggctccgtctgtctcatgtgcaagtacgcgttttgcaaggactttaccgagctgaacaccttcctgatcgaagctgtttacattccacaggaatccctggaacatgatcttgttctcgaagtgagcaagcagtgctccgagagatgccggtgttaactgctctccgataatgatgcttgaaggacgtcctccttcgaagttcttgttacggttctcgtcttctttaccacatgcaaatgctacgatctgagcagctacgttcgcgcagagtttctgctggcttgtgctgtcctggatcacaacatctgtaccgatctggctgttcttgaatcctacgaactgaagcggcacaatatctgttccctggtgaagaagctgatagaaggagtgctgtccgtttgttccaggctctccgaagataaccggtcctgtcacgtaatcaaccggctcaccaaagcggtttacggattttccgttagactccatatccagctgctgcagatgtgcagggaaacggctcagtgcctgggagtaaggaagtactgctgtgcttgggtatccgagtacatttctctcatatacaccgatcaatgcatcgagcatctccgggttctctttgatattcttattgagggacagtttatcctcagctgctgctccgtcaaggaactgtgcgaatacttccggtccgaatgcgagggaaagtactgctccaccaactgctgatgtagatgagaaacgtcctccgatatagtcatccatgaagaaggctgcaaggtaatcatcactctttgcaagtggtgaagtctcacttgttactgcgatcatatgcttggatgcgtcaagtcctgcattcttaagggcatccttaacaaaggactcatttgtcagagtctcaagtgttgttcctgacttggatacaagtacgaagatggagtgagcaacatctacagaattcagaactgctgccgcatcatccgggtcaacgttgctgatgaactttgcttccatcttgaatgtatcattcttctttgcccagttctcaagtgcaaggtacattgcgcgaggaccgaggtcacttccgccgataccaatctgaacaactgttgtaaacttctctccggcaccgtttgtgatctcacctgcatgtactttgttcgcaaactcagcaatcttcttctgctgctctacatagaaagtacgcttgtcaacaccgtcagcctcaacagcatctccgagctgtccgcgtgtcatatggtgaagtacgagacgcttctctcctgtgttcacaacttctccgttgtaaagtgcttcgaacttctctgtcagctgtgcttcttctgccagtttctcaagagctgcaagaactgtgtcatccactttcttcgctgcataattgtatgctaatccttctgccatcggaacgctgtagttcttcacacgctctgctccgttctctccggccatcactgctgcgaggtctacactttctgtcttctcaagttcctgataagaagtaagcttatccaaattgttccaggtaatcatcgttgattcctccttcataaaataaagttcatatccggctgtcgggttcagtatcttctgaccggcagaccatccatttcataaaaaagctattgttaatttctcaacaatcaagttcattatacaatcaatccaatgcaaattcaacccacaaacgatattatcagagcagctccgcaaacagacgtaagatcagctgtccgagtcttaagcccgcacttcttccttctttatactgctcggtcacttctctgctttctcccatcatgcggatcagatcatcccggatctccagcactgcgtcgcaatctgccaggaagcatccattctcaaagtgatggtacaggctgcggtaatcgagattgatcgttccgcaggtcgccattttatcatctgccacactcatcttcgcatgacagaatcccggtgtccactcatagatacggactccatgcttaaccagattatgatagaaggaacgggtcacactgtagaccatcttcttgtccgggatacccggtgttatgatacgcacatcaacaccacgctttgctgccagtgtgagtgcatgtgtcatctcgtctgtaataatcaggtacggagtgataaaccagcagtatctctccgctttgttcgccatactgatatatacttcctcgcctacctgctcaccatcgagcggactgtctgcatatggctggacataaccacgctgttgtgcctggtatgcatagtggatcacatatttctccggtacaagttcttttgactttacatttccggctgcattccacatttccagaaatgctactgtcatagacttgactgcatctccttccatacgaatcccggtatctttccagattccatacggatgtgtgatgttgaaatactcattcgccagattgtatccacctgtgtaagcaacctttccatcaatcacagtaatcttccggtgatcacgattgttcaggaacatattcagtcccggcagaatcgggttaaatacacggcatttgattcctaaagatttcagttttgttgcaaaatccatgttcacaaaccagatcgatcccatatcatcatagaagatacggacttctacgcctgctttcacacggtcttcaagtaccgtctgaatcctctgccatgcctcttcgtcttcgatggcatgatactccataaagatgaacttttctgcctttgaaagatcctccagctgtgcatccagccctttgatcgcctcatcataatatgtaacgtctgtgttctgataaaccgggtaacaagagtaattcgtcagataagaagcaattgcccccgcctgtggactctcttctttcatccattcgagaatctgtctgttatccggaagatatgggagcagttttttatcaatctcttcatatctcgcccgcatcttcttcgtacttccgttcagacctacgagaagatacagactcacaccaagaatcgggaatgcaagcatcagtatgatccatggcattttcatcgatgaagtcttatccatgctgtaaagtccaagcacaagaaagattgccacgattcttgttgcccagtcaataatggttgcatattcacttacctttgtaaacagaaagagaaggaagacgatctccagcaagatagatactgctgtgaagatcagcctctttgttccgttctctgtctttttctttccctctaatgtactgctgctcaaatctacatgccccttttctcttttccttttaatgattgctattttctctttgcatagaaagacggagaatccgatcactcagattctcctgactcttttaattaacacatactataacagatatggaaggaaattgaaacaagtattttctttttccactattttttattcatgtcgcagtgcctcgattggattcatattcgctgctttcacagacgggatcaatccgaaaataatgccgatcagtgtagagaacagcactgcgatcacaatcgaaactccgctgattgctaccggaaccgctgagactttggatataatgtacgcaagtgcaattcctccaagaacacctataattcctccaagcagtgtcagcaccgccgcctctgtcaggaactgtgtcagaattctgcgttttctcgctccgagtgctttctttaatccaatctcgccggtacgttctgtaaccgacacgagcatgatattcataactccgattccaccaactaacagggaaatgctggcgatccagatcagctgctgatttgtcgagttactgatctcctggatctgtgttgcctgttctaacagatcttctcctttgtatttcacggtatcatctgaaactgtcagcatagcatttaaaatatctgcggctttctctcctgccgctgtcatatcatctgtactttttgcacgcacgacaaggttctgcggttcgtcatactggtaaatgaccggccatacattatccggaataatgatctttccactctggtcatccgacatgtagcggtagtaatcttccattgagttgatcaccggctgggactctgctttctttgcaaccattccaacgacaacaaacggttctcctttaatttcgatcgttcttccgatcacatctgcattgtcgaataaacttgccgctgttgttttgtctatcaaggctacttttcgtccttcggaataatctttgtctgttaatcctcttcctttggtcacctgatatccgtaaacatccagataatttctgtcaattccgagaatcacgctgttacttaatgactttgcgccgcggtaaactgcgtcgtattcatttcttgtatgatataaagacgctgtctccacttccgggagttcaacgacttcctgcaatgtctcgtctgagatctccggcactccgtccgggagtgactgatactgcagatcgatcggccagtcaccctgatagagctgtacatttaccgcgtcatttcctgcaccgaccagattcttcttaatctgttcattcgttcctttgatcgtggacacaattgctataatggagccgattcctatgatgattccgagcattgtgagcgcagatcttaatttatgattccagattccctgaaacgccagtctgatgtcttctaacataatggcacctcactctctttcattttgatactgttcagtcttcttaataatagtcgtacagggtatctgcttcctgtgtctttgcgccttctttgacatctctgccgtaagggaacgcgatcaggtcgtccattgtgaggccggaggtgatctccagtgaattgtacatatttttgccaacctctacatactgttttgttaatctgccgttatcgccccgcttgtagacataatagcggtttccttcctcgcggacaaacattttttcaagatagatcgatccatcactacctgctgcaattccatccatcgacagattcacagactcaccattcgagagatttgcgtctccgtggatcacgagcgtgaacggatagaaggactgattctggttctctcctgtggaataatcgcttaccggtgagttgccaacacctgtaactgtcgcttcgtaggattctcccgactgccaggacattacagtcgcagtcattccttctttgatctgatcaagcattgtctctccgactcttccggtcacatagaaaccttcttctccgacaacgctgacaaccggtttgttctcattctttgcagacgcttcgtcagtcgcttctttgactacaccttctaccgtacttttaatcacgccgtccccgacctttttcttcagctttttcagttccagttcagcggatctcctggaaagatccagatctttgatcttctgctctttctccttgatttgcttcgtcacttcttcctttgacgggaggtccggggtgtctgggataaccggatcttctgaaatatccggttccggagttggctctggttccggagttggctctggttccggagttggctctggatttggagtcggctccggctctagatttggagtcggctccgggtctggagttggttgtggatccggtatgactacctgtcctgtttttccatcgaggatccaacaggataagaattttgtcggcgcttctgcattatctactacatcaaaggcacacacttgaccctcttttaatactttgagcataaacggtgcatttacggctgcccccggtgcacaaagataacgatacggtttttccattgttccgtctgcgtcttctttattataaggaacagaatctaatgtgatctcactgtaaacctcttttccctttaatgcttcaggaaatggacgctcgattgcggaagacggtacatcgtcttttttgttatcgtctttggatgtatcgtcttttgtattatcatctttcgaagcatcgtcttttgaagtatcatccttcgaggtatcaccatccggttttttattctcatcctcttttgatgtattaagaacggttgtctttacagcactcatcttctgtacagttggctgctgttctccatctgtgcttgtctgcacgacggatgcccctgtatctgccttcgcggtcttcgtccccttgagctgggtgatctctttctgcaggttctgaatgttcaggtca

SEQ ID NO: 520 - DNA, 15572 bp, unidentified
  source 1..15572: mol_type = unassigned DNA
tctgcagcattctttccgggtactctttctcgtcatagccgaatatttcactgccccggagtatactcccctgcaaggggaaagtcaagtgatgcggcccgtctgatttttcatctggtttgcctccggagtgaaagcatttcagacaagggcagtgccggggtctgcggcagacgatgcggaggcaaagcagaacgaacagccttatccgcacagcgaacaagtgatataccagaaagctcgatcttacgactgatttcgcaactttttctgtcaaaaagtggttaagctgcggcaaagatttttctttttgtgctttcggttttccgcggagcattctttcctctgctgctgcgtgaagttgatttttctcaattttacacgatattccgtaaaattgttcgttcccgttttccagttcgtctttttactgcaccaccggtttcaccggacatgcaaaacacgccgccaaattttgaaattttggctgtttattttgaagccaagagatggtatataaattttgtcagaacattttgcgggcagcgaacctgcattcatgcagccgtttcaaagcggcgtgacaattttgatagagaggtgattggtgtgttttggtatcattgtgttatggaacgactttatcatcccgcgtgtggtgcgtatacatcctttggcatcgccgcgcattctacatctcacggacgacaccgaaaactgcggttcatctcagatgtctccgttgacccggtgcgggtccttcgtctggccgcgcgctgtaccgcgtgccagctcgatccgtctcagctgatggatgtggtggaggatctgctggcggaataaggccgccttttgcgggaggagttttttctgtcacaattctatggtatactggtagaaaaacaccggaggataccaccatggcagaaacgaaccaggcccagcgggaggaagagctggcccgccgtgaggcactgcttgcccagcgggaggcccagctggaaaaggagcaggcagaacttgccgccgccaaagcccagagcgctgagaaaaaaaagactctgctggacaacaacgacccgaatttcgtcaaccccaaggaaaagctctacgataaattccccctcacggtccaccagatggacatcatcattggggtgctgtttgccctcattcttctgtttctggtgctgggcatgacgcacaccagctttttcgggctgttcggcggctgaaccctgcccgccccacccgcacaggaaccaataaacgcacgaaagccccggccggagccggggctttctgtttgctgcaaatgcctgttacaacaggacgtatttcaagatgaacagaacggtcagcacatacatcagggggctgatcttcttctccttggccttgccggtgatgacgttcagcagggtccaggagatgacaccgatggcgatgccctcagagatgctgtatgcggtgggcattgccagaatggtcaggaatgcgggaatgccctcagcaggatcatcgaactcgatcttcagggcagaacccatcatgtagaagccaacgatgatcagggccggagcggtcgcaaagctggggatggtcaggaacagggggctgaacaccacggccagcaggaacagcacaccggtggtcatggaggtcaggccggtgcggccgccctcggtcacgccggaagcgctctcgacgaaggtggtggtggtggaggtgcccagtacggcaccggcgcaggtggcgatggagtcggccatcagcgcgcccttgatgttgggcagcttgccctcctcatccagcatgtcggccttggaagcaacaccgatcagggtgcccagggtgtcgaacaggtcaacgaagaggaaggagaacatcacggcgaagaagttcaggatgcccacgccggagaaatcggtcttgaacacctgaccaaaggtcttgcccagagcagagaaatcgaagctgatgaagctggtagggatgacactgtacatgccggcatcggggttggggatgtagatgccggtcagctcgcagaggatgcccagcacccaggtgatgaggatgccgtacaggatgccgcccttgacctttttgaccagcaggatggcggtgatgagcacgcccaccagcgtgaggatcgcacccacgccgatgctgtggaaggtctcgcccttgaagtgctgataggtaacaagggtggaatcgctgttcacgatcagctttgcgttctgcaggccgacgaatgcaacgaacagaccgatgcccacgctgacagcgctcttcagggtcatggggatggcgttgaagatggcctcacgcacattggtcaggctcagcacaatgaagatgatgccctccacaaaaacggccatcagggccagctgccagctgtaacccatggtcaggacgaccgtgtaggagaagtaggcgttcaggcccatgccgggagccagagcgaacggatagttggccagcagagccatcagggcagtgccaacgaacgatgccagcgaggtggcgatcaggaccgcattggcatccatgcccgaagcggacaggatgctggggttgaccgcaaggatgtaggccatcgtcataaaggtggtgacacccgccatgagttcggtcttgacatcggtgtggttttctttcaggtgaaagatcttttctaacatgaaagttcctcctgtgttatagtaaaaataaaaaccgccgcgtgggaaccggcggaaagaacagctcccattgtagcagaactgttcccacctgtccatggtcgaaacacagaaaattcacggaaagttcaaactttcttgtataggtatgacttatctgagagttttttggcgttttatggaaatttttctttccggttatggagtttgtgccgctccgtatatccccatagtctgtatttgcgataaaatccacctcctattcacaagaaagcgcccccgctcactgcgatcttgcagtgaacgggggcgctgtgctttttcatagaaaagagcggattttgcaagaaaaaaactctgtcggcccaagaggcttacacctgatgctctgcgatccactggcccatctgctgggcgatggccttgatcgagccatcctcaaagggaaccttcagcccggcggtctgcatcagctctgtgtagctggccagaccggcacggcgcactagcttgaggtagcgctcccaggcatccttgtggtccttgaggctcagcaggaagaactgcagcgcggccatggtggacaggcagtaatcaatatagtagaaggggcactcatagatgtggagctggcgctgccagccggcaccgcggccatagaagggcaggttgtcgaaatcgatccaggggcggtacttgtgctccagctccagccagacggcgttgcgctcgtccggggtgaggtcggggttctggtacatcctgtgctggaactcgtccacaatgcagccataggccaggaagaggaagctgtcctcggcgtggagcagggcgtatttctcagtgtccttgccaaagagcagatggtgccagggagccgtcaggaactccatggccatggagtggatctcggcgctctccatgccggggcattcgaggtctgcggggaccttggggtcacgctcggccacatagccctcaaaggcgtggccgcactcgtgggtcagcacgtccacgtcagcagaggtgttgttccagttggcaaagataaagggggccttgtaggtgggcaggctggtcatatagccgccggacatcttgccggggcggctctccacgtcgaacagctcattgtcctgcatgaagtcaatgaattctgctgtctcggggctcagctcgtggtacatggtgcgggcggcggccatccgggcatcgtagccggggatgggagaggggttgccgtcctgaaacgccacaggcaggtcggagaaggtcaggtgggagatgccggtgcgcttgcagcgcagctcgatcacctttttcagctcgggcaccacatcgctggccacctggtcgcggaacttccggatctcggcagggccgtagccgatgcggttcatccgcacataggaaagctcgctgtaatcgtggtaacccaggatctgcgcctgtgcgttcaggttcttgacgatcttggtgtacaggccatccagctcgacacggtgggcatcgaaatacgcggcctcggcctcgtaggcggcgcggcggacggcagggtccaggttctccttgtaggggcccagctggggaatggtcagctgcttgccgtcaaactcgaccagtgcgccgccgtacacctgctggtactggctgacaagggcgttgtactccttctgcagctccacggtgcggtcatccatgcccagcacggcattcttcatgccagccacgcaggtggtgccaaaggcttcggtcagcgcgtccacatgggcgttggccagaaatgcccggctgatctccacccgtgcgttctccacggcgggaccgttggcatcaaagaaatcctgctcggccttccaataagcgtcacgggtgtcgcaggtgtagtggatgcttgccagctgtgcggcggtgctgtaatcggcaaaggcgcggctctgctcgtagtaaacattcaccagctcctcgccgctggctaccccggcggccttggtggccagcgccttgcactggcccagcagggcatcaatgtccgggcgggtataactcatttcgctgaatttcatgggatccatcctttcgttccttcttgtctgagtgctgaacccatattagcacgtttggggaaaaagggcaatggaaaagaggaactgtccctgtggaggaaagtgtgtcagaattgtaaaagctaaaatattttagctattattcttgacttatccgacgattcagatataatggtcgtgttcgcaagaaacctcaagctttttagataataaaaatacaaaccaatcaaaggagaatattaccatgacgtttgaagaaatgaagaagatcgttgttgacaccctgaactgcgaggaggacaaggtgaccatggaggccagcctgaccgaggatctggaggccgacagcctggatgccgtggagctgaacatggcgctggaggatgcctgcggtgtgtccatcccggacgaggagctggcaaagctcaagaccgtgggtgacatctacaactacatcaccgcacatatctgaggaaacatgcgatgaatgatatccgagatctgctccccaaccggatgcgggagcgcactttccagctgaaagccaagcgggatgccggagctgtctggcacgagccgcagtttgtggagtgcaagcagtgcggccgccgcgctgcccgcaccctgtggggcaaaagcctgtatgtctgccccaactgcggctatcacatgcccattggcgggtattaccggctcagtctggtgctggatcacggcagcttccgggaactggacgctgaccttgatccgcaggatgtgctgaacttccccggatacggggaaaaacttaccgccgcccagaacgagaccggcctgcacgaggctgctgtcaccgccgtcggccgcattggcggcgtggcctgtgtggcagccgtgctggacagccggttctttatgggcagcatgagcacggctgtgggcgagaagatcacccgcgccgtggagtacgccactgccaagcgcctgcctctggtcatcttttcggccagcggcggcgcgcggatgcaggagggcattttcagcctgatgcagatggccaagaccagcgccgctatccagcgcttttccgcaaagggcgggctgtacgtcagtgtgctgacccaccccaccaccggcggcgtgaccgccagctttgcaagcctgggcgatatcatgctggccgaaccgggggcactcatcggctttgccggcccccgtgtcattgagcagaccatcggtgaaaaactgcccgccgggttccagcgcagcgaattccagatggaacacggctttgtggatcaggtggtgccccgcagtcagctgcgggatacgctgatccaggtcctgcagcttcatgccggagggaaacacgaatgataaaagatattttggagcagctggccccgctggacgcacagatcgccgcgctgaagggcagcggcagtgacatggaggccatcaccgcccatgcgtccgaactggcagagctggcggtggaagaggacgagattctgcgctcctgcggcccgctgactgccgaggaccgggtctttctggcccgtcacccggagcgtccgcacatcgacgagacgatctctgccctgttcacggatttctttgagcagcgcggcgaccggcagtgcaaggaggacgcggccattctgggcggcgtggcccgtttccacgggatgccggtgacggtcatcggccaccgcaagggctccacgctggaggaaaatctggcctgcaactttggaatgccggggccggagggttaccgcaaggctctgcgcctgatgaagcaggctgaaaaattcggccgtcccatcatcacctttatcgacacgccgggcgcttaccccggcaaggatgccgaggagcgggggcagggcgaggccattgcccggaatctgatggagatgagcggcctgacggtgccggtcatcgccgtggtcaccggcgagggttcctccggcggcgcgctggcactgggtgtggccaaccacatcctcatgctggaaaacgcggtctactcagtgctgagtcccgagggctttgccagcatcctgtggaaggactcctcccgcagcggcgaggcctgtgagatgatgaagctgacggcgcaggatctgtaccgcggcggcatcgtggaagaagtgatcccggagccggtgggcggtgcccagcgctgccacgcggccctgtttgagcgcatggatgccgctctgcgtgctcacctgaaagaattgtgccgcatgagcgaccggcagctggccgatcagcgctataaaaagtaccgccagatcggagaaacgaggaacgcatgaatggtttacagctgatcgccaccggcggggcacttcccggacggacgatcaccaatgacgcgctgagccgcatggtggacaccagtgacgcatggatcaccagccgcaccggcatccgcacccggcactggtgtaccgaggacgaatctgccgccacgctggccattgcggccgcgcggcaggcccttgaccgcagcggccttgccccggcggacattgcctgctgtgtctgcgcgaccctttctgccccggatgccacccccagcgtggcctgtcaggtacaggcggcgctgggcctgcccgaaaaccggcccgcgctggatatcaacgcggcctgttccggttttctctatggcatggctgtggcgcggggaatgctgacgactctgggcgggcagtatgccctcgtcatcgggtgcgaagcgctttcccgcctgatggaccccaccgaccgctccacctgcgtgctgttcggcgacggggccggagccgccattttccggctggcagataccccctttgcgttgacgctgggggcacgcggcagtgatgtcctccatgcgggcgggccgagccgggaaggctctgcccccatcaccatggacggcaaggcggtattccgctttgcggtggatgccctgcccaagtgcctgcacacggtgctggacgagacccagctgaccctcgaggatctgtcgtgggtggtctgccatcaggccaacagccgcatcatcgaccattgcatcaaggccctgcaggccgacccggcaaaattttataagaacatggatcgccacggcaacaccagcgccgccagcattccggtcgccctcaacgagctggccgagagcgggcagctgaccccgggcagaccgctggcctgcatcggctttggcggcggcctgacctggggcggcgcgatcctgcaatacaaagagtgaatacgtcagcgttccggcagctttctcaaaacgggccatcccaacggacgacccacagagaagcccccggcccgctgactggaaacatcatatgaaattactgaacgagatcttaggaacgaaataccccatcatccagggcggcatggcaaacattgccaccggtgagtttgccgccgcctgctccaatgcaggtgcactgggcatcatcggtgcgggcggcatgaatgccgataccctgcgcgaaaatatccgccggtgcaaacagcttactgacaagccctttggcgtgaacatcatgctgatgcacccgcaggcagatgagtttgcccagatcgttgtggaagaaggcgtgcaggtggttaccaccggcgcaggcaacccgggcaaatatgttcccatgtggaaagcggcgggcatcaaggtgatccccgtggtggctgccgctgtgctggcaaagcatctggagaagctgggcatcgatgccgtgatcgccgaagggaccgagagcggcggccatgtgggcgagatggccaccatggcactggtgccgcaggtggtggacgcagtggatctgcccgtcattgcggcgggcggcattgccgacggccgtcagctggcagccgcccttgcgctgggtgcctgcggcgtgcaggtgggcacctgcctgctggtgagcgaggagtgccccatccacgaaaactacaaggctgccctgctcaatgccaaggacagcgataccatcgtgaccggacgcatcggcggttccccggtccgggtgctgaaaaaccggatgagccgtgaatatgtccggcaggaaaaggccggtgccgataagatggagctggaaaagtacaccctgggcagtctgcgccgggccgtgtttgaaggcgacacctccaccggcagtctgatggccggtcaggtggccggaatgctccacgaggtgcgccctgtggcggacattctggatgacctgtggaacggcgggaggcagcgtatccacgcgctgagcgaggaatgctgacgctcggaaagaaagtcctgtctgtgcccatcctgcagggcggcatgggcgtgggcgtttctctgggcgggctggccggtgccgtggcggcctgcggcggcatggggtgcatctccaccgccgatgcaggctaccgggagccggactttgcccgtgacccggccagcgccaaccaccgcgccctgaccgctgagatccggaaagcaaagcagatcgcaaacggtgccggtatggtggccatcaatgcaatggtggccacgcaggactacgccgccgccatccgcaccgcggtggaagcgggcgtggacgctgtggtgtccggcgcgggtctgccgctggagctgcccggccttgtgaacacgatggaggtcgccatcgcgcccatcgtttccagcggacgggcggcaaagctcatcctgcgccgctgggccaaggagttcggccgcaccgctgattttgtggtcattgagggctgcaaggcaggcggtcatctcggctttgcggagcaggacctgttctccggaagctgccagacgctggatgagatcctgccggaggtgctggccgaggtaaagccctatgaggcgcagttcggccacagcatccccgtgtttgtggcgggcggcgtgtacaccggggccgatctggctcactttaccagactgggtgccgcaggcgttcagcttgccacccgctttatcaccacctacgaatgcgatgcatcccaggggtacaaggacgttctgctgaatgcaggttctgaggatgtgcgcatcatccacagcccggtcgggatgccgggccgggcgctgaacacgccgctggtgcaggccatggcggagggcagacgcttcccgccccggcactgtgcccgctgcctgaagacctgcgaccccgccaaggtgccctactgcatcacccatgcactgatcgaagcggtcaagggcaacctggaggaaggacttttcttctgcggggccaatgtgggcaggctggaccggatgtacactgtccgtgagctgatggatgaacttgtgaccgaatggaggcaaaaccgatgaagcttgctgttttatatgccggtcagggtgcccagcaccccggcatgggcaaagaattttacgaagcatcttccgctttccgtgccgcgttcgacgctgcagaccttccgtttgatctgcaccgcgtctgcttcgacgacccggacggcgttctgaatcagaccgaatacacccagccctgcatggtggcctttgcctgcggcgtatccgccgttctggccgagcagggggtcaagcctgcttatgtggccggtctctctctgggcgaatattccgcgctggaagccgccggtgtattcaccgccaagcaggccattgagctggcagcctaccgcggcaaagccatggccgacgcggccagcggcatcgactgcggcatgaccgcagtgctgaacctcgaccgggtcccccttgcagaatgctgtgagcaggcatccgcgctgggctgtgtgcagatctgcaactacaattgcccgggccagctggtcattggcggcgaaaaggccgcagtggacaaggctgcagagcttgcaaagcaggccggtgcccgccggtgcatcccgctcaaggtgagcggaccgttccacacccgtctgatggctcccgccggggatgccctggcaaagcgctttgccgccgaaccctttggcgaaatgagcgttccggtgctgttcaactgcctgggccgtgaaaaagccgagagcgacagcatcccggccctgctggtccggcaggtacagagcagtgtctacatggaggacaccctgcaccgtctgggtgagctgggtgtggatcacattctggagatcggccccggcaatgcgctctccggctttgtgaaaaagactctgcccggtgtgacttgtgtgtcggtggagaccccggcgcagctggacaccgttctgaacgcatggaaggaagaacaatgaacgaagaaaccatcatccgtaccgccgttgtgaccggcggaagccggggaatcggccgggccgtgtgcgtacagcttgcccggcagggctgccatgtggtggtcaactactgccacggcgaagcggccgccgctgagaccgtgtctctctgcagggcccagggcgcgcaggctgtggccgtgcaggccgatgtttccaccgccgagggctgcaaaaagctctttgaggaagcggtgaacgcctttggccgggtggatatccttgtgaacaatgcaggcatcacccgggacaacctgatcctgcgcatgtccgaagcagactttgatgctgtgctggacgcaaacctcaagggtgcgttcctctgctgcaaggaagcggcccgccggatggtgcgtcagcgccggggccggatcatcaatctgagcagcgtcgttgccctgcggggcaatgcaggccagacgaattacgctgccagcaaggctgggctcatcggcctgaccaaaagcctggcccgggagctggccagccgcaatgtgacagtaaacgctgttgcgcccggctttattgagactgatatgaccgccgccctgccggaggctgtccgcaccgaaatggcaaaggacatcccggcaggccgcgcaggccagccggaggacgtggcaaacgcggtggcgttttttgccgcagaacaaagcagctatctcaccgggcaggtgctctgtgtggacggcggcatggcaatgtaaaaggagaaattctctatggaaaaacgcagagtcgtgatcaccggtctgggcaccgtgaacccgctgggcaacactgctgccgacagctgggctgccgcaaaggcaggccggtgcggcattggccccatcacccagtttgacaccaccgatttcaagtgcaagctggccggtgaagtgaaaaactttgaccccgagaccgttgtggacaaaaaggaagcccgcaagatggcccgcttcaccctgctggcactggctgctgcagccgaagccattgccgacagcggcctgaacacggaagcagaagccaaaaacatcggtgtggtcctttccagcggcattggcggcctgcccaccatcgaggagcagcacacccgcggggaagagaaaggcatggagaaggtcagcccctactttgtgcctatgtccattgccaacatggcggcggcacaggtggccatccgctttggcctgaagggcatgtgcacctgcccggtcacggcctgcgccggcggcaccaacgctgtgggcgatgccttccaccgcatccgggacggttacgagactgccatggtctgcggcggtgccgaaagctgcatcagcccgctgggcatcggcggttttaccagcatgaaggcgctttccaccgccaccgacccggatgctgccagcctgccctttgatgcccgccgcggcggcttcgtgatgggcgagggcagcggtgtgctggttctggaagagctggagcacgcccgggcacgcggtgcgcatatctacgccgaggtggtgggctatggtgccaactgcgatgcttaccactttactgcaccggctcccggcggcacaggtgccatcgactgcatgaagctgacactggccgatgcaggcattgccccggagcaggtggatcacatcaacgcccacggcaccggcacccacatgaacgatgcctgcgagacggctgccatccatgccgtgttcggtgagcacgcaaagcagctgaccgtggtcagcaccaagagcatgaccggccatctgctgggcggtgcgggcggcatcgaggccgtgttcacggcactggccctgcgagaccagtttgccccgcccaccatccactacgagcagcctgatccggaatgcgatctggactatgtgcccaatgcaggccgtgcacaggccatgacctacgcactgagcaacagcctgggctttggcgggcacaacgcctgcatcgccctgcgcagatgggagggctgagccatggcagaaccgcgcaccgtgcgggagaacgcaaacaccctgaacagtgagcagatcgcagcccttctgccccaccgctacccctttgccctcgtggaccgtatcctggactatgagccggggcagtgggccattggccgcaagtgcgtatcccgcaatgaagaattcttctgcggtcacttcccgggccaaccggtcatgccgggggtgctgatcctggaagcactggcccagaccggagccgtggcggcgttgagcgttcccgaaaacaaaggcaaactggccctcttcggcggcatcaagaatgcccgcttccgcaaacaggtcaccccaggggatgttcttacgctccattgtgagctggtggaacagcgcggccctgtgggcatcgggaaagcgtctgcttatgtggatggcaagtgcgctgccacagcggagctgacctttgtgctgaccgaagcaaacacaggggcttaaggcgctttgtgcgcagcggtcgcccccaataccatatcgtatataaaaggcaggataccatcgccatgatgatatcctgcctttgttcgttcctgtttaccgttctgcatactctcggcatagagaacatcttgtgaaacaaaaaagtacccgaaccctttttcgtaaagaatcgggttcgggtacaaactgtatggtggagcattgtcagcagcagtcgaacctttaggcaggcatatcgttgctgcggtcagagcgcttcaaaccgagaaacggaggcacttcggaacgcttcagcccttgctcgtgtgcttttttcagttgatattcgtgcagggcaatgctgtccagcagatcacgctgattttgggaagctgcatagtaatcaacgccgaaccgtttgcagactgcgctgagttggtcaagcatttcaatagcagtaggggacattcgtttgacttcaatatccatgggagcaccacctttcaggaaagatacgtattgaagagcgaaagcgccgcattgtcggcaagcatcagcatgatcggcccgccggactgtttggcaaagacccggatcgcgccaaaatcccggatataatgttttgcaagttcatccgtcttagcttcaaaagtgacgacgccgtttttaccggaatcaatggaaagctggatgccgaacgcgatcatcatacgcccgatgcccagatattttttctgaatggtcagcgtcgggttgctctccgggtggctttcgatgtactcaatataaacgaacatgctggattctgtttcgcggtaagcacccaatgctacgatttcgccgttttcggttttagccgtgtacttttccagtgcggggtcaccgatgaactcacttgtccagtcggtctgccagctttctttggttgcagcaaggtcagcgggagttgacttgtcaacctcaatcggaatcctattgcccgtatcggatgctgtgacaaaatattgcaaagtcataatgcccaccttctttcagttttattataacgaaagaacgatagactttcaagaaagaaaatcgcaaagagagtgaaagcgtgagagcaagaaccgtcccgtggccacaaattttcagttgttgaaaattcttgctccctttggaacagcttcttgttggggcgtgcggtgccccaaaccctgctgttgaggttgcgacaaaccaggagttatcgaaccgcacttgtgatttcttctaatgtgtcctggcgaagccactttccaaatacttgagaattctttgacggcagataacccaaattcgtatatcccagcttcttcaaaaggctcatacttggaatgttctctctttcagtaaaacagataaaatcccactgaggatagtgcttgtgtaaatactcaattaaagaggacaaggcttcataggcgtaaccgtttcggtgaactttataagaaaatgtgtaccctaaagaaattgtgccctcgttaggcataacgacaatttcgccaatcatgacatccgtttctcttaatgcaacactaatcatagtcggcgatgcgatattcagggcattgtctttattacgctcgatcaaagcaacaatatccttataatctttcgtctggcctcgttgatatttcgagcatcgctcgttatttcgataatcaaccatctgaatcgcatctttaggacttacatttcttagtctgagccgatttgtttctaaaaagatcatcttctcatcctttcacattccggcttatgggccgagtagccctttctcaaaacctcctgtaaacaaaaaacgtacccgaaccctttctcatagagaatcgggttcgtacgaccttggtagacattcctacgggtccaggaaccgcgggctaagcaacagcccaacgggctgattgcttactctgccgacttggcgtcgtcagagccgccctgttcgagtcctgtaccgtcctgctctgacgtgggttggtgggtgatgcaacaaaaaagcccctgacctaatgcaggggcttcataaaacagtatttgcaaaagctcccgcaatggggaagatt

SEQ ID NO: 521 - DNA, 9532 bp, unidentified
  source 1..9532: mol_type = unassigned DNA
atggttcaggtggatctcatcaccggctttttgggcgcaggcaagaccacctttctgcgccgctatgtgcggtaccttgtacagcaggggcataaggtgtgcattctggaaaacgactttggcgcggtgaacgtggacgccatgctggtgcaggaggtgctgggtcccggctgcgatgtggagaccatcagcggcggctgcgactgcgacacccaccagcgccggatgcgcaccaaactcatcgccatggccatgcgcggctttgaccgggtggtggtggagcccagcggcatctttgatgtggacgagtttttcgatatcctgcgggacgacccgctggaccggtggtatcagctgggcagcgtcatcgccatcgtggacgcccttctgccggaaacgctttcgccgcaggcagagtatctgctggcgtccgagaccatgaacgcaggctgtgtgctgctgagccgtgcccagctggcagcgcccgcccagtgcgccgccgccgctgcccacctggagcgtgcactggaaaccgcaaaatcttcccgccgctttgcgccgggggagatccttgccaaggactgggacgccctgaccgatgccgaccttgccgcccttgccgcctgcggctaccggcaggccagctgcgaaaagctgcattttgaccagcacgcggcctttacctccctttgctttctggaactgcacctcaccccacagcagctgcagaccgccgcacagcggctgttcgcagcgcccgagtgcgggcaggtgctgcgggtcaagggctttgcgcccgccccggcaggcggctggctggagctgaacgccaccgccgccggctgcacccttgcgcccatcccgcaggggcaggaggtagtcatcgtcatcggtgaagcactggataaagccgccattgaagcaaaattgaaggggtgaaaggcagttttcccccataacaaaacgcattgtggaaaaacaggagggcacatcatgcaggaagtacgcgcagccgttattggcaccggggtcatggggcgcaagtatgcccagatgatcgcagagggaaaggcgggggcattgcgcctgaccgccgtggtctgccgcagtgccggggcgcagcagtgggcaaaggataccctgccggatacggtgcgggtgtgccccagcgccgaggcgctgtacgattatgcagaagagtttgacgccgtgctggtggtcaccccgcacaagacccacccggaactggtgatgcaggcttttgcccacggcaagcacgtcttgtgcgacaagcccagtgcaaacgcgctggcaccggcactggaaatgaaccgcgccgccgaaaaaagcggccttgttttcgccatgatgttccatcagcgccgctacaaaaagtatatgcggcttaaaaaattactggatgatggggcgctgggcgagatcaagcgggtgcagctggaaaacagccgctacttccgcacatggatgtaccaccgctccggcagctggcgttccagctgggcaggggagggcggcggcgcgctgctcaatcagggccagcatattctggacatctggcagtggctgttcgggatgccgaccagtatttatgccgtgattccctacggaaagtataacgattttatggtggacgacgaagccaccctgctcatggagtacccgcagcagcgcacggcaacctttatcctttccaccggcgagggcagctacaccgagcggttggagatcgtgggcaccaagggcaccgccctgctggaaaaggacactctcaccctgcacacctacgcgccagacaccgagacctaccgccgtaccgcagactgcaccgagcgccagcagcttaccgagaccaccgttaccgagcagttcgccccgcaggcagagccttacccggagatgctggcaaactttgcggacgccatcctgcacggcacgcccctgaccgcccccggcgtggagggcgtgcgggcgctggaactgaccgatgcggcttacctgtccgcatggctgggggaaaagctcaccctgccgctggacgcagaccggtttgaacaggagctgcaaaagcatattcaggaggaacaggcaaatggctaaactgcggtttattgtagtaggctccggctggcggtcgctgttttactggcgcatcgcgcaggcgcttccggagcggttcgagctgtgcgccatgctttgccgcaccgaggaaaaggccgaaaaaatgcaccgggaatacggcgtgccggtaagcacctcggcggagcagtgcattgccctgcacccggatttcgtggtggtggcagtgaataaagcgtccatcgccgccgtcagcaccgaatggcttgcccggggctttgccgtgctgtgcgagaccccggcggcgctggcggaggacgcattgcgcgccctctggcagctgcaccggcagggcgcaaagctgcaggttgcagaacagtactggctgtaccccacgctggcaaaacggctggcagcagtgcgcagcggcgcactgggcacgccgcagtttgcccggctgtcggtggcgcacggctaccacgcggtcagtctggcgcggcagttcctgaacgccgggcagcagccggtgcgggtgaccggacgcagctggacggaaaggatcatcgaaacggattcccgctggggtgcggtgcataacggcgcactggtggaaaagaccttgcagcagcacacgctggaatttgcgggcggcggcacagcgtttctggattttaacggtgtgcagtaccactcttacctgcgcagcacccacaccagtgtgcagggagagcggggcgaagtgttcgacgacaccctgcgctgtctggatgccgccggggagccggtgtgccgtcaactgaccccgctgcccgacccgctggcagctgccgccgcgcaggcagggctgaacgaggacgagaccgccatcgcctgttttctggacaggatgcagggctatcttgccggcggggcagaggtgtatccgctggcagacgccttgcaggacgcctaccttgccctgctgatggagcgcgcccttgccgccggtcagccgctggaaagcactccgcagccgtggaatacagaagaacgataaaaaaggctcaggagcacctgtcggcgcttctgagcctcttgatttataatgattggatcacatcaggtcgatcagtgcttccacctcgtccatgcgggtggcccagctggtggcgatgcgcaccacggtgtgggtgtcgtcgaacttttcccagaagccgaactttgccttgccttccagcgcagccagctgggtgttttccagcacaaggaagatctggttggtgggggagtccataaagaagcgatagccctttgccgcaaacccggccttcaggcggttggcggtgtcaatagcgtttttgctgatggagaaatacaggccatcggtgaacagcacgtcaaactggatgcccagcagccgcccctttgccagcagtgcgccctgctgcttgaccatggtcataaaatgcgccggtgcgccgtgggggaacaccacagcctcgccgcacagcgcacccaccttggtgccgccgatgtagaacacatcggtcagccgggcaaggtcggccagcgtcacgtccgtgccctcggcagccagaccgtagcccagccgtgcaccatcgaggaacagcggcatcttgtactcctgacacacagcgtgcagggcttccagctccgccttggtgtacagggtgccgtactcggtggggtgggagatgtataccatgccggggaacaccatgtggtcgtggttgtcgtcggcgtagaaggtggccaccagtgcccgcagctcggcagcgtccagcttgccgttgtgctggggcagggtgatgaccttgtggccggtgtactcgatggcacctgcctcgtgcccggctacatgaccggtggcagcagccactacgccctgccaccgctgcagcatggacgcgatgacgatggcgttgctctgggtgccgccggagatgaactgcacatcggcctccgggcaggcgcaggcggcgcggatcttctcgcgggcgctggcgcagtaggggtcggtgccgtagccggagaccttttcaaagttggtctcggtcagcttttgcagaatggcgggatgtgcaccctcgcagtagtcgttttcaaaatacagcatggcaaaacgctcctctatataattgtaagaaaacagtacctctattctacatcgccgcgaaaaccctgtcaaatccaaaaccgtgcacagcgcacgcaaggcaccgcaaaaacgcttacaggatacccggtgcgacaatatgttgaccggaactacggcctacgacagctttttttacgaaagtatgatcctttccaaaaagatgaaaagtttttcaaaaaagtgcttgacaattctgctgcatctggtataataactatcgttcccggcgccacggcgcaggaacacaacagaatatgcggatatggcggaattggcagacgcgttagattcaggttctaatcggggcaactcggtggaggttcaagtcctcttatccgcaccaaaccatgaaaatccgaaccttttctcgataggagaagggttcggattttttgttttcttcggaaagcaaaatgaaggctccttcccgacggctgtgtgtccgaaaccttatcagaaaaaagaccgtatcacaaaggtcacaactgtaaaggtgccgtaaggtagaaaggacacgagtatgaagtacgatgaaagaacctgcaaattcaacatggacaccggctgcgtggagctgctgctccgggatggaagaaaaatttccatcgactgcaccggggtcgaggatgcgttggatgtgaccatggcgcagaggtcggagttggattacctcatctacaatgatccgctgagctacgcggatttgattctgaatggtaacccggaggaatatttgaagaatgtggtcggaggtcatggatcagaggatttatcgtttagagattaactcgatataaggaacaagcccacaggtctgccgtatttttatgcggtctatcctgtgggcttgtttgctattatcgactcatgattgaatttgaaatttcaagcacgaccgtatcatgtttataggtggtaacaaccatcggcaggcctccagccttcaaaacttatgcagacgtttgattttcgtatcgtttaagccagaggaaaaagcagatgtttaataagatgcccactgcggtggaggtgggtgcggacagaccgatcatcgtcaggctggcgttgggctggatactcataatatacgccatggggagacgcaccagcagagtctgcaccagcccctgtaccatgacccagagggttttgtcgttgccattgaagtaacctaccatgctgaacaggatggcagtggcgatggtctcgggcgcaaagcccatgaggtaggcgtagctgttggcaataacagcggcatctgccgtaaacagaccggagagaacgtcacccttgcaccacaccagtgcaaatacggcgcaaccgaacactagaccgatgccaatgccggtgaacatggactgctcggcgcgttttttattgccagcacccacgttctgggacacaaaggatgccatggactgcatcagagaactggggatcagcatggcaaaattaacgatcttgcacgccacaccgtagccggaagatgcctccagccccaaccggttgacgaaagcgcagagcgccagaaaggaaagctgggtcaaaaactcctgcaaagccagcggcagaccgatgcccagaaattttttgcactgggggttcggcttgaaatcagagcgatggattttgaagggcagctccttcttcagcagcattgcgattgcacagattacgctgacggcttgtgctgctaccgtagcaatggcggcaccggcagcatccagatgaaaaccagccaccagcaccagatcgccaataacattcacaatgcacgccaccagcacaaagatcagcggagagcggctgtcgcccagaccgcggaaaagagccgagagcatattataggctacaataaagaagatgccgctgccgcaaatgcgcacatagctggcggtcaggtctagggcttcggcaggagcctgcatcagactggcaataaaccgtgcaaaaaacaccagcaccacgaacagtgcagctgccagaagggtgaacacaatagctgccccgccaatgacttgcccgatgtactgcggtcgtttttcgcccagatagcgggcaatgagcactgtgacgcccatggcaagctgggtgacaacaaaggtgacgagattgagtacctggctaccagtagaaaccgcagacaagcctgaagtggagccaaagcgccccactaccagaaggtctactgcgccgtaagcggcctgcagcaccagcgcacccagaatgggcagcatgaaaaaagcgagctttggcaaaatgcggccttgggtaaaatcggtcttatcgtttttcaagagaatctttcctttcgcgcataatagcatagaatttttccagcgtttggatggtgcacgctgcatcctcctcggaaatgctgtccagatacgggagcagttgcgagaagtagtccgtattgtacttctgggaaagcgcttgcccgctctcggtgagaaacagataggtcacgcggccatcttcagcggatacctgttttctcagataccctttgtgctccatctcttttacggtacgggtcacaccggggcggggcaggttcagtgtatcgctgagatcagagatcttcggctggatgccacgggtctgcaatttctgaataacatccagacactggatataagaggatgtcacaccctccggcagggcaggcagcatctcccgtgcccgctttgccagatagcaggcatccagcagctgcttgatcagttcgatggtcataatgaaattcctctccaaacgattatcgaaggtaattaacattgataattatatagaactgcccgggaatgtcaagtctttttgaaaaatcggagatgtcggcagctttgaggcatctgcttccggcataccattctagagggtgtttgagcgaatacagtctgaaccatggattagaagatcaaatacaaaacaaaaacagggtgcgtccctgaataggacgcaccctgccagcgtaattcacgatttgattcgttggcaacaaccgtgaattgcatatcgcaaacaggtcgttgagaattgctctgcttgtaaaacttgcgattaaagccacagataacagcgatatgtacaacagggcgttccccgtcgggaacgctctgcttttctttgctgggggcatgatgagcctgctccgcctgccataggcaagctcgcgtttgcgcagcaacaaaagcctcagtgaaatatcattcaagggtttccagtgcttccaccagtgcaaggatggtcagcgactggccgtatgccatgggagcaatcagaatgtttttgtagtggtcgcggtcgtagcccatacccgtaccgccggatactttcagcaccgtaccatcggtatcgatgttcttgaggattgcacggatagctttcttggcacagggcaggtaggaatcatccagaatccccatgcggatgcctttcaggatgccagcggtgatagcagcagagccggaagtttcttcgtagctggtggagtcatccagaaccgtatgccaaaggccgtcctcaccctgaaggtcacgcagtgcgcgcacctgtgctttgtaggtatccagaatgaacgtcttgacgccctgattcagcgtacccttaaacatatccagatagtccagaatacccagcgtgaaccagctgttgccgcggcaccagaacacgccgccaaagttgtccatccgattgaacgaccagccgtggaagaacagaccggtgtgggtatcgtacagatacttgatgtgcatcagcacctgcttaatggattcgtcgatccactcctgcttgccgtacttctggcccatccgattgaggaacaagacggtcatgaacagggtgtcgatccacatctcgctctcgtttaggcgaacgccctgacggtcgccgttggcactggtgacgtgctgaaagccaccctcacgggtacgcgggatgcactccatcagccactttgcccaatccagacaaagggcttcaaactcaggggcgtggtaaatctcattcaattcacacagagtcagcagcggagtagtcgtgttgatattgcgggaaggcagaccctgcgcaatgttctccttgaaccaatcatgcaggaaggtgcggtattcctccgaatcctgtatcttggcgattttgagcagaccgtacaggccgatgccctgcggccagtcccactccttgatgccgaagtcacggctaaaaaatccgatggcctcgccgccttctttcaaagtgtcctcgttttcgggggcaccaaggtgcatcagcttctggataacaagatccagctttttctgaatcagttcttttttgatttcgtttgccataagaaacacctcatgtatttgtattgtttttctcagcggttgaagtaagcgattttcgatattgtgcaggcgtaacgtgttgatatttcttgaacacacgtcccagataggtgatgctctcaaacccggtacggcttgcgatttcggaaacggaaagtgttgttgtttctaacaggctctgcgctttttttacccgcaggatgttgatgtattcgttgatgccgaagccagtcacttcatggaaggaacggctgagataatacttgctgatataaaactgctcggcaaggctgtccagcgagagcttttcctgaaagtaatcggaaatgtagtctgagatttggtagactgcatcgaactttccgccgctggccttaccctcctgcacatcgttcaggcaggcgacctgctgattgctgcgccggaagtagatgaagcctagaatcaactccgaaagaatagcggtctggctcataggctctgccttgtccagttcctccatgatttgcagaaacaatcggcgggtattcgctgtctgcttcggggtcagttcgtaaattccgtagtgcttgtggaagaacgcaccgatcttcagttccgggaacatcttatcgaccttttccacaatgtcccggtctacatagaggatcactcgctcgtattcggtttccgggtctcccacgatggaatgggacatatgaatctggccgctgtccacgagaatcaggttcccggcctgtgcttcataggcgcggttctcaaagaacatctgccgccgcccacggagcaggagataaatttcgtactcctgatggaagtggttgtaccgcatatcaaagtttgccggacgaaccatgtgttccaccataatgccgtttcgtttgcggtaatattgggtcgcatcaccctgaaccatgctgtgcagccatgttgttttcat

SEQ ID NO: 522 - DNA, 12301 bp, unidentified
  source 1..12301: mol_type = unassigned DNA
  misc_difference 2895: note = a, c, g, or t
  misc_difference 2896: note = a, c, g, or t
  misc_difference 2897: note = a, c, g, or t
  misc_difference 2898: note = a, c, g, or t
  misc_difference 2899: note = a, c, g, or t
  misc_difference 2900: note = a, c, g, or t
  misc_difference 2901: note = a, c, g, or t
  misc_difference 2902: note = a, c, g, or t
  misc_difference 2903: note = a, c, g, or t
  misc_difference 2904: note = a, c, g, or t
accgccgggatcaccccgcacgaacctgcggtcggtgccgcaacgatccttctcatgcacgcatttccctctgccatcttgattgccttctccatcaccagacctaagaagtcaccgcagagattcttccctgcctcgttatatgcgcgaagtttctcaccatcgccaccgaccaatccggatgctgacgtaagctttgcatcgtaggttgcatccgcatgacgcatcgcctcatacatgctctgcatcttcgcataggaagcttcctgcgtcacggcgcgttcttccatatccgcatgttcgatcacctgcgcaaacgccatctgttctttctcgcacaattccaatatatcctgaatcgaatgatacgttatcacttcgcatcgcctcctatactaaggtatgtcaccttcttcacaccctcgaccttcttcagccagtcaatgccctccttcggaatctcctgatcgcattccacgaccataaccgcctctccgccacgactggagcggtacaactgcatgtacgcaatgtttacacctttgtgtgaaagcatcgacgtcacctccgccacgtgtcccggctgatcctgattgtgtacgacaagcgtcggataatcaccggagaaattcgtctcgattccatcgatctcggcaatgttgatccgggagccacccagcgactgcccgatgatctccaggcttctgccatcctgtccctgcagaaaaagctgcgccgtgttcgggtgtgcttcctttaactgtgcctctccgaattcgatgtgcatgccctgttcttcggcaagcataagcgcctgcggaatccgcgcatcgtccggctgcatcccaagcaacccagccacaagcgccttccgcgtaccatgtccttttccggtcgtcagaaaacttccatataacaaaatccgcgcggagaccggctgttcgcccaacagcttccggctgatatatcctattttaacagctcccgcggtatgggaactcgacggtccgaccatcacagggcctacaacatcaaatatattcattgcttcgctctctttcttctgtattatgagatttctgccttcaaattatgtcaaacatacaatagaaacttaaaaaaatcaaccggaaacgtctggtcttttcattcacagtttttccggttgattcacttaaattgttacttttatttacatcctgaacttttctattataagtttgattattgatgagacttctaagattgatctatccgtggcggtgttccaacactgccatccggcctgtcaccattttccggcatctgtccgccgtcaccatccggcatatccggccgctcaccatcgcccggcatttgtccgccattctcatccgacatatccggtcgctcaccatcgcccggtgtaccgccgccatgtcccatgcttcccatatccgtaagggaaatggatgaagcttcgacgagtgtggaatcatcttcctgctgcccatcacttgtagatggattcctgtccgcggatgctctctgcacggagcagacagaacgatttcaacgtatccacgcctgtctcgaactcctcataggtacagaatttcgtcgggtcctgctcgacataagatgcaatcagattctcgaaatatccgctttcaaaatactcggagataaacgtatcaaaatacgtgtgatacagttccgtatagctctcatctacaaagatccacgcaagcatcggacgggaatctactgttccaccagaaaccggcgtatcaatcggatagttcaccatctatgttgccgaatcaccgtctccgctgcccgcagagaatccgccaaatgcaagattataatcccacggaatcatcgaaagctgtccatcctcctcgtacaaataataattatggatcatcgaaccggtatagctgtcgaagttgcagacgaaattgtgcacaacaaagtatcgtattacctcgtccatatttaccacatcttcaatgtctgaattctcattcagagacttcagcgaagcgatcagacggtctttatcctcgtctgtaatatctgtcttggcattgccgaagatgttgctgtaactgctatattcatcatctgaatatatgagcgacaggtctccacatttcacaatctccggagtaaattcttccttgcgccggagcattgcccggatgcgcgcaagcagctcgcccatcgcaaatggcttcggaagataatcgtcggctcccatatccagccccgcaatccggtcttcgacctctgcctttgccgtaagcagtaacaccggtgtccggtcaccgcggctccgcagcttctgcagcacttccaagccactcatcttcggcatcatgatatccaatatgattccatcgtattcgccgattgttgcgtaatcgagtgcttcttccccatcaaacacggcatccaccgtatacttgtgataggtgagaatgtcgaccaacgcctcggacatatccacttcatcttctgcaagtaataatttcatgccggatcctccttttctactaaaaaagggtacaaaaaaatcggtgcgacgggattcgaacccacgacctctgcgtcccgaacgcagcgctctaccaagctgagccacgcaccgataaaattggaaatcaatccaacatctgacatgatagcacagatgccccgaaaaatcaattcaaatttccatagaagcaggcataattttaccagccatcaatatgatcgcgctggattgccgcgaacatccggcttttcgccttcgggaattcttcctccatatgtgctaacatctgcttggctgcctcccgcttcgtcgcaccatccacagggcacagattcttcaccacaggaagctgataccgccgcataaacccnnnnnnnnnnatccagatgcgtcactggcgaaaatgtatgtacccgtccttctaatacctgtgacatcagaaatgtctccacgacatcgtctttatgatgcgcatatgtaatcttattacatcccaatcgaagtgcggcctcattaaatgcgcccttccgcaacttcgcacagagcggacacatccgcttctcctgccgctccatcaagatcggaaatatctgcgtcggaatgatctcatatggaacatttaacgactcgcacagttctttcaccttagaaaaatccatatttcctacgccagtgtcaaccgtgatcgctacgacatcatatttcttcggataaaattttcgcattccagccagtgcatacaagagtgtcagactgtcctttccgccagagataccgattgcaatcttatcgccatcctcgatcatctggtaagcgtccaccgcctgccgcaccttgctgtataatttctgtaattccatatctgtttatacttttattctttcaccatattgtcagcattcacatccagcacagacaagatcacctctgattttttcaacagctgctggtactgcttctgtacctctttcatcctccggctgttctcgtcgtagtttttctgatctaaaaatcttgaactttcttccaattgcagatcgtgaatcttactctccaacaaacgaatctgactttgcagccgcgcatgtgtctccacaggaatctctgtgccaaacaacttcttccgcagcatctttgtcatattatacacgcaaaaacctataatcgtaaatgcaatttcaaatccgatcagacttgttaccaaccggaaccacgcttcccatgcctgcataaaaaatacatcgatcatgcctaccgtgacaagcagagacaatacgattgcaagcggcgtatcaatccacaggacaaacccaagccgtctccggctgtatttcttgtccacctgctgatcctcaaactctaattttgacagatcaaactgcaattttccaatatcctcatgcagcacattcgtcgtccccgtctgatccgggcacgccagaagcttttcctcgagttccgcctgttcctgctcatttgcagcaatttcctgctgcaaggattgcagtcccgcctttaactgcgactgctgctccgcccacgcctctgcaacctgtgtcggtgtgtatgtggataatgcctgttttcccgtcagttcctgcaagcttgccaacatgccgtccgcatatttcttctttgccatctgtgcctgctccgtctgcttctggtcaaacgtctgcagacatttaccaaatgcgttctccctgtttaattcctgcaacagctcataatcaaactccggtttttcttccttcttctcctcgaatctgcgcatcgcgattggaacaaatttcacactcgtcaactgcttgtcgatatatccatagataaacccatgttctccggtttcgtcctcattgatcggctccaaacttcccggataatatacatgctgcttctcaaatgccagatactgatgcttatgtccaagcccgatatacccgaaattctttcctccaaaatcttccacatcaaacggacaaacccttgcacttcctccatgcccaagaaagatattgactgcccggagatttctggcatatacactgtcgaaatcatttcgttcattctgctcgctatactggcagattccgtagacatcaacattatattttgcaaaatgcagactatccataatcccttccgcataggaattccgttccgcacgttccccttctggcacatgattatggatttcttcacaattcagcagatacatccgcgatacaaactcataattccaaaggatgctgtccttccccagataatcgcattctcccgtcacatagaaaatgtctgtctttgtcagccgcgccagctgcgtatcaacgaatacaatatcctccttcgttggtacatgatcaaacagatctccagtaataaaaatcatatccaccggatgcagttccatgtagtcaataaaatttaaaaatccgtcatacagatacggtgtttctcttctcgtccctagatgaacatctgcaatatgtgcaaatttcatagtatttctccttgtataacataactattgtaatttcatttcttgatccaatctaaaagtatagcatatttttttatattgctcgcagttattttatacattatttccacgacgcacactgtgcacattattccgatgtcttgcattgtattgaattgtattgaattacattttgtagtataatttatattgattacggaaatctgtatcacggattttcccatacgactacaatgagattataagaacacaaacaggacattagtatatggaaaaacatgccttattgattgcgaattccgcatcaatgatcgaccattttaataaagataatatccgcatcttacaggatatgggctacacgatctccgttgccgcgaattttcaagaaggaaattcaagcacggtggaacgcatccatgcgttcgcaagtgagcttgctgcacaggatatcgagatcatcgatctgccgattccgcggaagatcacagagcttgggaaagcgtttaagtccatccggattctgaaacgctatatgcggaaccacccttgccagatcgtgcatacacaaacaccatttggcggtgtcgtcggtcggcttgccgcgaagaaattccgtaaagatggcacaaaagtaatctactttgtccacggttttcacttcttccgtggtgcgggtatcaagaattatctgctttattacaatgttgaaaaatggctgtcccatgtaacagattgtctgattaccttaaatcaggaggattatcaggcggcgaaacgacggtttcatcacccaaatgtccattatgtaccaggcgttggcgtggatacggatacgattgcttccatctgtgttgataaagcggatgtatgcagacgattcgttctgccatccgacaagaagattatactgacggttgcggaattgattccacgtaagaacgtagagacttcaatccgcgcatttgccaagtccaaccgtgatgatgcaatccttgcgatctgcggcaaaggcattctcgaaccatcgttaaaggaactagcgcagaaactgcaggttggtgaccgtgtatttttcgcgggctatcatacggatgtgctggatctgtatcactgcgcggatttgtttttatttacaagctttcaggagggattatccgtcgctgtcatgcaggcgatggctgccggacttccaatcatcgcttcggatatccgcggaaaccgcgatctgcttgcctcagagccacatacacgcagcaagcattacctgcttccaacgaaggacgcagacgcatatgcagcaaaaatcaataaaattctcaatgatccggcacttgcacaggcacttggtgaagaaaaccagacaaactgcaggaaatattttgatatttcgcttgtacacaagcttatgactacgatttatacagagttgaccgattaacggtctacgacattgcatttataaaaggagactattatgtatacagttcaggttctgctatctacttacaatggcgaaacttacttgaaagaacaattagacagtatcttgaatcagaaaaatgttgccgtgaagctcttcgtccgcgacgacggttcttccgatggcaccgtggatatcctgcgcgcctatgccgcactccacgataacatttgttacctatgtggcgaaaactgcggcgtggtcgcttctttctttcgtctgttcgaattatctgacccggatgtggatttctatgccctctccgatcaggacgatgtgtgggacgaagacaagctttccatcgcctgccagaagcttgaacagatgcgcaaatcaaaatcccaaaagaaaaagaagaatgattcccagatccgtacatttaccacaccacttctctactgttgtgatgcatggaatactgacgacgcattaaatccactttcagaatctatgcagaccgcaggcaaagaactgattccggactttcggaacgcattgattgagaacatcgcccgcggtgcaagcattgtatttaatcaggcacttatgtcttatatccgaatcagtatgccacaggatatctacatgcacgactggtggctctatctagttgcgtcctgtttcggcgaagtttactacgacagcgccgctcattataagtaccgccagcatgcaggaaatacgcttggtgcagcagctccttccggctgttccaaattcttccgccgcctgaagcagagccgtacaaatggcggtcacatctccagacaggcaaaagcctttgaacgaatctaccatgtgccagaggagaaacaacagtttttgaacattgtaacgaagtatcaggacgtgaaatcctaccgcaaaatgggaaaatccggcaaatatttgttccggcagaataaaaaggataaccgcgtctttcagcttatgttttattctaaccatttgtaattgacttcgttttccttttcgtttataatgatttttgaatttttctaaagcaaaaagaatgataatataaaaatcaaacggaaagaggaatgagctatggcagtaaagtacatttttgtcactggcggcgttgtatccggtctcggtaaaggaattaccgcggcatcacttggacgtctgttgaaagcgcgcggatacaaagtgatcagccagaaatttgatccatatgtcaatatggatccgggaaccatgaacccaattcagcatggcgaagtatttgtaacagatgacggtgcagaaaccgatctggatcttggacactacgagcgttttatcgatgagagtctgaacaagggttctaacgtgacaacaggaaaggtttactggagcatcctgaacaaggagcgccgtggcgatttcggcggtcatacggttcagatcatccctcatattacaaatgaaatcaaagatcgtttctatcgcaatccagatgcaaaagacgatgagattgcgatcatcgaagttggcggtactgtcggcgatatcgagagccagccgtacatggaagccattcgtcagtttcagttggatgtcggacatgagaattgcatcatgatccacgtcacactgattccttacttaaaatcatccggcgaactgaagacaaagccgacacaggcaagtgtaaaaacttgtcagtcacttggtatccagccagatatcttggtttgccgttccgaccttccgttagacaaagcaattaaagataagattgccagcttctgtaacgttcctagcgaatgtgtcatccagaatctggacgtggatgtattatatgaagtggtacttgctatggagcacgagaagcttgccgatgcggcctgcaaatgcctccatatcccatgtccaaagccagatcttgacgactggatcaccatggtggacaactggaagcatccgcaaaagaaggtacgtgtcgctttagttggaaaatatgtcagcctgcacgacgcttacatctctgttgtagaatccctgaagcatgccggtgtcgcacatcgtgcggatgttgagatcaagtgggtagattccgaacttgtaacaaaggaaaatgttgcagagatcttaggagatgtatccggtatcttagttccaggtggtttcggcgaccgtggtatcgagggtatgatcgaggcaattacctatgcacgggagaacaagattccataccttggcttatgtcttggtatgcagcttaccatcgtggaattcgtaagaaatgttgtcggctatccggatgcgaacagctccgagttcaaccctagttccagccatcaggtcatccatatcatgcctgaccagaatggtgtcacagacttaggcggaacactaagacttggttcttatccttgtgtacttgataagagttcaaaagcataccagttatatggtacggaccacatcaacgaacgtcacagacatcgttatgaggtaaacaacgattatagaaaggttctgaccgatcacggcatgctcctgtctggtttatctccagatggtcatatcgtagaaatgatcgagcttccagatcacccttggtttatcggaacacaggcgcatccagagtttaagagtcgtcctaacaaagctcatccattattcttaggatttgttggcgctgcgattgcacattctgaggaagcatgatatactaactcctgtcggcaaacagatttgtgacacaaaagaaaaagaaaggttttcacacccccttatgaaggcaggaaaattcatcagaaaatataaccacatatggacactactctacatcgttttctacatgccatggtttatgtggctggaaaagacagtaactacggattttcatcttgtatcgatgccaatcgactacaagattccgttctgtgaatattttattattccgtattttatgtggtttttgttcgtcccggcgattgtcggctatgaatttttctattccaagaaagaatattatcaatgctgtgcgtatctgttcagcggcatgacgattttcctgatcatctgcaccatctggcacaatggtctggatctgcggcaggatatctcctacaacaataacctgtgtgcaaaactcgtcaagatgctgtataagacagacacaagcacgaacgtattcccaagtctgcacgtatttaacacacttggttgtctcgttgccctgtacaggagcaagggcatgaaagataaaacatggatcaaggtaatcgcaacaatcatcggcatcctgatcatcttatctaccatgtttttgaagcagcattccgtatgggatgtcatcggtgcatttgcgctggcagcaatcctctatccgattgtctatgtaatcccttggggcagaaagaaacaatgataaataaaaaattccgaagtctgatataaacaaacttcggaatttttttatttgtctaattaaatccaaacaacttctggaacagacgatatccggttcttgcaaaccatctgcccgttggtccgtgcagattgaatgtgattccaaacaacgttgttcgaagctccttgtataattctgcatccgtatccttcagatacttccacagctcttttttcttcttatacagctccttgtccttcgatacaacacagatactcgatgcaacacacatcatcatatctaagtactggaacaggaaacggtacatctgtggagggagttcttttcggttctcactgaaaaactggatcagcgtccgattgacaagcatctgctgatcgatccgcttcatcatcgtcttttcattgaccgactgtccttctctgccaatataatagtgatacaagtcgacatttaaatacatcagcttcttcacatggatcatcggttcaaagatatagagattatccacataaaatgtatgcttcggaagttgcagtccgcagtccttcagcagctgtgtccggtaaatcaccgaatgcatcaatacatactgaaacttgttgaaccgaatccggctgtcttcccagcttatgatccgtttctccggcaaagcaccatgataacgcatgacacgcttcttccggcgttccaccttatcatagatatagttggagagcaggacatctaaatccttctcatcttccacaagcttcttcaagaccttcaacacctgcttataggcttctttatcaagccagtcatcactgtcaacgaccttgaaatagactccggttgcatgagcgataccggtattcaccgcatcgccatgcccaccattttctttatgaattgcctttacgatcgtcggatatttctccgcataggcatctgcgatcttcgcggtgtcgtctgtagatccatcatccacaatcagtatttctaccagttcgccaccaagcaatgcgtgatccacgcacttcttcatatagtcctgcgaattatagcagggaattgtgatggttaatatttttttattcataaattatttgattaccttaatccagccttctggtgcctcgatacgtcccatctggatacctgtcagagcgtcatacagcttctttgtatatggtcccatctcttccattccacttgggaagcagatttccttgccgtggtcgttaatctttccaactggagagataactgcagctgtaccacacagaccacactccgcgaaatccttaacctcatcgaagtaaacctctctgtgctccaccttcatgccaaggtacttctccgcaactaccatcaatgaacgacgtgtgatagaaggaaggatactgtctgactttggtgttaccaatgtgccatcctttgtaacgaagatgaagtttgctccacctgtctcctctacctttgtacgtgttgcagcatccagatacatattctcagcgaagccctgattatgtgcatctacgattggatataagctcatagcgtagttcaatccagccttgatatgacctgttccatgaggtgctgcacggtcataatcactgacacggattacgattggctttgcaccgcccttgaagtaaggaccaactggtgtacagaatacacggaactgatactcatccgctggctttacaccgataaccgggttgctgccgaacatatatggacggatgtacagggttgcaccggaaccatatggtggtacccagtcaatattcgcctctactgtctttacgactgcatcaacccacttatcctccggatatacaggcatctccagacgcttgcaggaatctgccatacgggatgcatttaagtcaggacggaaaatcacgatctgtcccttctctgttgtatatgccttcaaaccttcaaaacaggtctgtgcatactgaagaactccggcacactcactcagattaactgttgcatcctcggtcagtacaccatcatcccatgcaccgttcttatagtttgatacgaaacgcttgtctgtctgcacatagccaaagccgagtgaagaccaatcaatatttttgctcatgatttattacttcctttccctcatgcgtattatctgccctttattttaccactcatatgtaattatgcaagcagaaaataacataatcgagcgttttcacttgtttttactgttcaatatacttattatattattttttgattgcgattgcttcgatttcaatcttcacatcctttggaagtcttgcaacctccacacacgaacgtgccggacagtctttctcaaagaacgttgcatatacttcattcactgccgcaaaatcattcatatctttaataaataccgtcgtctttaccacatgctccgcatcgctgcct

SEQ ID NO: 523 - DNA, 14677 bp, unidentified
  source 1..14677: mol_type = unassigned DNA
  misc_difference 29: note = a, c, g, or t
  misc_difference 30: note = a, c, g, or t
  misc_difference 31: note = a, c, g, or t
  misc_difference 32: note = a, c, g, or t
  misc_difference 33: note = a, c, g, or t
  misc_difference 34: note = a, c, g, or t
  misc_difference 35: note = a, c, g, or t
  misc_difference 36: note = a, c, g, or t
  misc_difference 37: note = a, c, g, or t
  misc_difference 38: note = a, c, g, or t
tcaccatgccgtcgtcgcgcaggaagcgnnnnnnnnnnccgccgtacctgccagaaactcatcctgaaccagccccctcgtctccgggggcatgcccgcatggtaggacttgacggagaaaccggcttttcccaattcgtaggaaaggttttccgcatctttgcgggtccgcgtgtacaccacggcaggacggcggcctccctctttcaacaattcaaccagccgcgcggtcttatcctgatccttcaacgtttccacctggcggaagatattcgcacggtacggcgcagcccggaaaatacattcatcactcacgccaaacaggccggccagatcgcggcacacccgctccgtagccgtggccgtcaacgccatgacgctgcggaacccgtgctttctgaaaaaaacgggcagccccagataatccggacggaaactgtgcccccattccgaaaggcaatgggcctcatccaccacgaacaagccggggggaacaagctccatggcccgctgaatccacggggattccagagactccggagcggcaaacagaaggcggacgcctccggacttcaatctgtccatcagggaggccttatcttcctccgccagggtcgaatcatacctggcggcggccacgcccagtttttccagacccgccacctggtcgcgcatcagggcaatcaacggagaaaccacaaccgtcagcccgtttccaagcaccgccggaatctgatagcaaaggctcttgccggaacccgtaggcaaaataccgatgcaggaacggccctccagcgcgcactccacaagctccctctgcatgggacggaaccgttccttgccgaacaaacgcagcgtgtcttccagagcagaggaaagcatggggcaaaaataccataatgcagaatcccggcaaaaggaatcctatgacattgacacggcgccgtcatcctatatcctccaggcaatatgagacctttgaaaaccatcatcgccggaactctggccctgctggcggcagctcccctttcagcccaaaccagagctgaggaaaataaaaaaccgaatatcctctttatcattacggacgaccacgcctaccagacgctgggcaccggcaataatgattcccccgtggccctgcccaatttcaacaaactgggacgccaaggcatggtttttgaccgcagctactgcgccaactccctgtgcggcccctcccgcgcctgcatcctgaccggcaggcattcccacatgaacggctttgtcttcaacggacaaagaccgctggacggctcccagcccacctacccgaaaatgctgcagaaagccggataccagacgggccttttcggcaaatggcacctggaatcaaatcccaccgggttcgacacgtgggaaatcttccccggccagggcagctactacaatccggactttatcagcctcaagccggacggcaaacgccagacaaagcgttttcccggatatgccacggacgtggtcacggacaaatccatccagtggctggaaaaccgggacaagaacaagcctttcctgctcgttgtgggccacaaggccccccaccgcgcctggtgccctgctctgcgccacctgggcaaggtggacacttccagcatgacgccgcccgccaacttccatgacgactatgccaaccgtccggaattcctgaagaaaaaccagcagacagtcgccaatcacatggcgatttattccgacctcaaagtgcttaaggaccaggttccggaagaaatgcgcaaaagcatcgtttcccccggttacggctgggacctgggcgagttgaaccgcatgactccggaagaaaagaaaacctggacggactattacgccaagcgcaccaagtccctggtggacggcatgaaatccggaaaactgaaggacccgaaagcgtttgcggaatggaagtggcatgcctacatggaggattatctgggatgccttctgtccgtggacgacagcatcggccgccttatggaatatctggacaaagaggggcttgcgaaaaacacgctggtcatctactgcggagaccaggggttctacatgggagaacacggcatgtacgacaagcgctggatttttgaagaatccctccgcatgcccctcatcatgagatggcccggcaaaattcccgcgggcatccgcaacaacaccatggtgcagaatatcgactacgctcccaccatcgtttctgcggcaggggcggacactccggaaaacatgaataccttccagggcgtatccctgcttcccaccgctttcacgggcaaaactcccgacaactggagggatgccatttactactgtttttacgaaaatcccggcgaacacaacgccccgcgccacgacggcatccggacggaccgctacacgctttcctacatctggaccagcggcgaatggatgctctttgacatgaaaaaggatcccatgcaaatgaaaaacgtcattgacgatcctgcctacaaggctacggtggaacagctcaagaagcgttaccacgaactgcgcaaaacctataaagttccggaaaacagccccggaggcaaaggaacgcctatccccaaattcgacgcttcctggtaaaagccacacgggaaactgcctttccaagcgccggtttttccggcgctttttttattttcgtccatagcaggccggagagatccgtcacggaggccgaaacaggcaaactccccttccgcacacaaccgtccatcaaccgtaaaacccgcggaggggtctcaagcccgccagcttcatcaatttattcatggctttttcatacaggaaaaacgcctgttgcatgcagcaaagcacgggcattaagggatgctccgctttctttgcgccaagctcttccaaaaaccggtccgggtccttgtcgtcaaaaccgggatgccgctcaaacgcccggcggccttccagatgaatgacgcccttcccggaatacaggcagtccagatgatgttgcgccgccacgagagacagcagcgtctgatcgtgcgtatgagctacaaaattatcgcggcaacggctctcttcttccgtagtggcggaagacaccaatttgaactgacggcacaaatccatccattcacggagaattcggaggctttgttccgattttttcaagaaaaggaaggagccctgaatcaggggagcctgttcaaaatacccgctatccagcttcaattcatcaaaaacgctctgcttgcaccaccgcgtaaggcctcccgtataataggaaatattcacgcccggcatcatatcctgccccttctcccggagccattggacaaacggctccaaggaatgatggaaaagcctccccggcgggcgccccgcatccgtataaagcaggtaatccccttcctccaaatgttccagctccttgagaatgatgaagggtttccatacccaaaacccggcgccctgtaaattcgggtcaaaccatggaatagcttccctgattccttccctctccaggcgattaagattccaacaggacaacgccactgaggaatccgccagcctcaggctcatcatctgcatccattgccgcaaatgatagccgcgggtcgcgaaagaacaataacggatagccatactcccagattccggtggaaaccatgtccctaaaaacgggaacacatcttctgcgtccgtacctataacgagttgtaaatccgctgtcaatggaaaactttaacggagaatcatctccgtgcatggaaccacggattgaaacaggatttttttaattaccaaaaaaccattcaacacgataagttatttatagttatctttttataactatatctaaacttttttaaaaacaggcggatttacaatcccccgttcaaatacaccacaatgtccagaatttgacttatccccgtggcatctgctccgctgccagccttttatccaaatcaagagccgcgccaatggccgcatccatattgtagtattcccactccgcaaaacggcctaataaataaatgcctttcggttccaagcgctcctttagttcccgtatgagggttcggctggaagcatcctgaacgggataggtatattcttcccagtgatgggccagatacacaggggaaaagggaataagctccagctggcgcctgatttccccttccgtcatttgctcggaaaattcaatagtcgcggtggtgatgtccccgttattattatttctggaaaaattccccgtgcaaatgatccggtgggaacggtgggacggagagggcatgtaaatccagctgtaatcattgggggaaatccggcaaagcacggaagtggttccgtgagagcgcaattctgaaatccgggggaaaaacgggcgcaattcatccacgcaggggaaacaatccccaagctgcctgacattccccgtaaagacgactctgtcaaacaattctccctgcacgagccatttcccgtccttcgggaggatatttacagcttcctgccggtacctgaccttaaggccgcgagccagcgtatccgccagaaactgggaaccgccgtttttcgcataaaagaaagaactgtgcaccatggcgctttcattgatgtgcccaatattgttcaacaggatttccgccacgctcggcatgggaagcttgtcttccagccaatccatggcaatttggctgatatcctgcctccacactttgttattgtacggcgtgaaataaaggttgttcagggtttttccgaaacggttcagaaaaaactcacccagggagcggggctccgcgggaggattcctgtaaagttccagcagctcatggacgatggaggaacggacggcctcgggaaactggtcgaggtggttctcaatgggataatccaccacatccccgccctccagggaaatgacagcccgtcgccgggcggaaacaaaatcgcgctccctgtcaaaccgggaccaaaaccagtccagcacttcctgccgccgggaattgaacacatggccgcccacacgatgatacaggttcccctgtacttccgtgcatttaatcaggccgccgggccgggaacccctctcataaacgaccacctcatgccctttcttcagcaacattccggccatggacaatccggaaaccccggctccgatcacagcatatttcatcatgggataaaaagaccaatttattgacgccactatctggcgaagcgggacaatttcacgggatggagatacaggtattcctccggaaaggaggcaagcagcttgccgaggtctcctccggaagaggacacgagcccgtcaatgacggcattcatggcttcaaagtgttccggatcctggggaaaccagacgtttcccgacttgtactgagtgtcctccagcgtagccagctttgttccgggaagaagctgcaacgccgtgggaatggccagctccacaaacatgttccatgcggagaacacttcaaggatacggcagaaatcgtccaatttccctttcggaatgcagacaatgtccgaatatccgaaaacgacaggataggaataccggtattttttaatccggtgcttccagtaattcagcagatgccataccctgcccttcaacactttccaattcgcatgaatccccccggagctccatttgggcagaaacatgcgtacgcgcgacaattcatcatgccgcatgaggttcctggattttaaaatccgcctggcctcctcataggacggaacgttcctgttgacgctttccgcatcaataccgggaggggttatggaaaaatggtgggcttccgccgttccccggtaacacaccggaagagaaacatccacaaaaccgtcaaggtaacacgtatcctccccatggattcccagcagggacggcgttgaaaattcgtcaaacctgggatttaaaagaagatcgtctccgataataagaaaataatcgccatccaaccgcctgattctttccctggactgcaaaatataattatagaactggaaagaattcccgaagacggaacatacgtcaggggcatctcccttgtagtagggcattaattgaagcaacccggaaaagcgtcttgaataaagctctctgattaccggaatgttacgttcatactgatggttgaacaacacaacaagagacgttttccgggaagaagtatccatggccgtttgatgttgagaaacaaaccgtacccttcaacataaattattgaaaaaaagggatttgctctctgagtgcacgcacagtaaaaagagtgcggggcatattacacggattccaaattcgattggggaattccaaatccgctgtaattaaaaagagattgcgtgcggttgtttctgcatgacaggagagcctcttcgcagaaaggaaataaaactgatgatcaataattttctttgaaatacggactttccggcaggtatggatgtttctgccggaatgggaattgatggggttacccggatggaatcatgaagacggaagatcccggtcattggggaagcttattttcagaagttcctttctttcaaaatttaaccttgactccggatttggaattcgttatttttagacagtttaaaaaaacttaaactgtttattcgatttcatgatttcagccattcttctttgttacaatcagaaacgttttatcaaggaacagttccgggctattttaaaacaggattatccaggagaatgggaaataattatttcggacgatttttctcaggacggttcttttgaatgcctggaagaaatggtggaaaaagagggagaaggacggcgtattattctccaccgtaacgaaagcaaccggggaattgcagggaatttgcaatgtgccgttcatttgtcccggggggaatggattatcaagtttgacggcgatgacatcgcccgggaagacaggatttcctcgttggcgtctctggcggaacaatatcccggtcatctggtttactgccattcttataatgaaatcgatgaagatggacaacccgcctatggacgcatgctgccagactcagattccgtcgtcgtcaaaccttacagggaatgtatttttgacatttcccatgtttacagctgttttggcggaaatgccatgtaccacaggtctttgttcagcgacttcgagtatttgccttcaggtcccggcatttcggacgatatgatgctgtccatgcgcgcctatttgaaaaaatcaggcatggtcgcatccggcaaacggtgttcgtactatcggagacacaacagcaatatctgcaattttaagagcgggaaccccaggacaaccctgatcaagagatcggaattccagataacaacctggataatgatcatgaaagaggtatacggaaagcataagtccggggaaataacataccaggccgccgaccgcctgatgaggctgattcaggcggaacagagaaggctcctgctcttcccctatgcttcattcgataacagccttcttaccaaactcaaatggttttggaacatcctgcaatgcaggccggggctttggctggtcagcattccaagattgctcccgttttgcctgctgcaaaggtatttgaacattaaagaccggataaaaagtcttcctttttttcactaacagcagggatcctgcataaaaaacaggaagaaaaataaacgtactgataccctgcctccctcccttccatcatcgggaaaacaaaaaagccgttccgccggacaggcctgcgcggaacggccgggaaaagaaaaccttgacaaggttaatacctgtaaaagtccggcttgtaaggaccttccaccggaacgccgatgtagtccgcctgctccggacgcaggacagtcagcttgcaccctatcttggcgaggtgcagccgcgccacttcctcatccagcaccttgggcagcacttccacgcccacggaacggtctttacgggtattccacaattccagctgggctagcacctggttggcgaagctgttggacatcacgaagctgggatggcccgtagcgcagcccaggttgaccagcctgccttccgccagcaggtacaggctgttgccggacgggaacgtgtagcggtccacctggggtttgatgttaagatgcctgatgccgggatacgtctggagcttgtgtacctggatttcattgtcgaaatggccgatgttgcagacaatagcctggtccttcatcttttccatgtgttcgatgcggatgatgttgcagtttcccgtggtggtcacgtaaatatccgcccagcccagcgtgtcttccaccgtcagcacgcggtagccttccatggctgcctgaagggcgcagatggggtctatttccgtcacgaccacctgggctcccatgccgcgcagggactgggcgcagcccttgcccacgtccccgtagccgcagacgacggccactttgccggcaaccatcacgtccgtggcgcgcttgatgccgtccacaagggactcacggcagccgtacaggttgtcaaacttggacttggttacggaatcgtttacgttgatggccggaatcagcagacggccggctgcctgcatctggtacaggcggtgcacgccggtggtcgtttcctcggaaacgcctttcagctcgggaagccagcgatgaaaaatacccggagtcgcctcggcaatttttttcaacagagccttgatgacttcctcttcttccgattccgacggggtatccacccagtcggagccttcttccatttcatacccgcggtggataagcagggtggcgtctccgccgtcgtccacaatcagctgcggccccagcccgtccggaaagttcatggccttccacgtacagtcccagtattcccgcagcgtttcccccttccaggcgaaaacgggggtgccggatttggcgatggcggcggcggcgtggtcctgggtggagaaaatgttgcagctcgcccagcggacggaagcgcccagagccgtcagcgtttctatcagcacggccgtctgcaccgtcatgtgcagggagcccatgatgcgcacgccctccaggggtctggcggcagcgtacttttcgcgcacggccatcaggccgggcatctcatgctccgcaatatccagttccttgcgtccgaaatccgccaggccgatatcgcgcaccttgtattgttccgtttctgaaaacatgtctgtaagcgttgtcgtaggattaatgaagaagttgtttcaggaaggccaggcgcgtttcgtccagctgttcccagggcagttccggattagtgaaatgcccgtagtgcgtcgtcttccggtaaataggctgaagcagattcagctgtttcaccatatccgcgggcttgaaggaaaagatgttttccagcgcattttcaatggatatttcctccactttcccggtaccgaacgtatccacccggatggaaaccggagcggggtagccaatggcgtaagccacctgcaattcacatttgtccgccagtccggcagccacaatgtgcttggcaacccagcggcacatatacgcggcggaacggtccaccttggacgggtctttcccggaaaaggctccgccgccgtggcgccccatgccgccgtatgtgtccacaataattttgcggcccgtcaggccggaatccccgtggggaccgcccacgacgaatttcccggtggggttgatgaaatattccgtcctctcatccagaagctccgcaggaagcacatttttaatgagtttgacgcaatatgagtaaatcgtgtcatggtccacgtcttccgtgtgctgggtggaaataactacgttttcaatatgcgcgggacgcccgtcttcgtcataggccacagccacctgggacttgcagtccgggcgcagccagtccacatgcccgcgcttgcgcctcctggccagctcaatgagcagtttatgcgcaaacacgatgggggccggaagcagctccggcgtctcattcgttgcgaagccgaacataatgccctggtctccggcgccctgctccgcatggcccttgccctccgcctcccgggcgtccactccctgggcaatatccggggactgttccgtgagcaaattcgtgaaaaagacggtatccgcatggaaaacgtcgtcgtcctgcctgttgcagtacccgatctcccgaatggcctggcgggcgattttttccggatcgatcaccgctttggtcgtcagctctccggcaatgatgaccatattgctcttcaccaacgtttcacatgcaacgcggctagttttgtcttgagccaggcaggcgtctaaaatagagtcggaaatgtagtcggccaccttgtccggatggccttctccaacggattccgacgtaaagatgtgaggggtgtttctactcatatcgataaatctcgatgtgttgatatattattccgctatgaagtcaaccctaaaaacgctcaaactcctggcagatcccacccgcctgcgcatcatcaacgttctgaatgaagaatccctgagcgtcgcggaacttcaggaaattctcggcatggggcaaagccgcatttccacccagctggcccagctccggcaggaaggggtggtggaggacgcccgttccggcaaaaacgtcttttacactctttccctggcaggtgatctgcacaatgtagccctgaaagcctgcgaggaattgccggaggcggaaacggacaaaaaagcccttcaggttatcctggacaagcgcaaaaaccgcacccaggcctattttgacgaagtagtgtgccgtctgggcaagaactacgcgcccggccgttcctggaaagcgctggccggtgctctgctccgcattctgaactatgacgtagtggcggacctgggagccggggaaggtttcgtttcccagctcatctcccccagcgccaaacaggtgatcgccgtagacaactcccccagcatggtggagctggggcaggagctggcgcgcaaacacgggctggacaatctggaataccgcctgggcgatatcgaagcgccgcccattaaacccggcacggtggatctggccctgctcagccaggccctgcaccatgcgcaaaagccgtccagagcgctggaagctgcgtgggatatcctgaaatccggcggttgcctggtggtgctggatctgctccagcatggacaggaggaagcccgtgaactttacgcggaccgctggctgggcttcacgcccgccgccctggaaagcatgctgaaggaagcgggattccggaacatccacacggatattgtggacagggagccggacccgccccatttccagactctgatggccgccgcctggaaaccgtgacgtacagccgtcttaatccattttccttccggaatagccggagcggactttccgacatgcctccacaagattcctcacggtaccggcatgccatccatgaaaagccgctacatcccggaaaccctgtcttccggaggcctttccgccggaaaggggcggcttccggattgcagggcttcccgcattccccggacaatatccatcatctgtcctgcagacagctcctccttaccctcaatttcctcatccaccagcgctttcatttcctccagcagatgctccggctccagacggtaagtaagcagcacccggaacagctctcttccggcagcctgcagagggaccgcaggaaaatccgcgacactattcaaatctttttcttcaaaggaattcaggagctttgcataccgcaggaaagcgcacttgaattcccctgggcatccgcccatatccactgaagccaaataccggcggaaggaaatctccgccgccagatgcacggcctcatcccccgtggattccgccagccacgtttccttttgcttcagatgcacaagcaggaggaccttcctcatggcttccctctgtctgcccttggggccacttttcagtttgaccaggtccaaatccagatccgcggcatcggggctcgctacatcctgggcgagagacacacccagggaggccgccattatgacaaacggcagccacctcctcatgcattcccgaatatggaccattgcggtcagccattacatgaaaaacgccggaaaatcaacccaaatccagcgcctccggcatgaagaaaatccatgccggaatgttgtgcccgcccagaggaacacccggaactgcagatcattccgacataagctccatccctccgttttccaagcgttccgggcgggaaaagaaggaaaaaacgatgtccgcacccgtacccggctgctggccgggaaggacggcttcatgccagccggagagattgacggacacacgggcatatgagaaaaaaccgtctatgctattcgcagtagtgattttcctttccgtggtcgtgctcggtgtcattgccgcgctgcgtttcaccaaaggcatcattcccctgcgcacctacgaatcccgggaactgcccggcttccccggcccggcgggattaatccaccgcctggacggtgcggaaaaacgccagcggaaactggagaaagcccggtttcccggagtggatgaaaacggattcatcagccttcctccggcatgggaaggcaaggtgaccgcaggccggctggcctgcgtagcccatacctgggccatgagcagcctggtccgggaagacccggaggcggcaaaagcccgcaaaaccgcctctgcgcgcgccacgatgattccttttttcacagctcttatcctgctgggaatgctgacggccggactgttgaaattccagatcgcgctggccatcgggctggcctgctgggcctttttcactttctccgcccttccctcccagttccgcgaatggaaagcggcggaaatagccaaatcagggctaaaggaagccgggctgtggcccgtgctgccttcggacgccatggctgtggaacaatgcctgaaagcgttgtcatggtgccacgtggcaggcttccgacgcattctgcccagatagcggtttccccggcgatgaagcgcatttttccggtcaaaccggcctttgggagaaaaaaatcttgaaacggggatgcgtgtaacccactctttcatcgtcgtcaacttttccttaccgtttccatctctccatgaatgagtccgcaaaccccatcctcaaatatttttcggaattcaagatcctgaaaaccgtatccaaggatttctggcttaccaacgtcgtccagttcttcgacggaatggcctatttttccatgattacggtattcgtcctctacctgacagactattgcagcttcaacgatgcggacgccgccctctgggtaggcctgtacacccttttcatctccgccttcgtcttcgcggtgggttccatctgcgacatcatcggcatacggcgcacttacctgatcggcttcatcatcctcattgccgggcgccttatcatgggcttcggtccggacctcagcccaaccgtggactccggaaggctggccgtcatggcgggcattctgattatgtccttcggcacggcgttcatgtcccccgtcatccaaacttccatccggcgcttcactccgctgaaagcgcgttccacgggcttcaatatctactacctgctgatgaacatttccgccgtcatcgcgaacgtgttcctgattgaatttttccgcaagcacttcggcgccgtggacggcggatactggattatcaacttcggaacgctgatggtgctgctgggctgcatcaccacccgttttattaatgaagacaactacgcggaacccagcgaacgggaggcgaacatcaatgcccccctccgcagacctctccagctcttcatggaggtgtggaaggaatccgccttccgcaaacttatcctcttccttgtgctgaccatgggcgtgcgcatcgttttcacgctgcaattcctggtgatgcccaaatactacgtgcgtacgctatatgacgactttgccataggctccatcaatgccgtcaacccggccatcatcgtctccggcctcatcctgctcattccggtgctgggccgcttctctaccgttggtctcatgattgcgggcatgtccatctccgctttctctctcgttttcatggccattcccattgaatggtactacctggtgcccggcattgaaacgcgctctcaggcgtatctggtagccattgtggcgcagatcctggtattcgcattcggggaactgctcttctccccccgcttctccgaatatgtggcgcgggtagctccgaaagacaaagtggcctcctacatgtctctggcggcgcttcccatgttcatcgccaaacccatcaatggcatcatcggcggcctgctcgtcgcctacctctgctatgacggcatctgcgccaagatggataccgggcacatcggcttctgggactccccggaattcatgtggaccatttacctggccatggccgtaatcagccccatcgccattatcatgacccgcaggaccatcacctcggaccatcccgaggaagacgcggcatcgccacccatcagcgccattgaagcggaaacggatcccgccctgacggcggaagaatttacggaagccaactcctga

SEQ ID NO: 524 - DNA, 15666 bp, unidentified
  source 1..15666: mol_type = unassigned DNA
ccgaaactggattccatcctcacctcactgaacaacatcgtaggtgacaagagcatcccttctacgctgcactctatcgaaacgactaccgccaatcttgctgtagtcagctctcagatgaaaggactcatgagcaaggacatcccccagctgaccggcaagctcaataccatcggagataattttgtagctatcagcggtaacttgaaggaagtggactacagcgccattttccaaaaagttgacgcaacactcgctaacgtaaaaatgattacagagaagttgaacagcaaagataacactatcggactactcttcaacgaccctgctttatataacaatctgaacgctaccacagagaatgcggcgagcttactggaagacctgaaagcacaccccaaacggtacgttcatttctctttattcgggaagaaagacaagtagcaaatctttcttatatagattttatctaaataagcaggcggtatataaaagggagtataacctctgcaaaagtctatctacagaccgaaataatattcccgtacaaacaagtacgggaagtataaaagagcaagaataaaacgataaacaactaaaatacagatacttataattttgcaagagaggggaaacagacagtgttccaacacaattctataagtcattgaaagtaaacacattattgtttgcccgagaaaaacaagaaaaagctaatttgttttttccaaataagattcccaattttgcaaacgtagaagtttcgcttaatttaataaatgtattaaagtcactatgattgaatcaaatcatgttgtactttggaaccgctgtctcgaagtaattaaagacaatgttccagagacgacatataatacttggtttgccccgattgttccattaaaatatgaggacaaaacattgatcgtacagatcccgagccagtttttctatgaaatactggaagagaaattcgtggatttgctgcgaaagacattgtacaaagctattggcgaaggcaccaagttaatgtataacgtcatggtcgacaagacttcgattccgaatcaaaccgtgaatctcgaagcaagcaatcgttctacagctgttactcctaaaagcatcgtcggtggcaacaaggcgcccagtttcctgaaagctcctgccgtacaggacttagacccgcacttgaacccgaactataacttcgagaactttatagaaggatacagcaacaaactttcaagaagcgtagcagaagcggttgcgcaaaatccagcaggtactgccttcaatccattgttcctttacggagcgtccggagtggggaaaacacacctggcaaacgcaatcggtactaaaatcaaagaattatatgccgataaaagagtattgtatgtttcggcacatctgtttcaagtgcaatatacagactccgtacgtaataacacgaccaacgactttatcaacttctaccagacaattgatgtattaatcattgatgatattcaggaatttgccggagtaacgaaaactcaaaatactttcttccatatcttcaatcatttacatcaaaacggaaagcagcttatactgacttccgaccgtgccccggtattattgcagggtatggaagaacgtctgttgacccgtttcaaatggggaatggtggcagaactggaaaaaccgactgtcgaactccgcaaaaacatcctgcggaacaagatacaccgcgacggtctgcaattcccaccggaagtgatcgactatatcgctgaaaatgtaaatgagagtgtacgagacctggaaggtatcgtcatcgccattatggcacgctctactattttcaacaaagaaatagacctggatttagcccaacatattgtacacggcgtagttcacaacgaaacaaaagcagttaccattgacgatatactgaaagtagtatgcaagcactttgatctggaagcatcggctattcacaccaaatccagaaaaagagaagtggttcaggcacgtcagattgcaatgtacctggctaagaattatacggatttctcaacttcaaaaatcggtaagttcatcggcaataaggatcatgcgacagtgctgcatgcttgcaagactgtaaaaggtcagttggaagtagataaaagctttcaggctgaggtacaggagattgagtcgttgctgaagaagaaagcataattcaagtaataggtattaagtaataggtaatatcgaagctgcataaacaagtgcagtccgcataactattacctattacttattacctattacttatcattagaatccttgttgacgaagcactttcaacaagttctcagacataaattcattgtctttctttgtataacgtacatccgtaaatacctgtgccagagtttctttcttattttcttctataaactgtttattttccggcagtgattctttatactcgtacaagcgatcgatgtcttccggagtataatcatggtaaacttcctgatgcacggcagcttcgagaggcaagcggtccacctgggccggagtaccgtccggatagccgactgtgatcgtcgtaatagggaataccagtttcggcagttgaagtgtatcgatgatcatttgcggattataagtagtcgttcccagataacagatacccaagcctgcctcttcagctaacgtgcagaaggtttgcgcaaccaacaaggtatccatagacgcattcataaaagacattaaattatcgtagccgggaacagcgtttctctgttcacaccacttgctgaaacggcggaaatcggcacaaaaagtaagcacgacaggtgccccttttaccatcggctgattgaaatgagcaggagaaagtttctctttcatttctgcatcgcgagtcactataacactataaagttgcatccctcccatcgtagaagcgcggaaagaggtttcgagcaaatcatttaacaaatcaggagcaatatctttttgctggtatttccggattgttcttctgttctttacggtttcaaacatatcttttttttgcaaagatacaaaaagaaatattattttgccatatcaatgaaataatctaattttctttttggaaaacttaaagccatgaacaaaaagcaaagttatctgttaatcaaagacttaacaataacaaacggaaaacttaaagcctgttgataaaatgttgcatttttattttgatagataaaaaaacattcttagctttgcagccacatttgttactgataagtaaacttctacacattacttattaaataataaaatctaagacacattggatcgtggaaaaacaaatttattcttatgacgaagcctacgaagaatctttacgatattttcaaggcgacgagcttgctgcaagggtttgggtaaacaagtacgcagtaaaggattctttcggaaacatctatgaaaaatctccggaagatatgcattggagaattgccaatgaagtagcacgtatcgaggcaaagtatccgaatgcactgacagcaaaggaactgtatgatctgctggatcattttaagtacatcgttccgcaaggaagcccgatgacgggtatcggtaatgactatcaggtcgcttcactatccaactgcttcgtaatcggggtagacggcgcagcagactcttatggcgctatcatcaaaatcgacgaggaacaagtacagctcatgaaaaggcgtggaggagtaggtcatgacttgtctcacatccgcccgaaaggttctcccgttaaaaattcggcattgacttccactggtctcgttccgttcatggaacgttattccaactctacccgcgaagtagctcaggacggtcgtcgtggtgcactgatgctgagtgtgtctatcaagcatccggattcggaagccttcatcgacgctaaaatgacggaaggaaaagttaccggagccaatgtttccgtaaagctggacgacgctttcatgcaggcggcagttgacgagaaaccttatatacaacaatatccgattgaatcggcaaatccgactaccactaaagaaatagatgcttccacattatggaagaagattgtgcacaatgcatggaaatcggcagaacccggtgttttattctgggatacgattatccgtgaatctgtgcccgattgctacgcagatttaggttataagactgtatctaccaatccatgcggtgaaattccattgtgtccttatgactcttgtcgtctgctggctatcaatctatattcttatgtagtaaatccgtttaaaccggatgcctattttgatttcgaattgttcaaaaaacacgttgcgctggctcaacgcatcatggacgacatcatcgacctcgaactggagaagatcgaacgtatcatggaaaagatcgatcaagacccggaaggcgaagaggtaaaacatgccgaacgcaacttgtggaacaagatatataagaagagcggtcaaggtcgccgtacaggtgtgggaatcactgcggaaggcgatatgcttgctgctttaggtctgcgctacggaaccgaagaagcaaccgaattctctgaaaaagtacataagacagtggccctcggtgcctatcgttcttcggttgaaatggcaaaagaacgcggtgctttcgaaatatacagcaatgagcgtgaacagaacaatccgttcattcagcgtcttgccgaggctgatccggaactgtacgcagaaatgaagaaatatggccgtcgtaatattgcatgtctgacgattgctcctacaggaacaaccagtctgatgacacagacgacttccggtatcgaaccggtcttcctgcccgtttacaagcgcagaagaaaagtaaacccgaacgatacgaatgtacacgttgactttgttgacgagacaggcgacgcattcgaagaatatattgtattccatcataaattcgtgacatggatggaagctaacggatacgatcccgccaagcgttattcgcaggaagagattgacgagctggtggctaagtcaccttattataaagcgacttccaatgacgtagactggttgatgaaagtaaagatgcagggaagaatccaaaaatgggtagaccactctatcagcgtaaccatcaacctgccgaacgatgtagacgaggatcttgtcaaccgcctgtatgtagaagcatggaaatccggttgcaaaggatgtacggtataccgcgacggctcacgttccggagtattgatttcaaccaaatcggataagaaagaaactcttcctccttgcaaaccgcctacggtagtagaaacacgcccaagagtactggaagccgacgtggttcgtttccagaataacaaagaaaaatgggtggctttcgtaggactgctggatggacatccttacgagatattcaccggtttgcaagatgacgacgaaggtatcctgttgccgaaaagcgtaaccagcggacgcattatcaagaatgtagacgaggacggaaccaagcgttacgacttccagttcgaaaataaacgtggatataagacgactatcgaaggattgtcagagaagttcaacaaggaatactggaactatgcgaagctgatctccggtgtactccgttaccggatgccaatcgagcaggttatcaagctggtaggttctctgcaactaaacagcgagagcatcaacacttggaagaacggtgtagaacgtgcattgaagaaatatattcaggacggaacggaagccaaaggaaagaaatgcccgaattgcggtaatgaaactttggtctatcaggaaggctgtctgatctgtaccacttgcggtgcttccagatgcggttaacatgtgacgtatgttaattaatatataaacaaaagattaaaaggagtcctaatacggctccttttattttttattcaaaaaaatgtcttatacttgcatagtcattagtgtctaatcaaaatctaatatatatgactgtatcatttaacatcgaatatcgcaccagttggggagaagaagtcaggattgccggactgctgccggagtcgatccccatgcataccacagacggcatatactggacggcagacgtggaactggaagttcccaaagaaggaatgactatcaattacagctatcagatagaacaaaaccaaatcatcatccgcaaagaatgggacagttttccgagacgtctctttttatccggtaactctaaaaagaagtatcagattaaagactgctggaaaaatatccccgaacaattgtattactacagttcggccttcacggaagccttgttagcccatcccgacagagctgaaattccgccttgtcacagaaaagggctggtcatcaaggcatacgccccacgcatcaacaaagactattgcctggcaatttgcggaaatcagaaagcattgggaaactgggacccggacaaagcgattcctatgagcgatgctaactttccggaatggcagatcgagctggatgcaagtaagctgaaattcccgctggaatacaaattcatcctttaccataaagaagaaaagaaagcggactgctgggaaaataaccccaaccgctatcttgccgacccggaactgaaaacaaatgagacgctggtcatctccgaccgatatgcatatttcgatattccggtatggaaaggggccggtatagccatcccagtcttttcactgaaatcagagaacagtttcggagtaggagatttcggagatttgaaacgcatgattgactgggctgtaagtacccaacaaaaggttatacagatattaccgatcaatgatacgaccatgactcatgcgtggaccgattcttatccatataatagtatctccatttatgctttccacccgatgtatgcggatataaagcagatgggaacactgaaagacaagtcagccgcagcgaagttcaacaaaaaacagaaagaactcaacggcctgccggcgatggattatgaagctgtcaaccaaacgaaatgggaatacttccgactgatcttcaagcaggaaggagaaaaagtattagcctccggagagttcggcgaattctttaatgccaataaggaatggctgcaaccttacgctgttttcagctatctgcgcgatgcctttcagacacctaatttccgtgaatggcccagacattccgtttataatgcacaagatatagagaagatgtgccggccggaatctgtagattacccgcacatcgcactttattattatatccagtttcacctgcacctgcaattggtagccgctacgaaatacgcccgcgaacacggtgtcgtactcaaaggagatatccctatcggcatcagccgcaacagtgtggaagcatggaccgaaccttattacttcaatctcaacgggcaggcgggcgcccctcccgatgatttctccgtgaacggacaaaactggggattccccacgtacaactgggacgtcatggaaaaggatggctaccgctggtggatgaagcgtttccaaaaaatgtcagagtacttcgacgcttaccggattgaccacatccttggtttcttccgtatctgggaaatcccgatgcatgccgtacacggattactcggacagttcattccctccatccctatgagtcgggaggaaatcgaaagttacggactcccctttcgggaagaatatttgattccatatattcatgaatccttcctcgggcaagtattcggtccgcataccgattatgtgaaacagacttttctgcttcctgccgaaacacccggtgtttatcacatgaaaccggagttcaccacccaacgggaagtggagagtttctttgcaggaaagaatgatgaaaacagtctttggattcgggatggactatacactttgatcagtgatgttctttttgtaccggacacgaaagaaaaagataaatatcatccgcgcatcggaatacaacgcgatttcatcttccgttcactcaatgaacaggagcagaatgcgtttaacagactgtatgatcagtattattatcaccgccacaacgagttctggcgccaacaggctatgaagaaactaccgcaactgacacaatcgacacgtatgctggtttgcggagaagacctgggtatgattccggattgtgtttcgtccgtcatgaatgatcttcgtatcctcagcctggagattcagcggatgccaaagaatccgatgcacgagttcggatatttaaatgaatacccataccggtcggtttgtaccatctccactcatgatatgtctactttgcgaggctggtgggaagaagattacctgcagacacagcgttactacaacacgatgctggggcattacggaaccgcaccgacagtcgccactcccgaattgtgcgaagaagtggtgcgcaatcatctgaaaagcaattccatactttgtattctgtccctgcaagactggctgagcattgatggcaaatggagaaatccgaatgtacaggaagaacggattaatgtaccagccaatccgcgcaattattggcgttaccggatgcacctcactctggaacagttgatgaaagcagaagaactcaatgacaagatacgtgagctaataaaatacaccggcagagctcccaagaaataaatatcattaggcacgggtgacacggattaacacgttttttagacctataatctcttaaaactgtaaatccgtgtcatctgtgcctgaataaaatcaactgatagttttgacatctccgtttctctcccatgcggcaattctttatcttccttcattccgttttttccaattaatcaagtatctttgcaacgcaaaaacgcaacgcaaaataaatgggagacaatcagcatcggcgtattgattttgtggacttaaccaagggagtctgcattattctggtagtgatggcgcatatcggaggcgctttcgaccaacttgacaagcattccatgctatcctgctttcgcatgcctctctatttctttatatcaggaattttcttcaagccttatgaaggattatacgggttcattatccgaaagaccaataagctaatcattccctttatcttcttctacgtcagcgcctttctactaaaatacattgtatggaagattgcaccgggaactttccatctccctgtgtcatggagagaattactgtttgtctttcacgggcacgacctcatcaagttcaatcctcccatctggtttctgcttgctctgttcaactgcaatatcctgttctatctgattcattatctgcgtgacaagcatttatctctgatgtttgcagcaacgttactgatcggatgcacaggattcttcctgggcaaatttcacatcgaacttcctttgtatatagacgttgccatgactgccctccccttctatgtggcaggtttctgggttcgccgatataatttcttcctgttccccagtcatcggttcgacaagattattccctcatttgtcctgctggcactggtcgtaatgtacttcaccgccaccacgccgggtatgcggaccaacaattatcccggcaacatattccaggtatacattgccgcatttgccggaatctttatgattatgctgatctgtaagaaaataaaaagaataagcatcgtttcttatctggggcgatattccattatcacactcagtattcatggaccgattatacactttgcaagaccggtcgtttcgcattatattcataacgactgggcagaagcaagcgcactgctcctgctgacattgaccatctgcattctctttacccctatcctgcttaagataattccacagttggtggcacaaaaggatttattaaaagtcaaataataaaacattgtgcaagccaaacttttcttaactctaagtttaattatcaaataatttactacttttgttccaaagaactatagaccgagaacaaatgaatataacgattgtcttaggagataaaattccatctataaaatacggcggaactcaaagagtaatgtggtatctgggtaaagaactcaataagcgcggacacaaagtcaccttcatcgcaggaaaaggttcctcctgccctttcgctaaagtgatagaactggaccctagcgtaaatctgaacacccaaatccccacagacgcggacatcgtacatttcaacattcccgttcccgaaggaatcaccaagccgcacttactgaccatacacggcaatggaatcccggccaacgcagaccggaacatcgtttttgtctcacgtaatcatgcacaaagacttggaagcgaatcattcgtttacaatggactggactgggatgactacggtcccgccaacctcaccctttccagaaaaaactaccattttctaggcaaagcagcctggaaggtcaaaaatatcaaaggagctatcgccgttgtccaaagcatcaagaacgcacaactggacgttttaggcggttatcgcctcaatctcaaaatgggcttccgattcacatggaatccacggattcattttcatggaatggtagatgattcaaagaaaaaagttattattgagcagtcaaaagggcttattttccccgttacatggcacgaacctttcggacttgcaatcactgaatccttatacttcggagctcccgtattcggtactccctacggtgcgcttcccgaactcgtttcaccggaagtcggttttctgaccgctcacggacaggaaatggccgaacatatacagtcagcacaatattctccgaaagtctgccacgaatatgccagagatctattcaattcaagtgtcatggcagaagcctatttaaagaaatatgaaactgtactgaacggcgaacctttgaataaagaagtccctcatattatagatatcgcacgacgtcttccatgggactaaaaatggcagttgaattacatagctgatgactaaaatctcatttataaagcctttcattcatttaataagcgaacaaaaatgatcgaaaacactttataaaaagaaataaagccttacctttacttttttagaaaacaaaagatatgaagataaacaacagctatattttgctgaaagacatctgctgcttcgcttatcatggagtagccccccaagagaatatcattggaaatgagtatattatcaacttgaagttgaaggtagatatcagtcaggctattcaaacagacgacgtggtggatacggtcaactatgccgaaatacacgaagccgtgaaagctgaaatgtccatcccgtcgaagttgctggaacacgtatgcggacgaatagctaaaagactactggcagaatttcctgccattgaagaaatagaacttcgtctttccaaacggaatccgcctatgggagcagacatcgactcagccggagtagaactgcattgcagcagataagtacctttgctttatcagtttgtgttattatcaagaagcacattggtctgtcatcctatcatccggactgccacatccggtcaacttatttacaacaccctatcattccgcttgtgccaagtaatgggcacagttatgccaaaggagtgtcacggttgtgacaagggtgtggcacagttgtgacaaaggcttggaaacagttgtgacaagggcatggcacagttgtgccaaaggcgtggcatcgtcgtgccaaaggcatggcacaagtaaggctgcctcatttctacttgaagcagcctcacactatcatattttcagtctataacgacctatctcttctttctttttcttttatttaccgattctacagcttccgttaccacggatttgttttcgaaccgtttcgtataactggaatagtccggatgggtacgttcgtaatcgggatccataaacagagggctggaaatgatatgatccgccgtagaacgattacaacagaaaacgatgttctcaacaccggccagtcgggttaatgctttaacatccgtatcatgtggctgcaaagtcatagggtcagtgaaaaagaatagataatcaatctgaccgtccacaatacgcgatcccatctgctggtcacctcccaaaggaccggatttcagaattgtgaagtcccactccacttcaggatgcttctccttcagtgcttccagaatcagagtacctgtagtacctgtacaatagaatttatttcccatcaacagttccgagttccacagcacccattcgatgaggtcttttttcatggcatcatgtgctaccagcccgatgcctctccttacttttggttccattttgttatccttttaaatccgacaattgagagaatcttttgcaccctcccacataaaactgccacaagatactactttttatccgttcagggattggattcaaagaagtttttcttaagttttctttacgggaagaagaaaatgaaggacaaatctgtttatattctttccgggcacgcatcaccgcacgggcgttgtctaactgccccttcagcagaaatgtgaatgcagccacgtaatcgagacaagtccggatacgcatcactttatttaactcttcgtccgaaagattcttatagagcatgacaagattattacgaaaattcaaaaaagtcttgcggggattctcctttttcagagttgcaccaccgacgtgatagaccgtactttgaggaatgcaaacgatttcccgaccacgggaacgtagtcgccagcataaatcaatctcttccatgtgggcaaagaaacgtccgtccagtccgcccgcctcacgataatccgcatgacggataaacagggcggctcccgttgcccagaaaactggcaggatcgtatcatactgtccctcatccttttcaaccactcccattatacgcccacgacagaacggatagccgtacttatctataaatcctccggctgctccggcatattcaaaatactctttttgccgctggctacggattttcggctgacaggcagctacctccggatggccatcaagataggagatcatcggttcaagccaatgttcggtcacctcaacatcagaattcagaagtaccacatactccgcttctacctgctgcaaagccaggttatatccatctgcgaatccatgattctgatccagcacaatgatccggacacaaggaaattcttcccgaagcatttccacagaagcatccgtagagccattgtcggccacacagacttctacttcttcgctcttcgaatagcggatcacggacggaagaaaagtacgaagcatatcgcacccgttccaattcagaataaccactgacactttcatccttaccccctttcacattcagccttagaagctttccaacgtttatgagaccacagccaataagccggttccctgcgaatcgtctgttccagataatcagcaaacatttccgtaatttctccttcacccgtctccttcggtttctctgtcatcagcttaaactcagctacacaataccctctgccgggttttgtcagatcacaatagaacacagggaagttcatcattttcgcaatgcgctccgcaccattcagaaaggcggtttcctgccccaaaaaagtagtccagtatttttcgtttccgctgggccactggtcagtaatcagaccgacaaccatctttttgccttcacgcttcaacttgataatttcgcgtgccgtagaatgtttcggaacgttatatcctccgaagcgggaacggatgcgctggaacaattcgttcaagtatttatctttcagaggtttatagacttgcatcggtacatcacccggtttcataatagatcccatcccgatcagccattcataattggcataatgaggaatcattacgatgattccgccatatttctcggtcagttccagatattgttccgtattcttataagtcatccgcttataaaggtcttcgggtgacatatgaagcattttcaagtcttcaagcatatagtcggaaaggtaacgatagaaacggcgttcgatctgcagcctttctttcttgtctttttcgggaaatgatttcttcagattctcccgtactactttccggcgatacctccctatacggtacatcaacaggtaattgaaatccgaaagtaaatacaatatccggaagggaagcgccgaaaacagccacatcccgctatataccagccaatagataaatctagacttcataattcatcagaattgtgcctttaagcgctgtcatatcttcattaaattctcccagtcggacgttaatcatctgattgtccaatgattcgtcattctccacttctacgcggatatagttagcggtaaacccgtgcatcggcgtacctgcttttgatttttccatcaatacctgcatggtctgcccgatgtgacgggtatagaaagcccgtgtcttttcatcagaaagtgtcagcaagcgctggctgcgctgatgtttctcttccggcgaaaccacataatctatcttcagggcctgcgtccccggacgttcggagtagctgaacacatgcaactgtgtcacatccagtccggaaataaactgataagcctgttcaaaatactcttccgtctctccgcgagtacctacaatcacatcgactccgataaaggcatccggcatcacttccttgattttctttactttagaggcaaaaagagccgtatcataacgacggcgcatcaatttcagcacttcatcgcaaccggattgcaacgggatatgaaaatgaggcataaatctacgggaacgggaaacgaactcgatgatttcatcagtcagcagattgggctcgatagaagaaatgcggtaacgttcgatgccttccacctgatccagcgctttcaccagatcaaagaaagtctcaccggtagtcttaccaaaatcgccgatattcacgcctgtcagtacgatctcttttccgccttcggcagcagcctgccttgcctgctccaccatagaggcaacagtaccgttacggctgcgtccacgggcaaaaggaatggtacaataagaacagaaataatcgcatccgtcttgtactttcaggaagaaacgagtacggtcgccccgtgaacacgaaggagaaaacgaacggatatctttggtggtggtagtaaatgcctctccctcttcatgcttatggaggtcgccgagatactgcaacaagtctcctttctgctcggcacccagcactacatctactccttttatctttgccacgtcgccgggtttcaactgcgcgtaacatccggtcactaccacaaaagctccgggatgctgcttgaccaaccgatgaatagcctgacgacatttcttgtctgccatctccgtcaccgaacaagtatttactacacagatgtctgctttttcccctttacgtgcagtccggactcctgcctcccgcaggattttgccgatagttgaagtctctgaaaagttcaatttgcagcctaacgtataataaacggctgtcttattttgaaatacagtggtatctatcataatctgttataacgcatatttcctgcaaagttacacattattattagtaaaacactttaggatacgaaagtttattcc

SEQ ID NO: 525 - DNA, 15116 bp, unidentified
  source 1..15116: mol_type = unassigned DNA
atgactttttcagagtttgtcatttctgtccgcaggaaacttaaactaagccaaaaacaattggcaactgcaattaatgttagctactcaactattaaccgttgggaaaatggtcatgttgtaccaagcaatttggcggtaaagagtttttatgatttttgcgaaaacaatttcatcgatgttcctgatggcctgttatgacactgcttgccatttatcattggaaatattaggaggtaaataattatggcaagagcagatttgttatgtgaattaataaaatacggtttaataaatgattctgcgagttttaggaaagccgcagaagcattatgcgcagaagaacgtgcaaagcagcacactgtacttgcaacaaaaattgatgaattattaaaaaattcgcgcagaccaactgcaaaagaaaatatgacttcgccagcgattattcgtggtggtatgaatgaacaaagcttattttccgaaaaggtccctcgaaagagattggaccatctaattcttccagacaatgttcggtcagcttgtcaagatttaattatagagcaaaaccgttctgatttgctgcaatcatatggaatagaacctagaaataaaattttattaattggcccacccggaaatggtaaaacctcgttggcagaagcaatagcagaagcgttaatggttccactccttacggttagatatgagagtatcattggctcctatctcggcgaaacagcatccagattatcgaaattgtttgagtacgctaaaacaagagaatgtgtcctgttttttgatgaatttgagacattgggaaaagaacgtggcgatgttcatgaaacaggtgaaattaagcgagtcgtaagttctttactgatgcagattgatgctcttcctagttatgttgttgctattgccgctacaaatcatgatactctgcttgataaagcagcatggcggagatttcaaatccggcttgaaatacccagaccaacccgaagtcgtttggaagagtattatcgcttttttgaaaaagaaaaagattttaagtttggcctgcaaccaagcacactggctaagaaaactttaggtataagctatgcagaagcagaggaattcgcactctcagtttatagacagtatgttttaaatctgccaaatgataatgtgaaagagattactgagagagcaattcatagttggcaatctcaagtgatcgtagcacataaagatcagaaaggagtagaaacatgccagatagacctttaatactgtttccgtctccagagcatgcggatcgtgaacacaaaactcctgtttttaccagaaccattaaaccatctttcggaaggcaattcattagattacagccatcctttagtgtgctcaaaaccgcttttgagaaaaaggcactgaagattcaacagtctccaactggaattaatcctgagtttgcattggtttttgaaataattggaacggtcgatagtttttataccgcagtcaagcacactgaaggttttgaatggatttttgatagcgaatctgatccgtttgaaccggatgatgatttctatcaaatcaataaagactctgggcaaagagttgatgattttctaaacggaaagctatattgcgtaatgtccaaccagcaggcaatgcttcaattactatcattgtggcaaagataccaaaatggagaggctgacgtattcaagagaaatttcacgggactccgtgatatttttactcacataaagaacataaggaaatgggaggcacaggatagaattgcagaaacgcatgctgtggagtactggcgtgagtctttggaattcgacggtaattctcctgtgccatttgaaatcgaattattttttagaaatgatgcaacaaaacgaaatattgctactgaaactattcgccgagaaattcaatcattaggcggtcgtgtgattcaaaattgtataataagtgaaatttattatcacggcatgttagttgaacttccgagaatttctattgaaggtttagttgatcgatacgaagaaattgaattatcgcaggttgacgatatcatgttttttcggcctacatgccaatctgtgtttgtttcgacaactgattccgagagttatgttgctaacgaggaagatgtaccattaccaaggggggatgctgttgttgctgtttttgacggtatgccaatgcagaatcaccacctactacgtggacgagttatcattgatgatcctgatgactacgcttcgggatatgaaagcaaaaatcgcattcacggtacatcaatggtatcacttgctatttacggcgacctcaagagaaatgatacccctattagtagtcctgtttatgtgcgtcctattctccgaccaaagcaaagcggatttgataaagtaacagaaagtgttcctgatgacagcttatttattgatgttcttcatcgggctgtaaggagaatgatggaaggcgatggcgaggaaagcgcaactgcccccaataccaaagtaattaatctgtccattggggatcctgttcggcaattggctgtcacaatgagtccaactgcgcgattgcttgactttctcgcttataagtacaaaattctgtttattataagcgctggaaatcatccagaggtcgtaaactttgtaggcaaatcattcgacgagctaaaatctcttgatatgatacagcgaagcaaagtttttggtggaatcattaaggataaccaacgcaatctaaaaatacttgcaccagcagaaagtttgaacggactgacaattggcgcactatatgatgattttacgaatacaaatgaaacagagcgtcgtattttggctgtcgatagagggctaccttcccctatatctgcaattggtaagggctatcgctctgttattgctccagacttgttttactatggtggcagagagttcatcaggggaaaacataatggtgaaatcgactgggtagaatcttcgcgtgaaccgggatgtttatctgccgctccatatgggacaggcgatatcgatggatgtgctttttcatttggaactagtgatgccgcagctcaaataacacatgaagccgccaaatgccatgatgtacttgatcaagtttttcttaaccaaacaggtactaatatgccagttgattctaccgcaatccttttgaaggcgatgcttgctcatggtgcttcatggaaaccaattgccgacaaactcgcccttaccatgggtgcttcaccaaaacaattaagtaagtggctcggaaacggcatacctaatataaaccgtgttatagagtgtactaaagaacgcataacacttattgggcttggtgcactaaagaaagataagggagatatttttaagctcccacttcctgtggatttttcaactcgattaataaaaagaaggctaaccgttacattatcctacatttctcctgttgtctcaaataagcaaacatatcgcggtgcgcaactgtggtttaatattgatgacggtggaaagggtcttgtccccgaccgacaaaatacggaatggcaagcagtccgaaagggtactttacaacatgagatttttactggagaaaattcaattgtctggaatgatgatgaccttatcataaaagtgaactgtaaagaagaagctgccaaaattaacgaagcaataccatactgtctatttgttagttttgaagtagcagaaggttttaatgttgatctgtatgatgatgtctctgcaaaaatccaccagcgtgttcagatttcaaataactaagaaacggtagtactgcggacgaaccgatgaagctatacctcagccttttggtattggactttctgttctgagtttcggtttggtttgtgatatggtcatttatctacaatataaatcatatcgcattagcacactttggagtaagttatgtatcgattgctcttattttttacaaaagtcgtgctcagttacccgttcgtcacaaaacgtgattacgacggtatgagaattcaaatgtcacctcccagacgaaaaattctttcagttgtattagttttatagtgcgctatattgcttcgtagtgaaatgcgatttattcctctagatatcgcccttcaggcagtttcgtgtaaatataatattgctcatacaaggcagagcaaaagctaaaataataacgatgaagtttttaattatttctgaattcgctggttctaaactaccataaaaatcggcaaaaacatctttttatgctcaaccttgacagaatcataaaatccgaacatcaatcggtgatacgttcggatttttgatttttattaaatattactacataaataataatagtgatttgcaaaaaatataaaaaattcataggtaagtaacatattgggtgtcgtaaacaattaacattcgcatataatatatagaaagttgttgacataacacgctgatagtgttacaataattgcattattttagaggagagattgttgcagattaaatttgcaacattacagagatgagtaacagattaaaaacaagtgaagaaaattttattaatttaaataacgctagtattgttcttgagagtctagaatcgcaagagaagggatttcaggagcaatttttgactatggtacagggcaatacttttggcggagttgatattactgattctaacatcaaaaacaactcacgatttatcatagatctttgggattgattataaaatgtcggataagaaaattaaatcagtcaattgtatgcgaattgactatgttaatataaccaacggggatttttttacaaaaaaacgactttctaaatggcgcatattcattgctaaatgttgcttggatatatgtgaaggcttaatagcaaaggtcgctccggaaaatcatgtgtcatattttttgagtgaatcactactaaatgaagtggtgggagatgctgtcattggcatgtcaaaaataattgataagaccccacaccctgtagagcatccaaatgcttttaaaatagcggcatatttaggttattggtttttaaggcataaacctataagtatattatatcctgatgaagttgacttagacaatattgatgttgcctcagggtgtaatacggatgcaaaatatttaagttggcaactcaagcatattaatgaagcggtggccgtaaatatggttacttcttttatttttgattttgacaaagaattgtgtacaagcgctcaatgtaaaaaaataaaacagcacaatacgtatgaaaaaaaaccagcctttggatttgatgattttaatcagcaaaggcaaataatgttacaaaagatgatgtattacttcgtatatagggccattgctcccaaagtgatagaacatatgcttgaggggtatgcttttcatccagcgtggtgcttaacaggtgcacattggaatactaccatattggatgatattacgcaggcaactgagaattgacgagggttttttgtggataaaagtaaaaaaataggattatgtattatcattggttttgctgtattaggtattgctggttcatcagttctgttttttgtcgaaccgcataatggcattgtaagtattatttcgttgtggtctggaattatcggaacaactgcttctgtagttcttagtgttgtagcaatggtatattctaataaatcatcccaagatgccgaagaaagtttgaaaaaagttacagatcaatataaaattttatgtgataaattaaagagtgaggaaattataaaaactcttggcaagcgtggaatagagaagatcatcgaaaacaatcaagacaagtaagtggttatatcaattagaacatagcggggctgtcgcaaatgattaaaatttgcgacagcatctttcagttatatcgcctttggtgagttatatcgtttcgcagtgctatacggcttactccgtgtgatattgcccttcgtgcagtttgggcgaatataatataacttaggcaaagcataaatattaactttcacaaagtgaaaatatcactctgccttagtcagaataccacctatcaccatgatatttattttctctggttcgaaactaccataaaaattgccaaaaacatcttttttgcacaaccctgacaagcttaaaaaacgccttaaacattgaagtttagggcgtttttcttttgcgttcagcagagataaaacccctctgaaaatctgtttgtctaacataacgctaactaagcaggctcaatgtcaatagttgggataacccgaaaaaacgaaatatatgaaaattaggctcaatgtcaataaataggggtaccccgataaaaacagagccactgcatctaattcgaattgttttgtgctgtttagatacctaacattagcggatatatttccgcaagatacagccaagcatttgcagcagttgtgcgtataatttaaactgctgcaaaagtcatcaaacaagccgttttttaagccgttcgcttatttccttgacatcaaaactacagtttcgatgtggcacggttgttcaacgaaaaacatactcaacccctattgtacaagggaatggcggaacgcacctttttccttaaaatccagtggttcgagcctgtgacaaccttgaattgtcctataatttgtataggcaaacagggtaaagctctgttccttaaacttcatttttcatgtcatccatacaaattggaagttgcacttcctcactcgtcttcttttttattgtttctactaatattcgagcttaacaataaaattccagagcataaaaataatacccaaattataatattttcttgatttatcgcattataaatcaagcatattatgcttaatataatctgtacaattgaacaaatcactcctattttttgtgtctttttatccatcattgtctcctccataaattccgatttatctaatttctattaacatctatttcactgttcatgaacccctcaaaacggtcgaattgcaggattgcctgtcagctttttgttctataaaattctctccaaacaccctgacatctaatccactcactcaatttgcattatctaatccgaggttacaaccttgaattgtcctataatttgtataggcagacagggtaaagctctgttccttaaacttcatttttcatgtcatccctacaaactggaattgtatcatcatttatctttatctttttttgaaaaaataagactgccggttataccaaaagatatacccagacatattccgattccaattccagccatgctatttaagacatttataaaaacaacactccaaagtattgctgcgattattccgatagtgactcctataattatcctcttgttgttcatcagctttatcctccataaattccgatttatctaatttctattaacatctatttcactgttcatgaacccctcaaaacggtcgaattgcaggattggtcgtcagctttttgttctataaaattttttccaaacaccctgacatctaatccactcactcaatttgcattatctaacccgaggttacaacctgaaagaaattttgcgttggatatgtttcgataagatatacccgagtgcttttgatggttaaatatataattttagatttagaaaaagtcatcaaacaagccgaattttatattgcttaattattttcttgacatcaagactaccgtctcaatgtgtgcggtgtggggaaacatatctacgggttggattttttgggctttgtaggggctgttttgggttaggtaggctaaatctcttgccaatgtttcggggttgcaggaaacatagacaacctttttcggagacattttgattagtgagtcgagaaattttcggtcacttccggctcttggcggatccatgaacacaacatcgggcttttcgtcctcgtctgcagcttctctcatgaactcgcccgcatcggctttgtagaaacggatatttttcagattatttgctcttgcatttacgattgcatccctcacggcatcgccgttaagttctgcaccgataacattgcctgcgccgtttttggcggcaattatgccgattgtgccgattccgcagtaggtgtcaagcacggtttcgttgcctttgagatttgcaaattcaattgctttgccgtacaaaacttcggtttgaacggggttaatttggtaaaagcttttcggcgaaattctgaacctgcaaccgcagagaatatcctcaatataacccttgccgtacagcactttctgattgtcaccgagtacaaggttggtgcggtaggggtttatattttgcacaatggttgtgatttcgggaaactgtttcagaatcgcttttacaaaattgttttttgacggaaaaacaggtgtacctgtcacaagcacaagcataatctgatttgtcgcaaagcctcttttcacaagaatgtgacggagaaaacctttgcctgtgtcctcgttataggttgtcattctgaaagaggggaggagcttgcgtactgcaacgatgattttgtcggcaataacatcctctgtctgacagctgtcaattccgacaacatgatgactgcccgactgatacacaccagaaatgattttgccctttttgtccgtataaaaagccgcctgaaccttgttgcggtagtggtagggagttttcattccgataattttttcaacggtgcaaaagcgtttgagaagtttttcgactttcttctgcttgaattcaagctgttcgggatatgacagattttgcagttgacaaccgccgcattttttgtaaacgggacagctttgtttattggtttcaggtctgttactcataatatttcctcacattttattgcattgtatatatcctttattttatcatcaatcatattgatatgcaacagaaacaaaccctaaatgacaaagaaaaacgcaggagggaaatccgctcctgcgctttctgattattaaccggtatatcgaaaaattgaggattatcaggttatttgtaatcaattaaagatttgtgtatcccataaggctttcgtcaacctctttggcaacatctctgccctcacgaatcgcccagacaacaagtgactgtcctctgtgcatatcgcctgtaacaaatacattttcaacatttgtcttgtgtgagccttctgccgttgcaacattggttcttgcgtttgtttcaacaccgaatgccttggttacatagttttcactgccgaggaatcctgccgcaatgagtacgagttcaacatcaaccttgtattctgagccttcaacctctttcatcataagtctgcctgttttagcatccttttcgggtttaagcttaacaagctccgcacctacaagattaccgttcttgtcagcaatgaactgcttaacggttgtctgataaactcgtggatcgtgaccgtaaacttcaatagcctcttcctgaccgtagtctgttttgcagactctcggccattgcggccatgggttatcggcacttcttgtgtcgggaagcttaggcatcatttcaagctgaagaacggattttgcaccgtgtctgatgcttgtgccgacgcagtcgttacctgtgtcgccgccgccgattaccattacattcttgccttttgcgctgatgaatgtaccctctctgaggttgcagtcaagaagtgactttgttgttgatttgaggaagtcaacggcaaagtgaatgccgttagcctctctgccgggaactttgatatctctcggatttgatgcaccgcaagcaaggattacacggtcaaagtccttgagaatttcgcttgccttgatgtctttgccgacatttgagcaggtttcaaaggttacgccttcttcttccataatgttaatcttgcgttcgataacatctttttcaagcttcatattcggaatgccgtacataagcagaccgcctactctgtcattgcgttcaaataccgttacagagtgaccgcgctgattgagctggtcggcagcggcaagtcccgatggacccgaaccgatgattgcaattttcttgcctgttcttacctttggaattcttgcgtctgcaagaccttcttcataggcattttcaatgattccgtattcgttggctcttacgctgacagcgtcaccgtttgcaccgcaggtgcatgccttttcacagagagcaggacatacacgggatgtgaattcggggaagttgtttgtaactttaagacggttgtaagcctgttcccagttgcccttgtagatgaggtcattccattcgggaatgaggttgttaagcggacagcctgagaatgcagaaccaatctgcattcctgcctgacagaaaggcacgccgcagtccatgcatcttgcaccctgtttttgctgatcctctttgctgaggggatcgtgaaattcgtcaaaatttttgattctttcttttacggagtatgccggggcatcctcacgcttatattccataaatcctgttggctttcccataaatatcccctccttatttattattcacaatttcgtagaaagcttcaatctgtgcctgctcgtttgtaagacctttttcttcataagcggcaattgcagccatcattctcttgtagtcgtgcggaataatcttcttgaatttcggaagatactcgtcaaagttatcaaggattttcttgcctctctgtgaacctgttgctgcaacatgttcttctataagcgttttgagttcgattatatcgtacttttctgttacctcagagaagagaaccatttctttgttgagctttgtgtaaagatctctttcttcatcaagaacataggcaacaccgcctgacatacctgcggcaaagtttttgcctgttttgccgataacaacaacccgaccgcctgtcatatattcacaaccgtggtcgccgacaccctcaacaactgctgttgcgcctgagtttcttacgcagaaacgctcgcctgcaacaccgttgatgaatgccttgccgcttgttgcaccgtaaagtgcaacattaccgatgatgatgttgttacctgcgtcaaatgttgagttcttcggaggataaactaccagcttaccgcctgaaagtcccttgccgaagtagtcgtttgagtcgccaacgagttcaagtgtgagtccctttggaatgaatgcgccaaagctctgaccgcccgaaccgttgcagactactgtaaatgtatcgtcatcaaggttgttgtaatgctttcttgtaacctcagaaccgaagattgtaccgaatgaacggtctgtgttcttaacattgacttcaacctttttctttgtgccttttgcaagaacctttgcaaattctttgcagaggattctctcgtcaagtgttgattcaagtttgaaatcataaaggctctttttgttgtattcaaccttttccgaaacaaagtttgtatcaagaatgttagaaaggtcaacctcggcagcctgtcctgtgatgccttcttttctcttgatgaggtcaattcttccgacaagctcatcaacggtttttacaccgagctttgacatatattcacgaagttcgcttgctacaaacttcataaagtttattacatattcgggcttgccacagaatctttttctgagctcggggttctgtgtggcaacaccgaacgggcaggtatcaaggttacatactctcatcattgcacaaccgagagttacaagcggagcagttgcaaaaccgaattcctctgcaccgagcattgctgcaattgcaacatcacggccgttcataagcttaccgtcggtttcaataacaaccttgttacgaaggtcgttcataatgagcgtctgatgagcctcggcaagaccgagttcccacggcagacctgcattgtagattgagtttctcggagcagcgcctgtaccgccgtcataacctgaaataaggattacgcctgcacctgcttttgcaacgcctgcggcaaccgtacctacaccgcattccgaaacgagcttaacagagattcttgcgtctttgttagaattcttgaggtcgtagataagctgtgcaaggtcctcaattgagtaaatgtcgtggtgcggtgggggagagatgagcgatacacccggtgttgaatgacgggtttttgcaatccagggataaacctttttgcccggaagatgtccgccttcgcccggctttgcaccctgagccattttaatctgaatttcgtttgcagatgtgaggtatcttgatgtaacaccgaaacgacctgacgcaacctgcttgattgcagaacatctgtcaaccttctgtccttttgtgagaagtctttcaaggctttcgccgccctcaccggagtttgacttgccgtgaagctgattcattgcaatcgcaagtgtttcgtgagcctcctgtgagatggaaccgtaggacatagcgcctgtcttgaaacgctttacgattgaatcaacgctttcaacctcatcaagcggaacaggagtttctgcaaagttgaagtcgaaaagacctctgatatttacaggatccatttcttcggaaatcatatgagaatactttttgtaaagctcatagtcgcctgttcttgttgcctgctggagcatatatatagtctgcggattgtagaggtgttcttctttgccgcttctgaacttgtgtgaaccacgggattcaagctcatcgcttacaccgaggtcaagcggatcaaatgccgctgtgtgaagtttgtcaacattctcttcaatatccttgattgtgataccgccgattctgctgactgtgcctgtgaagtattcgtcaataacatccttgccgataccgatagcctcaaaaatctgtgagccctgatatgactggattgttgaaatacccatttttgacgcaatctttacgatgccgtggagaactgcgctgttgtaatcgtcaactgctgcgtagtagtccttgtcaagaaggtcatcaccgataagctcgtgaattgtttcctgagcaagatacgggttgattgcacttgcaccgtaaccgagaagtgttgcaaaatgatgaacttctctcggctcaccgctttcaagtatcattgcaagtgaagttctcttctttgttgcaacaaggtgctgatgaagagcggatactgcaagaagtgacggaattgcaagatggttttcgtcaactcctctgtcggagaggataagaatatttgcaccgtcattgtaagccttgtcagcttcaatgaaaagtcgcttaacagcctttgaaagtcttgtgttcttgtagtagagaatcgggataaccgcaaccttaaagcccggaatgtgcatattcttgattttgagaatatcggttgatgtaagaatcgggttgtgaatcttcataaccttgcagttttcgggacgctcctcaaggatgttgccgtcctcgccgatataaattgttgttgatgttacaacttcctcacggattgcgtcaatcggcgggtttgtaacctgtgcaaagagctgtttgaagtagttgaaaagcggctgcggttcttttgaaagaactgcaagtggactgtctgtacccattgcggcaattgactctgtgccgttctttgccataggaaggattgatgtcataacatcttcgtaggtatatccgaaagccttctggagtttttgtctttctttatatgaatgctcctcaaccttcatattaggaattttgaggtctttaagacaaacaagattactgtcgagccattcgccgtaaggctgttttgacgcataatactctttaagttcatcgtcatcaatgagtctgccctgaaccgtatcgacaagaagcattttgcccgggcgaagtctttcctttgtaacaatctttgcgggatcaataggaagtgcgccgacttccgatgaaagaatgaggttgccgtcattcgtgatgtaatatcttgacggacgcagaccgttacggtcaagaaccgcacccataatatcaccgtcagagaaaaggattgacgcaggaccgtcccacggctccatcattgttgcataatactgatagaagtcctttttcttctggctcattgtgccgttattatcccacggctccggaattgtaatcataacggcaagaggaagctccatgccgctcattacgagaaattcaagtgtgttatcaagcattgcagagtctgaaccctctgtgtttacaacaggaataaccttgtcaaggtcgcccttgagatgctccgaacgcattgtttcctcacgggcaagcatcttgtcagcgttgcctctgattgtgttgatttcaccgttgtgaacaatcattctgttaggatgagctctctgccagcttggatttgtgttggttgaaaaacgggagtgaaccatagcgattgcagactcgtaatcatcgtcctgaagatcaaggaagaagttacggagatcgccgacaaggaacatacctttatatacaatagttctgcttgaaagcgaaactacatatgtgtcttcattactctgttcaaaaactcttcttgcaacatagagctttctgtcgaacggaagacctctctttacgccgtgaggtcttttgataaagcactgcataattgcaggcatacattcaacagctctgtgaccgagtacctcgggctttgacggaacatttctccagccgagaactgtaagaccttctttttctgcaatgatttcaaacatcttctttgcctgatttcttgcaagctcattctgagggaagaagaacatacctacagcgtaatctctttcggaaccgagcttaatgccgatttcagcagctgccttcttaaaaaatttgtgtgaaatctggagaagaatacctacgccgtcacctgttttgccttcggcatccttacctgctctgtgttcgagagtttcaacaattgtcagagcgtttgccacggtgtcgtgtgacttgatacccttaatattaacaacagctccgataccgcagttatcatgttcaaacttcggagaatacagagtcttgttgttctctctgactgtctgttccat

SEQ ID NO: 526 - DNA, 7450 bp, unidentified
  source 1..7450: mol_type = unassigned DNA
atgaaatcatttcaaaagcttccgccgcagtttcagtgtgccgaagtaaaagaatactatgacattctctgcaaaaaacagggaagttttgttttaaagcgaattcttgatatttttgcttctgttattcttcttgtgtttctcatcattccgattgcaattattgcgattttagttaaaaccgactcaaaaggtcctgtgttttacagacaggaaagggttacaacctacggaaagaagttcagaattcttaaattccgtacaatggtaacgggagccgacaggctcggaacacttgtcacaaccgacagcgactcccgagttacaaaaacaggaagagttttgcgaaaatatcgtcttgacgagctgccgcagattttcaatgttctttcgggcagtatgtcaatagtcggaacccgtccggaggttcagcattatgtagatatgtacgaacccgaatatcttgcaacactccttatgcctgccggaataacctcgttggcatcaattatgtataaggatgaagaaaagctgttgaaaggcgagatagatgttgacaaggtttatgttgaaaaaattcttcccgaaaaaatgaagttcaatctttcatatgtcaaaaatttcagctttggttccgatataaagctgatgttcaaaactgtaaaagaagttttcagctgatttcgttttgattggagtattcagatgaccgattttaaacaaaagctcagaggatttttttccgattcatcgctttttagaagaatctacattatagatttgttttttacaaacattgcgtttctccagattcctgcgtatgtacttcttgtttttctctttatatggggtgtatgcctttcggtatataatcaaagacataataatactttttttaaactgcgcttcggaatatggatcggagcatttcttgccgtaacggtatttacgatgctcatcaatttttcacagacatttctttacagccttcttatgcttctgcacgttgtaatgtgtttttttcttttttacggaatgcacacagagcctgaatttgattacagaatagagctttatcacattgcaaaattcataatgtacgcaaccacggtaatgaacataatcggtataacctgccttatgttcggctttaaatttgaatggtactggattaaatttaccgtttacgaaaacaggttcaccggttgttatgtcaacccgaatctcctcggcttcatatctgtggtgtcgattttctgttgccatatactttcaaaagggcattttatgcgcagaattgccgaaaaaattcctgaacccggcatcagtaagatatggattgtagcctgtcttgccacaaatgcgttttcgctcattctgtgcgattcaaacgcctcacttgtgcttgctctcggatatgcaattgtttatatagtttatatgttctttgccgacaaggcgggactttcaccttcaaaaattattttgaaaattacagcgctgtttcttgtgggagttttccttacaggctctgccttgatgttcagaacgatttgtcaggaaggcttttccgttgttgtatcaaagacaacctctgttgtcgatttgcttttaggcaaaaccgaaagcgaacttgtgcaggaaggactgactcccgaacagagagaacagcttgaaaaggataaaatcaccttttcacacgaaaacaaaaacattgacagtggaagaaagaagctttggcttgaatcaatcaatcttttcaaactgtcgccgattatcggaatttccaacggaaatattgttctctacagtgccgaatattcaaacggtgctttggaatattcgtatcacaaaagtgatttgcataacggctttcttacaattcttgtttcaactggtgtaatcggttttgttcttttcggaattttcggttttcgatttgcaaaacactccgcacagcacctgtttttgcagaaaaaaacatatcgtgatgatgtttatccctgtttgtttgcttttcttttcgcatatttgatttttgcctgctttgaaaaggcattgctttatgacatatcgtttatggtggtgtggttctggctgattatgggatatatgagttgctacatcacaaagtttgaaccgacgcttgaaagtcagtatctttttcacggaaaaagactcagacgggtaacaagaacaatgctctgatgcttgtataatcggaaaatttgatgtataataaccgtaggagcgttttgcttctgcggttattattttgtgaggtataattttatgaaatacggtttcatcaaggttgcatccgcaacaccgaaaatcagggttgcagactgtaaaaccaacacaataaatattattgaacagattaaagaggcacacaaaaacggtgcgtcactggttgtgtttcccgaactttgcgtaacgggctacacctgttccgatttattttatcagcgtgttttgcttaatgcggctgaaaaatcagtagagaaaattcttaaagaaacagcagaccttgacataatctcaattgttggtgttccggttgcaattgaatcggcactctacaattgtgccgcagtaatttataagggcgatatccttggtattgtacctaaggtcaacatccctaactacagcgaattttacgaggttcgtcattacacaagcggaaaaaatctttacgatgaaatttcatatgcaggcgtcgaaaccataatttcagacaatattgtgttctgttgtgacaaaatgcgtgatttcagctttggtgtagaagtttgcgaggatttgtgggttgccgcatctccgtctgttgaacacgcaaaacacggcgcaactataatctgcaacccgtcaacatcggatgatgtaataggcaaggcacagtatcgccgtgaccttgtaaaaatgcagagcggtaagctttgttgtgcatatatttacagcgattcgggctttggcgaaagcacaacggatatggtattttcgggacagaacataatctccgaaaacgcatctctgcttgcagaaagcaagcgctttacaacaggcattatctatgccgatattgatgttcggaagctttcggcagaacgcagaaagacaaatacttttacaaaaagtgatgacaataactttacctcggtatattttgatatgccgttaaaacataccgaacttactagagagttctctcagactccgttcattccgtcaaacaaatcagatcttgatgcccgttgtgaggagattataacaatgcaggcaacaggtcttgcaacaagacttgctcacacgggaattcaaaatgcggttttaggactttcaggaggtcttgacagtacgcttgctctcatcgtctgcgttcatgcttttgatatgctcggtattgacagaaagaatattcatactgtaacaatgccgtgtttcggcacaacaaagcgtacaaaatcaaacgcacagcttctggctgaggcttacggagtgtcttttgaagatatcaatattacaaaagctgttcgtcagcattttgcagatatcaaccacgatgaaagcgttacaaatataacctacgaaaactcacaggcgagagagagaacacagattctcatggatctttcaaacaaatataacggtcttgttatcggcacaggcgacctttctgagcttgctctcggttgggcaacctacaacggtgaccatatgagtatgtatgccgtaaatgtgtcaattccgaaaacccttgttcgctatcttactgcctatgaggcacagcacagcgaaggcgttctaaaaactgttcttcttgatgttcttgacacccctgtaagtcccgagcttcttccaccagataaaaacggcgaaattgcacagaaaaccgaagatgtggttggtccttatgaactccacgacttcttcttatattatttggtaagatttggctttgagccgaataaaatatactaccttgcaaagaaatcatttgcaggaaaatatgacaatgccacgatcaaaaagtggctcacaacttttgtcagaagattctttactcagcagttcaagcgttcatgtctgcctgacggaccgaaggttggttctgtaacactttcgcctcgttcagactggagaatgccgagtgatgcgtgtgtaaatctttggcttgaaaatcttgaagaagattaagaaataaaattttgacggtgattttatgaaattgtttattacacgagatgtatctccgtccgatgtttgttttctgattcgtgatgaattgggcagggataaatatactgctgttatgaaacgcagaaagagaagtatgcgtggtgttgtcaacaacattgtaagacttaatattcttgatgagaataaaaaccttgttgcaagacttcgacagttgcccgttgcaggagtaaattcatttactctaaaaacagacaaaacagcggcaaccctcgtggtgcttatgaccaataatatggttcaatgcaggttctacggcaataattggagaattctcggtgatgtaatttcaaaaaatttcagcattgttgatgttgacaacgcacagatatgcaatcacatcaagcaccctttaggatgcgaacttgaaattgccgatgcgcaaaacgaattgatatgtttgatgaccgccttatgcgtcaatatgataaatacagttgacaagcgagaggtacaggttgtataatctatgtgcagacagttcccaccgctaaagccatgtgaactgccacagagcaagcaaataacagtgcaaacagcgcagataaatattaaaaattgaaattgtcaaagcgacatcctttgatgtcgctttttgcaaattcagcttgcaacgcaaaattttgcgtttaatatattctcagggaggaataaatatggacaaattattaaagcttttaagtgaaaattccggttttacaacagcggaaatagcggcaatgctcggcgagcctgaggattacattaaggcgcagattaaggaatacgaaaattcgggggtaatcaagggctatcaggcagtcgtaaactgggatatggttgacgacagctatgttgaggctttaatcgaacttcaggtaactcccaaaaaggaaacaggctttgacgaaatggcagaactttgcatgggctttgaagaggttgaatctctctatcttatggcaggtacatatgactttgctctcattgtaagaggggagtcaatgcaggatatcgcaatgtttgttgccaaaaagctttctacaattgacggtgtgctttcaacgggtacacactttattatgcgtcgctacaaggacagaggagcgtgcctcttcagcgatgaagagaagcgtgacgggaggcatttaattctgtgatagattacaataattttattaataaaaagatttcaacggtaaaaccttcgggtatccgtaagttttttgatatagctaacgaaatggacgatgtcatttctctgagtatcggcgaaccagatttccagacaccgtggcacatccgtgaagaaggtattaacagtctgaaaaaaggtaagacttggtattccccgaacagaggctttgccgaacttcgtgaagaaattgcagcttactacaaaagaagattcggtattgagtatgatgccaaaaagcagacgcttgttactgtcggcggcagcgaagcaattgaccttgttttcaggacattgcttgatcctggtgatgaggttatcattcccgaaccttcatttgtttgttacgaaccgcttacggtgatggcagacggcgtgcctgttattatcaacacaaaaaacgaagataatttcagacttaaagcgtcagaccttcgtgccgcaattactccaaagacaaagcttcttgtacttccgttcccgaacaacccaactggtgcaattatggaaagggaagatcttgaagaaattgcagaggtaattaaggaacataacatttttatcctttcggacgaaatttattgtgagcttacatacggcaataagaaccatgtttcaattgctgaaatcgacggtatgtatgagcgcaccattgttgtaaacggcttttcaaaatcatatgctatgacaggctggaggcttggttatgcactcggtcctgttcctgttattgctcagatgacaaagctccaccagtacggaattatgtctgctcctacaaccgcacagtatgctgctattgaggctttgcgcaacggtgacagggatgtagagatgatgcgtggcgagtatgatatgaggagaagacttgttgtggacagctttaacgcaatgggactcacctgctttgaacctttgggtgcattctatgtgttcccgtgtatcaaaagcacaggccttacaagtgaggaattctgtacaagacttattgtggacaagcatgttgccgttgttccgggtactgcgttcggcgaatcaggcgaaggctttgtccgtgtgtcatattcatattctatcaagcatcttaaaattgcgcttgaaagaatcaaagagtttcttgatgaactgaaaaagggttaaaatatggaagtaaaagttcttgctcctgcaaaaataaatctttctctcgatgttctttcaaagagagcagacggttatcacaatatttcaactgttatgcaggccgttgatttgtatgatacaatcacaattacagacaatgaaagcggcacggtgacaatttcatgtaactgtgagggcgtgccgtgcgacgattcaaacatttgtgcaaaggcggcttacaagttctttgattattgcaaaacggatgttaagggcattcatatcgacattgacaagaaaattcccacacaggcaggtcttgccggcggaagcagtgacggtgcggctgttattttaggcttgaacaatatgttcggaacaatgctcaagccggcagagatgagagaaatcggtgaaaaagtcggtgcggatgtgcctttctgccttgagggcggaacaaagctttgcacgggaataggcactgcaattaaaaaagttgcctcctttcgttgcgacagcattgtaatctgcaaacccgacacagtcagcgtgtctactgccgatgcgtacaaaaaggttgacgcactcaatcctcacgcctgctataccgatgaaatggtaaaggcactgttcagcagagatatgtttatgatttcaacaacaatcttcaatgactttgaacttgctctgcaaattccggaagttaatgaaatcaagggtattatgctcaagtcaaaggcaaggggagcaggtatgagcggttcgggttcagccgtgttcggtgtgttcacttcgtcacgcagagccaagaagtgctatgacaagctttgtgaaagctacaaagaagtttttctctgcaagcccgtttcagacggttgcaaggtgctttga

SEQ ID NO: 527 - DNA, 25598 bp, unidentified
  source 1..25598: mol_type = unassigned DNA
tataaaaacagaatattccgagctgatgcagaagtcctatatagattactccatgagcgttatcacagcaagagcgcttcctgatgtaagagatggacttaagccggtacaaagaagagtactgtatgctatggatcagcttgggttaaactatgataagcctcatagaaagtctgcacgtattgtaggtgatgcaatgggtaagtatcatccacatggtgacagctcaatctatgagacacttgttgtactttcacaggatttcaagaaaggcatggcacttgttgacggacatggcaactttggttctatagaaggtgatggagctgctgctatgcgatatacagaggccaagctaaagaagttcacccaggatgtgtatttatcagatcttgataagaatgtggttgacttcgtacctaactttgatgagacagaaaaagagccagcagtgcttcctgtaagagttcccaatcttttagtaaatggtgctgatggaatagcagtaggtatgacaaccaatatccctacacacaatctaagtgaggtagtagatgcagtgtgtgcatatatggataatgaggatataactacagatgagcttatggagtacatgccaggtccggactttccaacaggtggactggtcatcaacaagtcagagctttctggtatatacgagacaggaactggcaagataaagctaagaggaaaggttgtttttgaagcagcttctaagaagggtgagaaggacaggcttgttataacagagattccttatactatgataggtgctaatatcggcaagttcatatctgatatagtagaacttgttgaaactaagaaaactacagatatagtagatgtatcaaatgagtcatcaaaagagggaataagaatagtacttgagttaaagaaaaatgcagatgtagagaatcttaagaaccttctttataagaaaacaaagcttgaagacacatttggagtaaatatgcttgctatagtggatggaagaccagaaacacttggacttcgccagataataaagcatcacattgatttccagtatgaaataaacacaagaaaatacacaacacttcttaacaaagagcttgctaataaagagataaaggaaggtcttataagggcatgtgacataatcgaccttatcatagagatacttcgtggaagctctaaccttaagatggcaaaggactgccttataaatggtaatgtagaaggcataaagtttaagtcagaagcatcaaaaaaacaggcttcaaagcttgatttcacagaaaaacaggcatcagcaatacttgaaatgcgtttgtacaagcttataggtcttgagatacttgcacttcagaaagaatatgatgagtgtctagcaaagatagaaaagtatgagaagatacttggcagtaaaaaagctatggctaaggttataaaggatgatcttgcaaggataaagaaggaatatggagttgcaagaaaaacagttataacagatgcaaaggcagctgtgtttgtagaaaaagaaattccagcacaggaagtagtattcatcatggacagattcggttatgccaagactatagataatgctgcctatgagcgtaacaaggaagctatatacaacgatttcaagtatgtattcacatgcatgaatacagataagatatgcatatttacagacaacggacagctccatcaggttaaagtaaaggatataccttactctacaaagttcagggataagggaacacctatagataatcttgggaactatgacagcagcggggaactgatcatctatctgtgtgcatatgatactattaaggatcagaagcttcttttcgttacaagccagggcatgatgaagatagtagattctaaagaattcgatgtggcgaaaagaacagtagccgcaaccaagctgcaggatgatgacaggataataagcatagagaaagcagatatagaggtacagacatactccaagttcaatctggatggtactacaagtgaagttgaagatattgtcagcagcaagaacgttgttgtacagacagctaatggatatttcttaaagttcccactctcagagataccagttaagaaaaagagtgctgttggtgtcagaggtatcaagcttggcaaggatgattatatagaagaaatattccttatggatgatggaacagaattcaccatggaatacaagggaaagaatatagactttgcaaagatgaagatggcacacagggatactaagggagttaaggtgagagtgtgagagtgattctacagggagtatattcgcgaagaataaatattcagcatagattagtatatcaggtatacaatcagccagttgtaattaatgaaactgaatatgagggaatcattaaagttattagaatgtggacacattatgataaagtaagataaaaaagggcatcagtagaaagaacattatttattctttctactggtgccttttaaagtcaacctccaaaagttaatcctaaaaaatcaactcacaatttttaatgataaattctgtgcaccctgcaccattgataagaaatattcatgtattcttgtgtcatctgttaactcaggatgaaatgcaagcccaatctggtttttatatctggctgctacgattttgtcatcaacagaggcaagcacttcaacaccctccgaaacactatctatatatggtgctcttataaatgtcataggataatttccaatatgtttaatatcaacgttagtcacaaagcttgaaagctgtcttccgtatgcattacgctttacagtgacaggaagagttcctatgtggacagtgtcatcatcagcgatatgtcttgcaagaagtataagacctgcacaagttgcaagagtaggaagtccgttgttaatcatacaacggatatcatccatcatatccagcttgttaagaagctgtccctgaactgtactttcaccaccaggaagtataagaccatctatcccctctaaatcatccctttgacgaagctgtttagctgtatgtccaagactttcaatcatatgagcatgctctatgaaagcaccctgtacagcaagtatgcctataatcataataatcaaaacctcatttctagcgtccacgctcttccataataatctgtatttcgctaggattgataccaaccatagcttctccaagatcctctgataatctggcgataagagcagcatcctgatagttagtaacagcctggacgatagcagatgcacgctttgcagggttgcctgatttaaagataccagaacctacgaatacaccttcggctccaagctgcatcataagggcagcatcagcaggagtagcaacaccaccggcagcaaagttaacaacaggaagtttgccgttatcatgaacgtaaagaacaaggtcgtaaggtacctgtagctgctttgcttcttcaaaaagctcatctttgtgcatagatgttatcctgcggatctctgaattcatttttctcatgtggcgtacggcctggacaacatcaccagtaccaggttcacctttagttcttatcatagatgcaccttcattgattcttcgtaaagcttcacctaaatctcttgctccacatacgaaaggaacattaaactgagtcttgtcgatatgatatatatcatcagcaggagagagaacctcagattcatctatataatcaatctctatagcctgaagaatctgtgcttctacgaagtgaccaatacggcattttgccataaccgggatacttactgcatcctgtataccttttatcatcttaggatcactcatacgtgatacaccgccagcagctcttatatcagctgggattctttcaagtgccataacagcacaagcaccagcagcctcagctatcttagcctgttcaggagtagttacatccatgataacaccgccctttaacatctgggctagtcctttgtttaattcgtattgtgaagtagttgtcataataaataacctcttttccttatttttaaatactgatatttattgtaagtccaataatgtaaagtgtgtcatgactggttgattacgctaagtaatcactaacttgtggatataatagaacttatctggatatattaaaatactcaatataaagaaaaaaagtaatgccagttgatattaaactggcatttaaatacaagaaaaacacatacaaaatgataatgtcagatgtagatgcaaaagtaaaaaagctctttcctacagtcagaaaaagctttttttatattagaaatattatgtttaagttaaagcagtattactatgagatgcacgaaattcatgaaattctcagcattacaatatatcactgccatctggtatcttagatataatcgttttgttgattcttataaagaatataagcgaaacagtgagtgatataagttcagcaataggaaatgcccaccatacagcatgtagtcctccaagcttagagagtatgaaggctgctgggataagtaccacaagctgacgcatgatggatacaagcatgctgaataccgcttttcctagtgcctggaatactgtaccacatataatacagaaccatgcgatgagataatggataccaattatacgtaatgcaggaatacctattcttaacatatcctcagatgcattaaacataccaagcagtacctgtggaataccttcaaaacataggaaacctataaaagtaagtgaaaatgcagttataaggcttagtttgatagtctttagcatacgttttctgttctgtgctccataattataagcaataataggtgttataccgttgttcagaccaaatactggcataaagaagaaactctgaagcttgaagtatacaccaaatacggctgtagctgtagaagagaaacctatgaggattctgttcatggagtaagtcatgacagaaccgatagactgcataataatagatggcacacctatggcatatatcgtgcctataatatgtgcatctggtctgaacctgtggaaatcaagcttgatttcatggttaaacttatggttacatgttccggcaactatggctgcaacacactgaccgataacagtggcaacagcagcaccagtaacacccatccttggacagcctaaaagaccaaatatcataatagggtcgaggataatatttgtaatagcaccacacagctgtgatgtcatgctgaatatggtacgtccggtagatgttaacagacgttcaaagaaaatctgtgcaagtagtccgaaagagaatatcataacagtacttaagtattctattccgtattccataatctgcatatcagcgtttcccatctggcttttatagaaaggtttaacgatagtgaaactaagaattaaaaagacgatataactgcatacatataaaaatgctgcatttgatgcaatcttattcgctttcttatagttgcgttcaccaagcgacttggatagtaaagcgttcataccaacgccggttccggtggcaacagctataagaagagtctgcagcgggaatgccagagaaactgcagtaagagcattctctgataacttggcaacaaatatgctgtcaacaatgttgtaaagtgcctgaacaagcatagaaatcatcattggcaaagacatgttaaataatagtttggctatgggcatagtacccattttattttctaccctaggggcagagtttgtttcctgactcataaatcctcctgtgtgtaaataatgtaaaaatatgacaataacttatatagtatagcataaatcataaaatggtacaatgagaggatgataaaggaaattaataagagaattaataaagaaaatcaatagaaatcaaaaaaagattgagtacaaataataataaatagtaccggaatgaatggaacgtatggtattcattccattcattctggtattaaatcaagatatccaaataatcagattatagactataactgtgtttttaaggtttctctttccttgattgggacatctaatatatccatcgcttcatcagcagacttgttaagcttagtcatgatgtttctgatatcttttaaggtagcatcagcacgtccttcctcacgtccttcctcacgtccttcctcacgcataacatccataacaccctcttcatcatattcaaaaatactcacgtcaatcacctcgtccctgtgttttatgaagaaatcagatagtacatcatctttaatacattcatctacagcttcgataacagcaagccttactttcatcccaagtctgtcaattttatagcggaccttattaacaaatgtcatatagtctttaagagaacggcatctgtcaagaatattagtagtgaacaatcccgagttaacggacatctcctgagtgtcaaagataccatctgaaactttatcagaagtaccatcagaagagttatcgtaattaagattaatcatggtaacttccaattcaagctcgggaaaatcaacatggtgttcaaacatatctgacaatttaagaatcttaatacgttccgtcatatgttcacgtccattataaaaagtaataaaatgtggcgttggaagcttaaccatactttttctatgtaacatactattagaaaataaatctctatacacttcagatacatagtgtaaaaatctgagaggcatattgtgattaacggttgactgctgttcaaacatatataactcgtaactaaatacgaaagaagcatcattcttatacttcatatatacgccaccctttagtgttgttatagtaagttcatcaatattcgtgtgagatgaattattaagtgcattgtataaatctaatagattatgtttgtctgagtacaacagacagaatacattgtcactatatcttttggtagtagtagatgagttatcatcattcttagttttatgctggatatagatattatcgttagatctcataagcagaatctcctttagtaaatatagtaaataaatgagtgttaatgtgaaaacaacaaacagaactgctatgaaatcaatatataatatacttataaacatattgtaacatctgtcaacttatataacaagcaaaagagagcacaatatggcagccataatatagctgcgtagatatctgcaacgattgaacatagtatattctgtctggttatgcatggggataataagatactggatccagctataaatgtgtatatagaacataagaaggttgaaaatacatcatataataacaacctgtatattcatgacttaattaagtatattaataatataaaacattgatacaatgatgtcaatatataattaataaaaaatataaataaaatacattgacatttttatcacttatgatatatctgcgataatatatcataaattattcaactactttataattaaacattgatgtattcaaggttttagtaagccacatatacataataatgtttaaaagggtaatataccggcacaataagtaatatcagccagaattatattattcagaattagtagaatggagtcagcaggatatgtcaggaacattaaaaaaaataagccaaaaaagtaacagcgaaacaaacagctgcggatacgataacaggataataacaaagaagacaatagaatactatgagaaaatgcttataatggcagaaaaagaaacacagacaataaagaaatatataagagatgtaaaaaaacttatgatatatgccaatggcagaagcataagcaaggagctgctattaaaatacaaagaataccttgaaaaatgtggtaactataaaatatcaagcattaattcatatctggcagcagccaataacttctgcgatgtgatgggatggacagatataagagtgaaaatgataaaagtacagcatgaaacattcataccagaaaataaagagttaacaatgcaggaatatgaaaaactcgtaaaaacagcttacaagaaaggtgatatacggcttgcccttattatagaaacacttggaagtacagggatacgaataagcgagcttaaatatataacagctgaatcactgaaatatggaatgacagatattcataataaaggaaaagtaagacgtatattgtatcctggtgagctgctaaaagtactgcaaaaatatgcaaaagacatgaatatattacatggctgtatattcataacagcctgcggcaatcctgtaaaccggagtaatgtatggagaatgatgaaaaacctctgtcatgatgcaggagtcagggaagaaaaagtatatccgcataacatgagacacctttttgccagaatattttataaaataaaaaatgatattgcaaagcttgcagatgtacttggacacagcaacatagatacaacaagaatatatataaaatcaactggaagggaacataaaagacagctggataggatgaatatgataatagatatgggtagataacataataaatattatgttgtattatcgcagaatcttcacagatgatagcacatcataaatgataaaacaagagattattacatatttcatataaaaatacaatatttcgacattattagtatatttaatttacattattacagactgaattttgtatattatatgagttcttttatataaacaaagcattttaattgtaaaaatacatttaatcttacgccatttcaggcggcaattccatataagtagaacaattatacaacataatatttattacgttgtatcgacaataagctaaacagcacttaataaactgcaagtggtcaggcagaatcaaaaatgattgcaggtgaggtattatgcagatcaacagagaagattacataatcgaacgtgattatagaaagaaaagacttgaagagtttcaggaagctattcaagaaaatctgcgtgggttatctacggagattatagctgagttggtggatgagagagaacgccagaatcttacgcagaaggatgtagcagatataacaggcatacttccttataatctcgcaagatttgagacaggaacgcgcattccgacactcgttgtgcttgaaaagtatgcttcggcactggataagcatatagagataagattgtgtgataatgaaaaaaataactaggagatataaaacgagaaacataaaaatcatgaaactttatcggaatacacgttgctttgacacggtataaggatgggtggacatagtatcagtaaatccggaacaaagagcagataatgtaactttttgttgtggagtggcggagcctgccctgctgtaagtcgagtagcttgcattgtaaatgcttatattggcagaaaggctgaaagagatggagggaaaatatgtggtatgcagttcaggttatgacaggaagagaagaaactgtaagggatatgtgcaaaagacttatagatagaaaacaatataatgacatatttgtaatcagatttgataaagccaaaagatactatggcacatggcataaagaaaaagaaattatgtttccgggatatatatttattgattctgacaatccgcaacagatatatgaacatcttaatagtgtaccagaattaaccaaaatgcttggccgtgataaaaatgaatttacaccgattgaagcgggtaaggaagcgatgtttaaagcaatggttaatgataattatgaaattccactttcagtaggagtaattgagggtgacaaagtaatagttaaggaaggtccattgtcgggaatggaagggcttatcaagaaaatagacagacataagagagtggcagttttaaatgcacagatgtttgaacaggatgttgatataaagatagggcttgagattatagaaaagtataaaaaataaaaataccataaattatatatggcaaataaaacatagaggaattatggaaaataaatattcagtttcaatgttcggacagaaaagacttacaagagaaggtggagttgaaatagtagtaaaagagctttgtacaagaatggcaagggatggatattccgtcacttgttataacaggtcggggcatcatgtaagtggttcggaatatgatagtaaagaaaaaacagaatatgctggaatatgtcagaaatatgttccaacgattgaaaaaaaaggactagctgcggttagttcttctttttttgctgccttatgctgtgcttttggaaaatatgataccgttcatatccacgctgaaggtccggcattttttacgtggcttcctaaaatgtttggaaaaagagtaattgttacaattcacggaatagactggcagagagaaaaatggaaatcaggttttggttcaaagttcataaaacagggagaaaaaaatgcggttaaatatgctgacgaaataatcgtattaagtaaaggtgtacaggattatttcaaaaatacatatggaagagaaacaagatttataccaaatggtgttaatcgtccagagatatgtaatgcagatattataactgaaaaatatggattgacaaaagattcttatgttttatttcttggcagacttgtaccggaaaagggaattcattacctgatagaagcatttaagaaagttaaaacagataaaaaacttgttattgcaggcggagcaagtgacacagatgaatatgcaaataaattaaaagagcttgccaaaggcgatgaccgaataatatttacaggatttgttcaggggaaaatattagaggaattatacagtaatgcgtatgtatatacattaccttccgaccttgaaggtatgccgttgagtctgctggaggctatgagctatggtaattgttgccttgtatcggatattgatgagtgttcagaggtggtggaagataaggcagctattttcagaaaaagtgatattgaagatttaacaattaagttacagtgtcttgttgaaaatatggatatagtaaaaaaatataaaaatgaagcagctgattatatatgtagtaaatatagctgggatgatgtagttagacagactacagatttatatgaaaaaaaggagaattaaaatgtcaaaagaacagaaattaaatggaacggtaatagttacttatcgatgcaatgcgagatgttctatgtgtaatagatataaagcaccatcaaaaccagatgaagaaatttctattgaaacaattaaaaagcttcccaaaatgtattttacaaatataacaggtggagaacctttcataagaacagacttaaaagatattgtaagagaattatataaaaagtcagatagaattgttatttcaacaaatggattttttacagacaggatagttgaccttgcaaaagaatttccacagataggtattcgtatttctatagaaggattagaggatacaaacaatgaaataagaggtcttgaaaatggatatcaaagaggatatcagacattaaaaaaattaagagaaatgggaatgaaggatgttggatttggaatgaccgttcaggataaaaatgcacctgaccttgtgcctctttacaatatttcaaatgagatgggtatggaatttgctacagcatctcttcataattctttttattttgttgaagctaaaaatattattaatgacagaccgatggttgcaaaaaatttcgaaaatctcgtaaatgaacttttgaaatccaatagtccaaagaaatggttcagagcatattttaatcacggattaattaattatatatatggtcaaaacagattactgccttgcgatatgtcttttgatacattttttatcgacccatatggtgatgttatgccatgtaatggcacaaaagataaagaagttatgggaaatcttaatactcagtcatgggaagaattatggaattcaccagaagcagaacaagtaagaaataaagtacgtcattgtgacagaaattgctggatgattggttcggtttcaccagctatgcataagtatatctggaaacctgcctggtgggtattcacacataagctaaagagcctatttggtggcaaatatagtatgtatgaaaacaagatagtaagagattatcgagatggaaaagttacaaaggaagaattagacaaatgttcgacatgtgatatgtgtgcaactataaataatggtttaagtgcagcaagtatggaacagctaaaagatagaagcggtgaagaaattgttgatgctgatattgcggcacagatgaataaataaaattaaatggagatagttatggagttgttattttctgttatagttccaatttacaaagtggaaaaatatttacctgattgtgttaatagtattttaaatcaaacatataaagattttgaattattattagtagatgatggttcacctgataattgtcctcaaatgtgtgatgattttgctcttaaagatagccgaattagagttatacataaaaaaaatggagggttagtgagtgcaagaaatataggaattaaaaacgcaaagggtaaatatatttgttacgttgatggagatgatactgttgatgaaaaattgctagaatccatttataaggagattttgataaaaaataatccagatattattatttttggaattgtaaagaattttgctgaccatgatgaagaaatattttgtgatcttccagatggtttatatgataagaaagctatggaagaaaaggtatatccatatatgatgtatgataatcgaaaatcgttttgtaaaggtttaatttttccagcagcgtgtaacaaaatatatagtcgaaaattacttttagaacattattgtagagatgacagaatccgtatgggagaagataacgcatttgtgtatgagtgtgtttggaattcgaatagtatatatatttataataagattttttattattataaccaattaaatcctagtgctatgaatcaatcatatgaccctaataggtttaaaaataataaatatttatttgattatatgggaagtagactaaaaggtaaaaattcagtattagatcttcaatttgaggcttttaaagcatattggcttataatggcagtttttcatgaagttaaatgtggacgaacaatacataatgcagctgttcatataagacagcaaattaaagacaataatacaatgaaatatataacaactaaaggtttgcccaaaagtgctttgatttttgtggttttattaaaattaaaaatgtatcatattgcattgtttggggcaagtataatgcaaaagataagaaggaaaggaaaatagagtatggattcggatattttaatttctattattgtaccagtttataatgttgagaaatatttggaacgttgtataaagacattagttacacaagacattaataattatgaaatacttttagtagatgatggttcaaaagacaattctgcaaaattatgtgatatgtattcagataaatatcaaaatataagggtttttcataagaaaaatgaggggttaggattaactagaaattatggaatggaaaaggctataggaaaatatattatatttgtagattcagatgattatattaaacaaaattcattaggtgatttatgtagttatatagttaaaaataattacgatgtgtgtttttataaaaaatgtgtagataatgaacgtattatacaaatagaagatatgtttcctaaagaaaagattagtgcaaaggatttaataatatattgtatagctgagccattgaaaaaagacacatttgaaattggtgctgcatggaaagctatatataaaaaagaatttttagaaaacaattctttaaaatttgaatcagaaagaattgtgttaagtgaagattatgtattttcaggggaattatgttcaaaaaatcctagagtgggtttttatgatgagtatatttattactattgctataatggagcgtcattaactaatagttttaaggcagatagacctattaaggcagttaacttatttaatagattaatgaaaattgtaagaagagagcaactttcagaagaagcagtatttagaatatataatacatttgtacaaaatattttgatatcaataaagcatatatatttcaatgttaattttgataaaaaagaaaaaattcaagaaattagtaaaatatgtaattctaaattggttaatttaactttaaaaaagtataaaaaaacagacaatgtgagtttaagtattatacgtttttttgttcttacaaaacagagcaatttattgtatttaatatattattgtaaatataaagcaaggagataaatattgtgaaaacaatatgttttatagcgccatataattattcaattcctgcaatacaaggtggagcaatagaaactcttgtacagcatttaatagaggaaaatgagaaagaaaaaaaatttaaatttatagttctttcaacgtattcaaaagaagcagaggaagtggcaaaaaaatataaatatactaaatatatttattttaaaaagaaaaaatatattgataaaattttttatttcttatttagattatttaaaaaaatttttcatgcatatttgcctatgtcttttcgatttaaacaaataattaaattcttaaaaaataatagagagaaaatagattatatcatttttgaggatggaatgagtgaaatgcttgttttagttgcaaaagtatttccaaaagaaaaaatatttagtcatattcattgggatggaaatccagataaaaaagtagataatagttttggtacgcttgtacccgttagtgattatataggaaagatatggtgtgaaaaaactggaagaacaaaagaatcagtttatgttttacataattgtatagattatgagttatttagtaaaaaatgtagtgaagaacaaaaaaaacagttacgtgataaattaagaattccatcagattataaagttattgtatacacaggaagaattattgaaggaaaaggaataaaagaacttgttttagcttttgaaaaattaaaagaaagtaaagtgttacttttaataataggtagtgcaacatttggaattgcaagtatgacggaatatgaaagagaagttaataatttagttactaattcaaaaaagaagattagaatggctggatttgttaaacaagatgatttgtataaatattataatatttgtgatttagctgtaatgccaagtatcaaatcagaagcagcaggacttgttggaatagagatgcaagcagctggcttaccattaatagcaaccaatataggtggtataccagagtatacagatggaaaaagtgtgatgcttattgattataaagaaaactttatagaacaattaagagatggtatacaagaactcttatatgattctaacaaaatggcatatatgaaacaatgtgcaaaaataaatgctcaaaagtataatttacaaaattattatgaaaatttcaaaattatgataaataaatttgaggaaaaaaacaatgcaaggtaaaggaataagaataaatataaaagaatcagtttttgtaatagctacaataataggtggattaacaaaattttatccttattcagtaaattcttattttacaaatgcagctgcagttatatggatattgttgtcatatacatataataatgatacttgtgaaaagaaagatgcaaagtttcatctaaagttagcattagttcctattgtagtaatgattatttatactatgtttttatggattatttctccaccccaaagtcatggtgcttcattatcgttttttacaagattagtttcatcaagtacatttcttataatatcttatttttatatttatagagcttatatagtttttaaagacaaagtttttagtttagtttggttatcaatgattttgtcatatacatttttgagtgtttttagagctatcatacattgtggtttgataaatgtagttttaaatatgatttctttggcggatcagtcattagttaacagatatcttgaagttcatgatttaacattcgcattaggtttttatttaatgtattttcttgtgttgggtaaaaaacaacatataagtaatttaaacttaaaaatttttattacaactttatttatatggatgggatataaaagaattcagatattagcaatattatgtgttgtattattttacattttgttcgaaaaatattcttcaaataaaaaaagaagatatatattaccaggattgtgtgctgtattattttcaataatatttcttgaacttatatattctggaaaattacaggatatagcctcaacttataatgttaatttcaattatagattagatacttggagctattgggctaaaagaactaaatttaatattttatttgcaggtttgggattaagttttgtggataaagaaacatatttgcttcatggtattaatggattgttgaataatggttttattgtattaaatggtatgcatagtgatttatttaagaaatatgtagaattaggtttcattttattttttgcatggataatctatatatttattattaaaactagaaagttatttaaaaatcaaggatattggtcttcagaaatatatttattatgcacgttatatgtgtttattttgtatgctacagataatatatttagttattttctatgtaatatttgttattgtatgatgccattaatagcaaagtctttgacgaataaaaatgagtagataagatttttaaaaattattttagaaaggaaagtgattaaattactatgaatgcttatgtatgtttgtcatatgtacaattaataagagcctgtcaattagttacgagttttaaagaatttaatgattattcagacttgtatttaggacatgcaatgtttaatgatgagaaaattattaaacgtattaaggatacaaaaatcttcagaaatgtaatttacatagatgttggtaaatataaaaaaccctatataatttcagcatacattgattttaaaaaaaattcatatgtaccgaaggagggatataaaaaagttatttctttcaatattgaaggtgttatacaaactgttttatttaatatgaataaaactagaaaacagtttgaatatcactgtgtagaggattgtccttcaatatatgacattaatgtaccaacaaaagatacaaaatttatttataaattattaaaaatacaaaaaccttgttttcatatatatgcttggtggacatcatgttgtgaatttatgaaaataccagaagaatttacaaaagacataagacaattacctccaattgatattgagaataaagtattgttaaaaaaacttaattatatatttgattatatagaagaccctatattatcagatacagatatattaattatggaggaatctcattttatagatggatatatgaaaagtaataaagactttgaattttattctaaattggtgaacaagtataatcataaaaaatttgctataaaattacatccaaggactaaagaaaatagatttgaaggattaattcctgttattaaaaattccaatatgccttgggagttaattgtatggaatcgttgcgtaaatagtacaagggagttagttcaaattagtatacgatgtggaacaatgctgtcagataaaatgatgttcgatttagaaagtaagaaagtaattcttataaaattatttaaagatagcatgaatacagtaaataattgcagcaggattgatgaaaatatgattaatcagtatgaattaataagagatacctatagaaataaagaaaatttatttataccagaaaatgaaaaacaattaattttatattttgatgaaatgaaattaggtgattacaatgaatcagagagttaaatatttatttaaaaatttgagcttattaacattaagtaatttttcatccaaaattttagtttttttattagttccattatataccagtatacttacaacagaggagtatggaattttcgatttagggatatctacagtttcgcttttatttccaattttgacattaaatatagttgatagtgtacttcgattttctatggaaagaggtaattcaaaagaagatattgcaattataggaacaaagagtatagcaataagtatagtattagcaggaattgttatattttttatgcgtatatttggtatgtttaagggtatggaaatatatttgttcttttattatgtttcatatagctttaatcaattattaatacaatttagtaaaggactagataaggtttttgatatggcaatagcaggtgttataggaacattttctatgattgtattaaatattttatttttagtaatttgcaaaattggatttgtcggatttttcatggctaatatattatctcaaactattccagcatgttatttatttatacgtttaaaattctggaaatatattgttacatataaagaaaataagcaattaaaaaagaaaatgtttatttattgtattcctttaattgctacagcacttggatggtgggtaaataatactttagataaatatgcagtaacaattatgtgtggaatagcagcaaatggtttactatctgtagcatataaaattccatcaatattgaatgcaattcaatcaatttttacgcaggcgtggcaaatatcagcaataaaagaatatggtgaaagtgatacggcaacattttatggtaaaacattttcgattgttaatatgcttatgtgtgccgcatgtgcttggcttatcatacttacaaaacctttggcaacaatattgtatgccaaagatttttttaatgcatggttatatgttccctttttattaattagttccgttttaaattgtgcggcgggtttgctaggttcaattttatcagcaaaaaaaaatacaaatgtgatgatgtggtcagcaattattggagctttatttaatgcgttttttaatattgtgttgatatattttattgggatacaaggcgcaacgatagctacgtttatttcttctgcaattatttatatagttagaagaattggtgtaggaaaggacataattatagaagataaatattatttaacatggggattacttattatacaagctttagttgaaattactataggtaatcgtgtaatagaaatatcattaattttattaatgttatttataaatttaaaagtaattaaacaagttaaaaatcaattgattaataggtaagaaaggagttcatatgaaaacaacagttttattaacagggagaggaaataatacattgaatgataagaatgtattagatatattaggacatcctgtattatattatcctgcacatgcagctaaaaaagcttataatattgattcatattattgtagtagtgatgatgagaaaattttaaatgcagcaaaagaagaagggtataagagtattgtgagaccggactatttaggttcatctactgcgcaacatgtagatgttataaaacatgctatagaagatatatctcttaaagaagatataggagatatattagttgttttgcttgctaataatgtaacaattaagtccgaatggattgataaatgtatagagataatgaagagtgatatgtctataagtgctgtagttccagtttatgaagataacgaccatcatccattaagaggaaagacagttgatgaaaatggaagattgcaaatgtacgaaaaaaatattttaggaaagatttctactaatcgtcaagacttgcctaaatgctatttcctttctcataatttctgggtacttaatacaaaaatgatgattaaaaataattatgaaggacaacaaccatggggatttatgggtaataatatagcatattatgagatagatgagtcaatagatattcataaaacaatagatatgtttattgctaaagaatggataaaagaaaattatacagattaattattaaggagatactatgaattatttagtaactggcgcagcaggatttataggtagtgctatagcacaatatcttatagataatggaaatacatgtacaacaatagataatttatttactggaaaggaacaaaaaattcctaataaatgtagatttattaagggggatgtttcggatccgcaaataattaaaaaacttaatgatgaaaagtttgatgctattattcatatagcaggacaaagttcaggtgagatttcatttgatgatccgatatatgatttacatacaaatactcaatcaacacttttgcttttaaactatgcaaaacaaacaggttgtaataaatttatatatgcaagttcaatgtctacatatggagatcataatccacctaaatgtagtgaaagtactgataccattccaaaaagtttttatgctgtaggtaaattggctagtgaaaattatatgagaatttattcggaaacaggtattacatgtactgcgttaagattttttaatgtttatggtattggacaaaatcttgataatttacgtcaaggtatggcaagtatatttttagctatggcaattaaagataaacatatatgtgtaaaaggttctaaggatagatttagggattttgtttatatcgatgatgttgttagtgcagttattaaatcacttgaaaggaataatggatatgaggtatttaatgtatgtacagaagtgccaacaactgtagaaaaagtagtaaatactatatgtacacatttaccttatgatatagaagttgagtattctggtggaacaccaggtgatcaatttggaatatatggagactataataaaattaagaacgctcttgggtgggaacctacatattcatttgaagaaggaatgaataaaatgattgattgggcttgtcaaataatacaaaaataagttatagattaatactgaataattaagaggaaaaatgataagtaaaagaaattatggaattgatatattaagacttgtaatgatgtttatgatatgtatattgcattgtcttaatcagggtggtatattaacggcgtctatttatggaacatcttattatatggtgttttggcttttagaaattatctgttattgtgcagttgatggttttgcatttattagtggttatactgcaaaagataattttaaaatagattatacaaagttaataaatatgtggtttcaagttttgttttattcttttatattaacaatagttcttatgatatttggatttaaaatgggggggaattctctgatttatttactatttccagttacaagtgaaagttattggtattttacagcatattttgtattagaaatagttaaaccatttttaaacaaaatgttatttatgatagaggaaacaatgcaaataaaatgttttattgttttgtttcttttattttcatgtcaaggttttattgcaaattcatataaaactatgggtggatattcagctatttggataatagttatttattgtatgggtgtattggctcagcgtgcacatatatttatgaattatagtaataaaacattaatacttatatttttttcgtgtattggtttaacatatggaatgcatatttttttagatattcaaaagtttattaattatgattctcctacaatattaatatgtggaattgttttagttattttattttcaaggataaataaatatgagagaatagcaaaatattcttatttggcatttggcatatatttatttcaattaaataaaattgtctggaattcgatactgaaggatgcatttatatctttgatagattatccaattataatttcagttatactttgcattatattttcttttataatttttataataggactattagtagagaaaattagatgttatttatttaaaagaattagaatagataatttatcaagaagaatatttaaaatattaacagatatcattaataaaattgctgttctatttgaatatagtgaaaattaaaaactaaatatgtgttattttaataaaattattatatgttaatattgaaagtataaataaaataattattgtgaaggaatgagtttattatgtgcggaatagtaggatacaccggaaagaaccagtcagccccaattctgttaaacggcttagccaagcttgaataccgtggctacgactcagccggtatagcagtaagggatggtgtttcaccagtccaggttgttaaagcaaaaggaagattaaaggtattagcagagaagaccaacgatggtcagtctgttatcggaacatgtggaataggtcatacaagatgggctactcacggagagccatctgaaactaatgcacacccacacatttcagatgattataatgttgttggtgtacacaatggtattatagaaaattatcaggagctaagagataagcttacaagaaatggttacagcttctactcatcaactgatacagaagtggctgttaagcttatagattattattataaaaaatatgagcatacaccggttgatgcgattaaccatgctatggtgcgtatacgtggttcatatgcatttgcgattatgtttaaggaatatccaggagaaatatacgttgcccgtaaggacagccctatgattcttggagtaaatgatggtgactgttatgtggcatcagatgttcctgctatacttaattatacaagaaatgtttattatatcggaaatatggagataggacgtctggctgatggtcatatcacattttataaccttgatggtgatgagatagagaaggaacttgttgagataaaatgggatgcaaaggctgccgaaaagggcggttatgagcattttatgatgaaggaactccatgagcagccaaaggcagttaaagatacgcttaattcggtgcttaaggatggaaagctggacttatcggcggtagagcttacggatgaggagataaagaagatatcacagatatacattgtggcgtgtggttcagcttatcatgttggcgttgttgcgcagtatgtcatagaagaccttgccaaaattccagtacgtgttgagcttgcatcagaattcagatacagaaagccacttcttgacccagacggacttgtaatagtcataagccagtcgggtgaaacagcggacagccttgcagcattaagacttgcaaaggataagggacttaagacacttggtatagtaaatgttgtcggaagttcgattgcaagagaggctgataatgtattttatactcttgcaggaccagagatagcggttgcaacaactaaggcttacagcacacagcttatagcagcttactgtcttgcgcttcagtttgcatatgtaagaggtcaggtggaattatctgagtatgaaagcctcatatcagagcttgaaactatccctgaaaagatagaaaagatacttgaagataaagaaagaatccagtggtttgcggcgaaagtagctaattcaaaggatatattctttataggtcgtggaatcgactatgcagtaagtttggagggaagtcttaaacttaaggaaatatcatatatccactcagaagcatatgcagcaggcgaacttaagcatggaactataagtcttattgaagataatcttctagttataggtgtgcttacacagagtgaactttacgagaaaacaataagcaacatggtagagtgcaagagccgtggggcataccttatgggacttactacatatggaaagtatgaggtggaagacacagttgatttcactacatatattcctaagatagatgaacatttcgcagcatcactggcagtagtaccattacagctacttggatattatgtatcagtggcaaagggcttggatgttgataagcctagaaatcttgctaagagtgttactgtagaatagctttgtaaaaaagcgttgtcaaatgttcaactaaggtgtaatcaaagaataatgtgaggggaatgcaatgcagattgatacgtgttttattgatgataatggattgccacattccgcaggttatttgaattcatatgaatgttgtgaacttgacaagttagataatgcattgatgtctgatttattaccaaatgaacgtcgcgtagttcaagattggattagaagatgagagaatgtatgccagagattttgaagatgcttatgacagcgaacatattcactgctatggcatagctttctataaaaagcgttgtcttgtaaagaaaaagtaatacaaagtacaaaaagtaagattataaaaataagattacgaaaattaagattacaaataaatatatttgctaaacccaaagcctttagagcccttaatatctctaagggcttttttgttatgtaacaatatagtaattatatattttatatagacgcggtggcgcatgagcaggacggttgcaataggaagaactgttacaaaggggagtgtccgaagatagaatatacttctatggtgtggtttttaaaggaaaacaggttgttataaagatgggaaagtaatataaaacccagggctgtcttctaaattaagaataataatctaatgcaaaaggtgctgtcacctcaacgattttcaatcgttaaagcgacagcacctttatgattagaatcagtccgaagctggatattgttaattacagcttctggttatccttcatatattcatcatataatccgatgaccttattcataacctcaggaccaggagcaccgagagtaagtctcttttctacacatgtcttaaggcttatagcttcatatacatcttcttcaaagacaggacttattttcttgtattcatcaagtgagaggtcatcaagagcgattcccttatctatgcacataagtacaagctgtcctacgataccgtgggcatctctaaaaggaacgcccttctttacaaggtagtcggcagcatctgttgcgttagtgaagcccttcttagcagagtcttccatacgtgcatcgttgaacttcatagtatcaatcatgcccttgaacaggcttacacagccctttacagtatcaatagcatcaaaagtaagctctttatcttcctgcatgtctttgttgtatgcaagaggaattcccttcatagttgtaagtatgctcataagtgcaccatatacacgtcctgtcttgccacgtacaagctctgctatgtcagggttctttttctgtggcatgatgcttgaacctgtgctgaatgcatcatcgagctcaatgaacttatattcgttagaattccatatacatatttcctcagagaatctgcttaagtgcatcatgatagtagagagtgcacttaagaactctataacatagtctctgtcagacacagaatccatactgttaagtgttggtccgtcaaagccaagaagactggctgtcatttccctgttgagaggatatgtagttcctgcaagggcaccag

SEQ ID NO: 528 - DNA, 7637 bp, unidentified
  source 1..7637: mol_type = unassigned DNA
  misc_difference 3646: note = a, c, g, or t
  misc_difference 3647: note = a, c, g, or t
  misc_difference 3648: note = a, c, g, or t
  misc_difference 3649: note = a, c, g, or t
  misc_difference 3650: note = a, c, g, or t
  misc_difference 3651: note = a, c, g, or t
  misc_difference 3652: note = a, c, g, or t
  misc_difference 3653: note = a, c, g, or t
  misc_difference 3654: note = a, c, g, or t
  misc_difference 3655: note = a, c, g, or t
atgaagaaatcatatgcagtgatcacaggggcaagctccggaatcggtatggcgtttgcacggcagcttgcagcagaggggtatcgtctggtgctggttgcacgcagagaggaccggctacaggaactggcgcaggaattacaaaagaagggaaccgagagcattgtgatatcggcagatttgtcacaaaaagaagcctgttatcacctgatgcagcagatcgagaagctgccagtcgggatattgattaacgatgcgggattcggtgactgtggcagctttctggagacggacgcagataaggaaatgcagatgattgatgtaaatgttaaggctatgcatcttcttatgaagctgatgcttcgccgtatggagaagcaggagggcggttacatcttaaatgtggcttcctcggcgggacttcttccggcagggccttatatggccacctattatgcgaccaaagcttatatagccagcctgacacgtgccgtggcactcgaactgaaacagagaggcagccgcgtgtatgtgggggcattatgtcccggaccggtgaatacagaatttaatgccgttgcaaatgtagagtttgcactggcaggaattactccggaatattgtgttagatatgctttaaagcagatgaaaaggcgcaaagtagtgattgttcctacgttgacgctaaaagccgtgacaacctgtggaagatttataccacaaaaagtgctgattgcaattaccgcacatcagcagaaaaaaaagctcagagcagaggatatatcataagatggaagaaattaaaatcggttcccatgtgggaatggcaggaaaagagatgtttttagcgtccgtaaaggaggcagaaagctacggagcaaatgtgttgatgctctatacgggtgcaccacagaatacccgcagaaaagaaatcaaagatctgaatattgaggcaggatgggcctatgcaaaacaggccggaatccgggagattgtggttcatgcgccttatatcatcaatctggcaaataccgtaaagccggagacatttgaactggctgtacagtttctggaaaaggagatccggcgcacggctgctatgcgaagtcatatcctggtgttacatccggggtccgcgctggatgcgggtgcagaggccggaattgcacagactgtccgcgggctgaatatggtgctggatgagaacgaggatgaggtatttattgctctggaaacgatggcaggaaagggcagtgagattggaagaacctttgaagaaattaaggcaatctatgatggagtgaacaaaaaggagcggttgagagtctgttttgatacctgtcatgtaaacgatgccgggtatgatctggtgcatgattacgatggtgtttttaaacattttgatcaggtgatcggactcgaccagattgcggtctttcatatcaatgacagtttaaatccacttggggcacacaaagaccgtcatgccaatatcgggcagggaaccattggatttgagacgttgcatcgtctggttcatgatccacgttttatggaaattccaaagattttggaaacgccatggctttgtgcagagggggagacaaaaaagacgattcctccatataaagaagaaattcaacagcttcttgcaaaataatgacaaaaaggagaatggttatggaaacaaaacaaccggggatttccggctattggttaaagctgattgctgtaatttccatgctcattgatcacacgtcagccgttattttagaacagattccgggactggaaaatcccgcatttttgatgcgcatcattggaagactggcgtttccgatttactgttttcttctggtagaaggattttaccatacacgcagcagggcaaaatatgcggggaggctttttttgtttgccctgatttccgaggttccgtttgacctggcattcagcaggagaatgtgggatttttccagcaacaatgtcttttttactttgctgttcggacttttggtgatctggggtgttgaagggataaaacagaagtttgtggaggaagtttacgggaataaggccgcagtcatccgcctgattcttaccattgtgacagttgcagccgggggatttctggcacttcttttccgtacagattacgatttgtcgggaattgtgacaatttttgcaatttacatgttttatccgaagaaagtgaagggaatgggtatcggtgtttttgttttaaccctgctggcaagtatcattgaagcggcagcatttctggatatgataccggtttatttttacaatggaaccaggggaaaacagatgaaatatttcttttatatattctatccggcacacctgtttcttcttgccatgatcgcacgggcaatgggactttgggcttaatattttaagaagatgttacgattcttatgaaattcttatctttttcagatacagcttgcgttcctgaaaaagcgggagtacaatgcagacgaaatgaaagacagataggaatggaggtcttggatgatgagacaaaaatcttggaatcagtttaaaaaaacaatggctgcctcgacactggcaggagcgatcacttttacagggtgtgcggtgatgccttcggttacagcttttgcagatacaacagaacagaccggtcaggtatcgtatgataatgaggtgatgccgatccacacggacgtgaagacggaggcaaaaccgttgatgaagggtacgtcatgtacggtttcggatggaaagaacctgtattatgcgtttgaaatgatgggtgtgcgtatgggcattatgaaatacaacaccaaaacaggcaaaaagagtgaggtatattcctacaaaatagggaaaaacaaaaagggaagcaatggtttttcccaattatctgtggataagaaatatatttatgcaacctgggaccgttactatggaaccgatgcaacaaaagaatatatttaccggatcgcaaaagacgggaaatccgcaaagaaacttgcgctcggacgtgatccacagcttgtagatggacggatttattatctggcactgaaaagtaaaagtgaagatggcatgaattattcggaagataccggaaccgttatgagtatgaagacggacggaacggataaaaagaaagttgcacagattgtaaacagcggagatgcttatcggtattccctgtttcagagtgagggaaagatttactataccaaggaaaacgagaacaagacattttatgatctggagggaaacagttatcagagagaggcctttgcggttaaggatgaaaattatctgagtgtttcgctggaagccgtcaatgatggaacgtatacctaccgtacgacaggaaaggatcggtacatgcagacgaaactctaccggacagataacaggacgggaaagaaaaaccttgtggcatcctttaaacttggcattgaaaaatactcggtttgtggaaattatgtattcgtggaagcaaatgttccgtacaagggagctgatgtgactgagaaacttgcagtttactgctataaggcagatggcagcagcaaagtaaagcttgcttcctggtttccggcagaataaaatccgggtaacaatcgaaaaaataaaagannnnnnnnnncgactgcggtgcttcttttattctggggatttatttatccagatcttttttatctacattctgcagcatcattgcacgaactttcagaggaagtccgaacagtgtgatgaatccgtctgcatcgtgatgatcgtactgatcaccggttgtgaaacttgccagagactcactgtagagagagtatggagaagttgtgccggctttgatgatgtttcctttgtagagcttgaattttacttcaccggtgacatacttctgggtagaagtaacaaatgcctggattgcttcgcgaagaggagtgaaccattttccttcgtatacaacattggcaagacggttgcccatctctttctttgcagataaggtatcgcggtcgagaaccagttcttccagctggtcatgtgcttccataaggattgttccgccaggagtctcatatacaccacgggatttcataccaacgacacggttttctacgatatcgatgatgccgacaccgtgctttccaccgagacggtttaattcacggatgatatcggaaactttcatttcttttccgtttaccgtctttggaacacccttttcaaaggtcatggttacatattcgccttcgtccggagctttctcaggggaaacaccaagaaccagaagatgatcataatttggctcgtttgcaggattctccagctcaagtccttcatggctgatatgccataagttacggtcacggctgtaactctggtctgtgccgaatggaagatcgattccgtgtgctttgcagtatgcgatctctgcctcacgggaatccatctgccacttgtcatcacgccaaggagcaatgattttgatatccggagcaagtgctttgataccaagctcgaaacggatctggtcatttccttttccggtagcaccgtggcagattgcaacagcgttttcttttctggcgatctctaccagtttctttgcgataccaggacgtgccatggcagtacctaataagtatttgtgctcatatacagcaccagcctgtacacaaggtacgatgtaatcgtcacagaactcatctgtgatatcttcgatatataatttagaagcgccggataatttggctctttcttccagtccgtctaattcttcgccctgtccgcagttgatacagcagcagacaacctcataaccataagtctcctttaaccaagggataatagcggtagtatcgagtccgccggagtaagctaaaacaactttttctttcataagattgtatcctttctttctatatggaattgtacgctctcgtacgactaaccctactatacatcaatccaaatgaaaacacaagtgaaaaaatatacataaaattgcataaatatacataaatttgtgaatatttgctatttacggatggaaaaagatggactattatagggtagaatcatatttttaaaagaaagaaaaggtaagaaacatggtaaaggtaggaattatcggagcgaccggttatgcaggagcagaactggtgcgtattttattgaatcataaagaggcacagatcgaatggtttggatcaagaagctatatcgatgaaaattatgcagatatttacagaaacttttttgaacttgtcgatgcagactgtctgggtgataacatggatgagcttgcttcccgcgtggatgtgattttcacggcaacaccacagggatttctggcaggtgtgctgaatgaggatattttaaataaggtaaagatcattgatctgagtgcggattttcgaatcaaagatgttgctacctatgaaaaatggtataagattgagcataaaagcccacagtttattaaggaagccgtttatggactctgtgagattaaccgtgataaggtgaccacccagacccgtctgattgcaaatccgggatgttatacgacctgttccattctgacagcatatccgctggtaaaagagggactgattgatccggatacattgattattgatgcaaaatccggtacttccggagcgggacgtggggcaaagacaccgaacctgttctgcgaagtgaacgagagcatgaaagcatacggtgtgacaacacacagacatacaccggagattgaggagcagctcggttatgcggcaggaaaagagattacagtgaattttacaccgcatctggttccgatgaaccgcggaattcttgcgacagagtatgcaaccctgatcaaaaagccggatggtacctatccttcttatgaggaactgaaggctgcttacgataaatattatgcaaaggaacgtttcgtgcgtgtattaaagaaaggtgtctgcccggagaccaagtgggtagagggcagcaattacgtggacgtaaactttgtcattgatgagcgtaccggcagagttgtgatgatgggtgcactggacaatctggtcaagggtgcagccggacaggccgtacagaacatgaatctgctgttcggatttgatgaggcagaaggactttccatggttccgatgtttccataatgaaatgcatctgtttgatgcatttcctacgctcattgtttccgcgtaagaggaactttcatacaatgagctctataatgaggtgaataatgagtaaagaatatacaatccgtgtgatgacactggaagattatgatgaggtgtatgcgttgtggatgggcatccacggttttggaatccgttccatcgatgattccaaagaaggagtggagcggtttttaaaaagaaatccgaccacgagtatggtagcggtagcagatggaaagatcgtgggagccattctctgcggacatgacgggagacgcggatgtctgtatcatgtctgtgtgcatgaagattaccggaagaacggaatcggaaaagccatggcagtcgcatgtatgcgcgccctgcagaaagaaaaaatcaataaggtcagcctgatcgcatttaagagcaatgagctgggaaatcatttctggaaagatgccggctggtgtttccgggaagacttaaactattacgattttacattgaacgaagcaaatattacgagatttaatcagtaaggagaatgttatgagtgagaatttaaacgcattggaaaaagcacaggtgctgattgaggcattgccttatatccagcgttttaaccgcaagattatcgttgtaaaatacggtggatcagcgatggtagatgagaaactgaaaaaacaggtcatccaggatgtcaccctgttaaagctggttggattcaaaccgatcattgtgcatggcggtggcaaggagatcagcaaatgggttgccaaagcaggaatggaaccggaatttatcaatggactgcgtaagacggatgcgcctaccatggagattgcagagatggtgttaaaccgtgtcaataaatcacttgtatccatggtgcaggaacttggggtgcaggcggtcggcatcagtggaaaagacggtggtctgttaaaggtggaaaagaaattgtcggatggtcaggacatcggatatgtaggagaagtaaaggaagtgaatccaaagattctgtatgatctgctggagaaggatttccttccgattatctgcccgatcggtcttgatgacaattatgatacatataatatcaatgcggatgatgcggcatgtgcgattgcccgtgcggtttccgcagagaaactggcattcttaaccgatatcgagggagtatacaaagatccggaagatccgtccactctgatttccgaacttacggtttccgatgcaagaaaactgattacagacggatatatcggcggcggtatgcttccgaagctgaataactgcattgacgctattgaaaacggagtatcccgtgtgcatattctcgatggaagaatcgcacattgtctgcttttggaaatcttcaccaatcgcggaatcggtactgcaattttgggtgatgaagaacatcatttttacaatgaataa

SEQ ID NO: 529 - DNA, 16545 bp, unidentified
  source 1..16545: mol_type = unassigned DNA
  misc_difference 7239: note = a, c, g, or t
  misc_difference 7240: note = a, c, g, or t
  misc_difference 7241: note = a, c, g, or t
  misc_difference 7242: note = a, c, g, or t
  misc_difference 7243: note = a, c, g, or t
  misc_difference 7244: note = a, c, g, or t
  misc_difference 7245: note = a, c, g, or t
  misc_difference 7246: note = a, c, g, or t
  misc_difference 7247: note = a, c, g, or t
  misc_difference 7248: note = a, c, g, or t
accacgatatgtctgtttccagcatcatcgatcccatcaagaagatcgaggctctgctggcaaagcgcagctgatcagaaagaatgcaatgcaaaaggagctgtactcctgcgggggtacagctccttttcgtatgtacagcattcggcagaagccggggctgctgttcctcagcggttccggtaggcctccgggccttccagatacagatctccgccgtgggcatccaggatgacagtcaggggcatatcctgcacggtcaggcggcggacggcctcacagccgaggtcgggccaggcgatgacctccagcgtctggacgctcttggccatcagggcaccggcaccgcccagagcggccagatagaccgcgccgttgcggacaacggcttccttgacagcggcatcccgcttgcccttgccgatcataattttgttgcccaggtccagcaggcgggggctcatggcatccatccggccgctggtggtggggccggcagagccgatgacctcacccgggcgctccggggtggggccgacgtagtagatagcgctgccctcaagatcgaaggggagcggttcgccccggtccagtgcttcgatcatccgcttgtgggcctgatcccgggcggtatacaccacgccggagagcaacacggtatcgcctgccctgaggggagccagatcctgggcggtgcagggggtggtcagtctgtattccattgcaaagcccctccttacagccgggccgacgcgcggcgggtgacatggcaggaaacgttcacggccacgggcaggcccgccacatgggtgggcatctgctcaatggcaaggcccagacaggtggtctggccgccaaagccctgcgggccgatgcccagctcattgattgcggtcagcagctcccgctccagaccggcatagtagggatcggggttgggaacatccagcgggcggagcagcgcctttttggccagataagccaccttgtcaaagctgccgcccacgccgatgcccagcacgatgggcgggcaggggttggaaccggccagctggacggtctccagcacgaacttccggaagccctccacgccgtcggcgggcttgagcatctggatgcggctcatgttctcgctgccaaagcccttgggggccacggtgatggtgcagccgtcgccgtccaccagatgaacggtgatggctgcgggggtgttgtcgccggtgttgccccggcgcagcgggtcagccacgatgctcttgcgcaggtagccgtcggtgtagccgcggcgcacgccctcgtggatggcggcttcaaagctgccgtcgatgtggacatcggtgcccagctccacgaacacgcaggccatgccggtgtcctggcagatgggcaggtctttttctctggcggcgctcaggttagaccacagcaggtccagggtattctttgccagtggccagggctcttcctgccgggccttgtccagcgccgcctgcacatcctgcggcaggcgggtgttggcctcgatgcagagccgggctacggcatcggtgatggcttgtgcggagatgttcctcatctcgtgttcctccctttacaggcgggcaacgccggtctcgcgggcagtctttgccacggcagcagccacggcctcggccacacgggggtcgaacgcgccggggatgatgttctcctcgctgcggtcagcatcggtgatcaggtcagcgatggcataggcggcggccagcttcatctggtcgttgatatcgcgggcgcggacgctcaaagcacccttgaacaggcccgggaagcagagcacattgttgacctggttggggaagtcgctgcggccggtggccatcacgcgcacgccgcctgccttggcttcgtccggcatgatctccggggtggggttggccatggcaaagacgatggcatccttgttcatggtcttgcacagctcggtggtcaggatgccggggcgggacacgccgatgaatacgtcagctccctcgatggcttccttcaggccgcccttgatctggcgggggttggtcacttcgcccagccagttcttgtgggcctcggcgctgttgcagcccttgtacagggtgccgaactggtccacggccacgatatcctttgcgccagcggtcatcagcatcttgatgatggcagtaccggcagcgccagggccgttcaggacgatgtgcacgtcctccatctttttgcccaccacgcgcagggcgttgataagggcagcggtcaccacgatggcggtgccgtgctggtcatcgtggaacacggggatatccagctcccgctccagcgtctcttcgatttcgaagcactcggggctcttgatatcctccagattgataccgccaaaggtgggggcaatggccttgcaggctgcgatcacactggcggcatcgtgggcattgatgcagatggggaaggcatccacgccgccgaactccttgaacagcacggctttgccctccatcacaggcagaccggcctcggggccgatgtcacccaggcccagcacggcggtgccgttggagacaacggccaccatattgcccttgaaggtgtacttataaacatcgtcggggttttccttgatcttgcggcagggctcggcaacgccgggggtgtaggcggtagacaggtcatcacgggtcttgacctccaccttgctggtaatgcccaccttgccgtggtgggtctcgtgcatttcaagggcggctttgttgtaatccatggggtgttcctccgtttgtatcgggcgcttcccgcggaagggagcggccggggtttctcgtatctcttttattttaacagaaccgggcgggcatttccaccggaaaagccgctttttcggccggtgccccgcaaaagtcggacaaacccggcgctctatttgtggaatttctgcaaaattcttttctttttcacttttgccctttataataaggtctgtactatgcgacccgaatctgaacccggcgggatgccggtgttccaacaggaggaactttattttgaaaaagattatcacaaaggcggtctgcctgctctgcgccggtgcgctggtgctgggcgcagcaggctgctccaagtccgctgattcttcttctgccgcttccagcacagccgccgctgtatacggcagcgcggaagattacgattatgagaacttctcctacagcagcggtctggacgagaatggctactgggagggcgtgaaggcgcttgactatgtcaccctgcccgagaactttgcaagccttaccttcaagcgttctgagatcgagcccaccgaggaggagatccaaagcgagatcgacagcctgctcagcgaccacgccaccgagaagcaggtgacggaccgtgccgcagcggacggtgataccgtcaacatcgactatgccggttccgtggatggcgttgcgttcagcggcggcacttacagcggctacagcctgaccctgggcagcggtactttcatcgatggctttgaggatcagatcgtaggccacacccccggcgagacctttgatgtcaccgtgaccttcccggagggatacagcgattctaccgattccgagggcaacaccgttgtcctgagcggcaaaaaggctgtgttctccgttaccctgaactacatcagcgagaaggtcctgcccgagctgaccgacgcgtgggtggccgagaactacggcgagagcgatgatgttcacaccgtggaggagctgaaggcgctctaccagaagatgctctacaacaccaacctgcagaacgccatcatggacgacctgctggcaaactccaccttcaaggagctgcccaaggaggtcaccgattatcaggtgaaccagtgcctgaactactactacaccatggccaactactacggctacgatctggacagctttgtgcagaccgccgctggctatgagaacgccgatgccctgctggaggggatgagcgatagcatcaccacctactccaaggaggctctgctctatcaggcagtggccgagacactggacatcgtgcccacccaggagcagatcgatacctattcctcctacaccggcacctacggtgagaactactgcaccatggtcgccctgatggatgccgtcaccgatgcgctgacagagagcgcagtggtgagctgagtgccctgcccccatatcaagagaacttgtgccgcttcgggtctgccggggcggcatttttgtcttgtttgcaaacaatttgtgaattgttgccgtaccatcgaaaaccctattgacaaagtggggtgtttggagtatagttttagcagtcgaacagatagagtgctaaaaatgaaatggcaatcgatctgaaagactgctgaaataacacttccggtacgaatggaggtcgattctatgaataccaatcaatatacgcagaaaacgctggaagctctgcaggctgcccagcagctggctgtggagtaccagcacaacgctttggagccggaacatctgctgcacgccctggcttcgcaggagcagggcctgatcccgcagcttctgcagaagctgaacgtggacccgggcagctttgccgctgccgtggccgaaaagctgtcggccctgccccgggtgtccggctccggccgtgaccccgataaggtctatatctcgcaggcaacggataaagtcctgagtgccgccgcccgggaagccaaggccatgaaggacgaatacgtcagtgtggagcatgtgttcctgggcctgctggatgagccgacccagaacactacggagctgttccgcgccttcaacatcaagaaggatgcgttcctgcagcagctgactgccgtgcgcggcaaccagcgcgtgaccaatgacaaccccgaggatacctacaacgccctgcagaaatatggccaggatctggtcgatctggcccggaagcagaagctggaccccgtgatcggccgtgatcaggagatccgcaacgtcatccgtatcctgtcccgtaagaccaagaacaacccctgcttgatcggtgagcccggcgttggcaagaccgccatcgccgagggcctggcccagcggatcgtgcgcggcgatgtgcccgagaacctgaagaaccgcaccgtgttcagcctggacatgggtgcgctggtggccggtgcaaagtaccgcggtgagtttgaggagcgcctgaagagcgtcctgaatgaggtcaagaagagcgagggcaagatcatcctcttcattgatgagctgcacaccatcgtgggtgcgggcaagaccgacggtgccatggacgcgggcaacctgctcaagcccatgctggcccggggcgagctgcactgcatcggcgcgaccacgctggacgaataccgccagtatatcgaaaaagaccccgctctggagcgccggttccagccggtgcaggtggatgagcccacggtggaggacaccatctccatcctgcgtggcctgaaggagcgctatgaggtgttccacggcgtgaagatcagcgataatgcgctgatcgccgctgcaaccctctctgaccgctatatcaccgaccgtttcctgccggataaggccatcgacctggtggatgaagcctgcgccatgatcaagactgagatggacagtatgcccagcgagatggatgatctggcccaccgcatcacccagctgcagatcgagcaggtcagcctgaaaaaggagaccgatgccctgagccagagccgcctgcatgagctggaaaaggaactggccgagctgcaggataagttccgcagcatgaaggcaaaatgggaaaacgagaagaacgccattggcaaggtacagaccctgcgtgagcagatcgagcagaccaatgccgccattgagaaagcccagcgtgagtatgacctgaacaaggctgctgagctgaaatacggcaagctgcccgagctgcagaaacagctggaagcggaggaaaagctggccaacgagaagaaggaggacagcctcctgcgtgaccgcgtgaccgacgaggagatcgcccggatcgtggcccgctggaccggcatcccggtggagaagctggtggagggcgagcgcgagaagctgctgcacctggacgatgtgctccacaagagagtcattggtcaggacgaggccgtgaccaaggtgagcgaggccatcctgcgcagccgcgccgggatcgccaaccccaaccgccccatcggcagcttcctcttcctcggccccaccggtgtgggcaagaccgagctggccaaggcgctggcacaggctctgtttgacgatgagcgcaacatggtgcgtatcgatatgacggagtatatggagaagttcagcgtcagccgcttgatcggcgcgcctccgggatacgtgggttatgaggagggcggtcagctgaccgaggctgtccgccgcaaaccctacagcgtggtgctgttcgatgaggtggaaaaggcccaccccgatgtgttcaacatcctgctgcaggtgctggacgatggccgcatcaccgacagccagggccgtaccgtggacttcaagaacacggtcatcatcctgacctcgaatctgggcagtgacatcatcctgaacgatctggagcagcgccgggcacagggcaccaacgaactcagcgacgaggcaaagcatcagatcgacctgctgctgaggagcaagttccgccccgagttcctgaaccgtctggacgagatcgtctactacaagagcctgaccaaggacgagatgcgcaagatcgtggatctgcagctggcagacctgcgcagccgcatggacgagggcaagcatctgaatctggacgtgaccaccgccgccaaggactacatcatcgactctgcctacgacagcgtctatggtgcccgccccatcaaacggttcatccagagccgggtggagactttgatcgccaaggcgatcattcagggccgctatgccgagggcagcaccctgaccgtggattacgacggaaatgcccttgtgctgaaatgattttccacagttttaccagttttgtacctctgtgccggctgtaatgcttgcatgggggtgcggaatatgatattataacaagtaacattgatgtgcttttcatcgcggaacagccacggtggaaagcacatttttgtatccctaggaaagaactccttccgtcatcgctgcgcgatgccacctccctcggtgagggaggctnnnnnnnnnngagctggctgcgaagcagactgagggagtccgttctttcataaaaaacagaaagttgagtgtgattttcctttattatggacgatggcagtatgacgctctgggcagcgctggtgatcctggtgggtttctccgcctttttctccgcatccgagaccgcattttcctccctgaatcagatccgcctgaaaagccgcgccgaggacggcgattcctctgccgcccgggtgctggccatggcggagcaatacgataagctgctttccaccatcctcatcggcaacaatatcgtgaacatcgccgccgcttccatcggcaccatcctgtttacccagatgttgggtgccgagcggggcgctacggtgtccaccattgtgctgacgatcatcgtgctgatctttggcgaagtgactcccaagagcctggccaaggagatgccggaaaaggtggccacggcagtctcgcccttccttgtgctcctgatggccctgatgaccccgctgacctggctgttcacccagtggaagaagctgctgggccactttgtccacagcggcgaggccgataccatcacagagggtgagctgatgaccatggtcagcgaggctgaaaacgacggcgaactgaccgaccgggaaagtgagctcatccgcagcgccatcgagttcgatgacgtggaggtggaggagatcctgaccccccgtgtggatgtggtggctgtggaggatgatatcccgctggaggagctggcccagacctttgcggagtccggttactcccgtctgcctgtctaccacggtaccattgataacatcattggtgtggtacatgaaaaggatttctatattgcccgcctgaaaaaggcgaccaagatcgatgatctggtggtgcccaccctgtataccacgggctccacgcagatctcccagctgctgcgcaccctccgggagcagcaccaccacctggccgttgttgtggacgaatacggcggcaccgagggtatcatcacgctggaggatatcctggaagagctggtgggtgagatctgggatgagcacgacgaggtcaccgaggacttccgcaagcagtcggacggcagctggctggtgtccggttctgccagcgtcgatgatctgtatgaggaactcgacctgccggaggaagaggatatcgattccaataccgtcaacggtctggtgcaggaaaagacctgccatctgcccaaggtaggcgaccgctttaccctgggcgagtacgatggtgttgttacccgcaccgccaagcgccgcgtgacggaggtgcgcctgacccccgccgccccggctgaggatgccgagaaggatgatgaaaaggagaagcgcttctcccgccttgcacagcgcggggagagccgctgacaggaagcataagatagaaacagtgaaacgccgccgggtggggcttttggctctgcccggcggcgttttcttgattcaagtccttgcccgcggccctgcactgtgctaaactgaataaaatacagaacgcaggaggacaaggaacttgaaacggatgtcgaagtttgcgcgccggtgtgcggcgctgatgctggcggtggtgctgctctgcatggcagtgcctgccgcctttgcagcggaaggggacaccctgcccgctggtgccaccaccatgggcggtgccaacactactctgatcccggacgaggaggaaaactgcctgagctggctcttcggctccggcgataccatcaccatgccctacctgaacgtcaaggggcagggcctgcgccggaacgtgaccctggatcttgaggactgtctggtgggcatcacctacaccgagctgggctccatcggcagctatgtcagtgacgcggcggcacagcaggcgtggaaagcgcaggcggtggccatccactcctatctggaataccacaagaaatacggctcttcggccaacgcgctggtgtacacccccgtggatcagattccttcctctgcccgcagcgccatccgcagggcagtctctgaggtcaaggacgaggtgctgacctgcaacggcagcgtcatcgatgcagtgtggtcggccagtgcggggtataacacccagaccggcgtgtacggcacctgctccggtctggatgcctggggcaccgatgtgccctatctgcagagcgtggaaagcccctacgaggagcagtatcacaacctgatgcgccgggtcatcggcaaggactaccgctacaccgagtacaacgacagcaggaccggccagccctacgagagcgccgacaccacccataaggatctgggcggctttgtccggtacaatacctttgtctccaacggaaagagctaccgctacatcggccagttcgtttcctcccgttattgctttgatttcagcgcggacgagaacggaaccccctgcatgaactactatggcttcggccacggtgtgggcatgagccagtgcggcatggtgggctatgcgcaggagcagagcatgggctaccgggacatcctgcgccactactataccggcgtgtcctttggcacggtgggcagcggcagctcgaacggaggcctgttcggctggctgtggagcctgcttggactgcaataaattttgcaccggaaagcgcaggaaatgcggaaaagcgcttctcaaacgggacgaaatctggtatactattatagtttgtaaaaatgcgtctgggcggcggaatggcccagtgaagtggagaagtcggaatgcagttggagaaagcaaaggaaacaaagcaggacatggagcgctgccgcctgctggcacagcgcattgcggaggagctggccccggcaacagctgcggtgctgaacgccgagaccccggcactggaaaaggccctgcaccgggcgggcgtggatgccaacccctttacagtggctgcccggcaggcagacctgctggtggtggaggaccccgcctgggtggagatgcccgcgcagctgcccggacaggtgctgctggtgtttaccggcagcaacgtggctgagggctgggccgaggaactggcccgccggggctactaccgggatttccgctggcgcagccggggccgtgcccagcagtcggctctgtactgcacggtccagcctgccaccgccgagatgatcgcgggctatgagaaggagttggatctcctgcgtgaccggatggtgcgtgccgagcgcacctgcaacgaggaagccgccctcattgagcggctccgcagcgatctttccctgagccgcagccatgccaagaacctggaaaagaccctgaacgaggtgaccagctctaccttctggaagctgacctggcccatgcggtatgttgtcagcaagagccgccagatctggcacaccttcccgcttttcgtcctgctgggtgagctgcgccgggacggcatttcgggagtgcgggagcacgcccgcgccaggcgggagtatgccgccctcttcccggggaacctcctgcgggccgaccgctttgccccggtggagctgctggtcaggcaggcgaacgatcagcctgccggtcccaaaatcagcatcgtggtgcctctgtacaacaccccgctggatttcctggacgagatgctggattccgtggtgaaccagacctacaagaactgggaactctgctgcgtggatgccggtaaggacgaggccgtaggccagcatgtgcaggcccgtgcgaaggccgatgcacgcatccggtatcagaagctggaaaagaatgagctgatccctggcaacaccaacaagggctttgagatggccaccggtgagtatatcgccctgctggaccacgatgacctgctgcatccctgcgccctgtggtacgcggccagggccattgccgagcagaaggccgactttgtctacaccgacgaggcgacctttgaggggaagccggagcatgtggtgctctaccacttcaagcccgacttcatgctggacaacctccgctccaacaactacatctgccacctgactgtgttcagccgcgccctgatggagcgggccggcggcggcgagcggatggagtacaacggcagccaggattacgagctgttccttcgcctgacggagcaggctgagaagatcgttcacattccccatgccctgtattactggcgctccagccccggcagcacggcggcggatatctccgccaagacctactgcatcgacgcaggcattgcggccctcaaggcccactatgcccgctgcgggatcgctgtggacgatgttgccctcatccccggcactccgggctattacaagaccgattacaccattgagcacccgggccgggtgagcatcctcatccccacctgcgaccacatccgggatctggagctctgcgtggattccatctatgcccgcaccacctacccggattttgaactcatcctcattgagaacaacagcaagcagcccgagaccttccgcgcctacgagcggatgcagaaggaacacccggacaacctcaaggtcgtgacctgggagggcaagggcttcaattacagcgccctgaacaactttggcgagcagtatgccaccggcgaatacctgctgctgctcaacaacgataccgaggtcatcacccccaactggctggaggaaatggtcatgtacgcccagcagaagcgggtgggctgtgtgggtgcaaagctgctctaccccgatgacaccattcagcatgccggcatcggttttggcatcggcggcgtggcgggccacctgcacaagtatttcccggcggcatccgatggctacatggggcggctgaactatgtgcaggatgtttacggcgataccgccgcctgcctgctcatccgcagggagatctatgatgagatgaacggcctggacgagagctatgccgtggccttcaacgatgtggatttctgtgtccgtgtgcgggaggcgggctacaccaacgtgtttaccccctttgcccagctctaccactacgagagcaagagccgcggcaccgaggacaaccccgaaaagcagaagcgcttccagggcgaggtgctccgcttccaggcccgctggggagacctgctggccgcgggcgatccctgcaccaaccccaactttgatatccagcgtgaggacttcacgctgaagatcctgcctttggagtgaattgatgaaactctctgcttgtattgttgtttacaacggctatgacgaggcgctgaaggcggcgcagacggtgctgcactgcacacgccgctacccggtgaccctgtatctggtggacaatgccagcccggacggcagcggaaaaaagctggagcaggccgtggcggacggcctgctggcagcaggaccgggccagcaggtggtggtgcactgccgcaccgagaacggcggctttggcaccggccacaatatgatcctgcccgagctggacagtgatttccactttatcctcaatccggatatccagctgaccgctgataccctgagtgatctggccgactggatggccgcccacccggatgccgtgatggcccggccctcgctggtgttcccggacggcaagccccagcagctgcccctgcgccggtgcgccctgcggcccatgctctaccgccagctgccccggctcagcttctggaaaggccagaacgaccactacctgatgctggatgaggacctgaccagacccatcgagatcgagttctgcaccggcagcttttccggtgtgcgcaccagcaccttcaaggcggtgggcggctttgacgagagctacttcatgtatgtggaggatgcggacctcacccagaagatgcgcacccggggcaaggtgtatctggtgccccagtataccgccatccacgcctggcaccgcgctgcccaccgggatctcaagcccgccctctggcagacgggaaacctgctgaagtatttccataagtggggcttcaagtggtaagaaacgctccaccatcgcgatgtgctgccgccgtgggcggctgaacggttctgtttgacggcctgtttcggaaaaaattctggaacaggccgttttttcttgcttttttttcgatttgagagtagaataaggtgtaaaactatctgatgccgccccgtgcggccggaacttttaccctgtaactttgttgacagcggacgcagctccgctttgaatattacgaggtgagcgtttcaccccgtatagctgcacaactttttcaatacaaataaaggagtgcacaaattatgaaaggcattattctggccggcggtgccggcacccggctttatccgctgacaatggtcaccagcaagcagctgctgcctgtctacgataagcccatgatctactatcctctgtccaccctcatgctggccggcattcaggatatcctgatcatctccacccccactgatacgccgcgctttgaggcgctgctgggcgatggcagccagtacggcatccatctgcaatataaggtccagccctctcccgatggtctggcacaggcctttattctgggcgaagagttcatcggcgacgactgctgcgccatgatcctgggcgacaacatcttctacggcaacggcttctccaagatcctcaagactgccgccgccaatgcagagaccaagggccgctgcacggtgttcggctactatgtgcaggaccccgagcgtttcggcatcgtggaatttgaccagaacggcaaggtgctgagcgtggaagaaaagcccgagcacccgaagagcaattacgccatcaccggcctgtacttctacaacaaggaagtggtccggatggcaaagcaggtcaagccctctgcccgcggtgagctggagatcacgaccctgaacgatatgtacctgaagaaggacgagctggatgtccagctgctgggccgtggttttgcatggctggataccggcacgatggagagcctggtggatgccgccgactttgtccgcatggtcgagaagcgtcagggcatcaagatcagcgcccccgaagagatcgccttcaagtacggctggatcgaccgcgagaccctgctggagagcgcttcccgttatggtaagagcccctacggccagcacctcaagaacgtggccgatggaaaactgagatattgatgcaggaggggaatcacccatgaaaatcatcgtcaccggctgcaagggccagcttggcaccgagatcatcaagcagctgcgggagggccgcagcgagatcggccccatccccgaaaagctgatgaatgccaccgtgatcccggtggacctgccggagctggacatctccaactataagatggtggatgacttcatccgccgccagcgcccggatgtcatcatcaactgcgccgcctacaccaacgtggacggctgcgaggtgaaccacgacacagccttcaaggcaaatgctctgggcccccgcaatctggcacaggccgccgaaaagaccggtgcccgcctggtgcatgtctccacggactatgtgttctccggccgtgagaacggcggcattgcacaggacgaggccaccatccccggccccatcagcgcctacggctccaccaagctcatgggcgaaaagtatgtggagcagttctgccaccgccacttcatcgtccgcacggcatggctgtacagctactacggaaagaacttcgtcaagaccattgtcaacgccggccggaaattcggcaagctggaggtggtcaacgaccagtgcggcaaccccaccaacgcggttgacctggcccatgagctgctgcagctctgcgtgacccatgagtacggcctgtatcactgcaccggtgagggcatctgctcctggtacgattttgcttccgagatcatccgcctgtctggtgtggatgcctctgtggctccctgcaccagcgaggagtacaaggcaaagcatcccgaaagcgccgaccgccccaagtggagcgcactggacaaccggatgctccgctgcaccgtgggcaacgatgtgcgggactggaaagaggccctggcctgcttcttcgcccactgggacggcgagaacgggatgaaataaggggaaagcttccccaagaagacaaaacctgaaaattgaggtagaataaacctatgaaaaaatatctgatcaccggctgcgccggttttatcggctccaactttgtccactatatgctcaagaagtaccccgagatcctgctggtcaacctggataagctgacctacgcgggcaatctggagaacctgaaggatgtggagggcgacccccgccatgtgttcgtgcagggcgacatctgcgacaaggagctggtggaaagcctgtttgcaaagtacgatttcgattatgtcatcaactttgccgctgagagccatgtggaccgctccatcaagaaccccgagatctttgtccagagcaacgtcatgggcaccgtgaacctgctgcagcgtgcaaaggaagcctggtacgatgccgatgccaagacctggaaggaaggcaagaagtacctgcaggtctccaccgatgaagtctacggcgctctgggtgccgagggcttcttcatggagaccaccccgctgtgccctcacagcccctattcctcctccaaggccagcgctgatatgttcgttatggcattccacgatacctacggtatgcccatcaacattacccgctgctccaacaactacggcccctatcagttccccgagaagctgatccccctgatgatcaacaacgtcaagcaccacaagcagctgcctgtctacggtgacggtatgcagatccgtgactggctgtacgttgaggatcactgcaaggccatcgatatggtctgcaacggcggcaagatcggcgaggtctacaatgtgggcggccacaacgagcgccccaacatcttcatcgtcaagaccatcattgagcagctgcacgaccgcctgaaggatgacggcatcagcgaggatctgatcaagcacgttgccgaccgtttgggccacgaccgccgctacggcatcgaccccaccaagatcaagaacgatctgggctggtaccccgagaccccgttcgagaagggcattgtcctgaccatcgactggtatctcgagcatgaggagtggatggagcacatcaccagcggcaactaccagaaatactacgaggaaatgtacaagaataagtaagttcttgttcggtatattgaaaaagagggaacgtccatccgcagactgttcgtaaaacagtattcaacaaatgacacggcaactggatgtca

SEQ ID NO: 530 - DNA, 13863 bp, unidentified
  source 1..13863: mol_type = unassigned DNA
  misc_difference 2662: note = a, c, g, or t
  misc_difference 2663: note = a, c, g, or t
  misc_difference 2664: note = a, c, g, or t
  misc_difference 2665: note = a, c, g, or t
  misc_difference 2666: note = a, c, g, or t
  misc_difference 2667: note = a, c, g, or t
  misc_difference 2668: note = a, c, g, or t
  misc_difference 2669: note = a, c, g, or t
  misc_difference 2670: note = a, c, g, or t
  misc_difference 2671: note = a, c, g, or t
  misc_difference 2672: note = a, c, g, or t
  misc_difference 2673: note = a, c, g, or t
  misc_difference 2674: note = a, c, g, or t
  misc_difference 2675: note = a, c, g, or t
  misc_difference 2676: note = a, c, g, or t
  misc_difference 2677: note = a, c, g, or t
  misc_difference 2678: note = a, c, g, or t
  misc_difference 2679: note = a, c, g, or t
  misc_difference 2680: note = a, c, g, or t
  misc_difference 2681: note = a, c, g, or t
  misc_difference 2682: note = a, c, g, or t
  misc_difference 2683: note = a, c, g, or t
  misc_difference 2684: note = a, c, g, or t
  misc_difference 2685: note = a, c, g, or t
  misc_difference 2686: note = a, c, g, or t
  misc_difference 2687: note = a, c, g, or t
  misc_difference 2688: note = a, c, g, or t
  misc_difference 2689: note = a, c, g, or t
  misc_difference 2690: note = a, c, g, or t
  misc_difference 2691: note = a, c, g, or t
  misc_difference 2692: note = a, c, g, or t
  misc_difference 2693: note = a, c, g, or t
  misc_difference 2694: note = a, c, g, or t
  misc_difference 2695: note = a, c, g, or t
  misc_difference 2696: note = a, c, g, or t
  misc_difference 2697: note = a, c, g, or t
  misc_difference 2698: note = a, c, g, or t
  misc_difference 2699: note = a, c, g, or t
  misc_difference 2700: note = a, c, g, or t
  misc_difference 2701: note = a, c, g, or t
  misc_difference 2702: note = a, c, g, or t
  misc_difference 2703: note = a, c, g, or t
  misc_difference 2704: note = a, c, g, or t
  misc_difference 2705: note = a, c, g, or t
  misc_difference 2706: note = a, c, g, or t
  misc_difference 2707: note = a, c, g, or t
  misc_difference 2708: note = a, c, g, or t
  misc_difference 2709: note = a, c, g, or t
  misc_difference 2710: note = a, c, g, or t
  misc_difference 2711: note = a, c, g, or t
  misc_difference 2712: note = a, c, g, or t
  misc_difference 2713: note = a, c, g, or t
  misc_difference 2714: note = a, c, g, or t
  misc_difference 2715: note = a, c, g, or t
  misc_difference 2716: note = a, c, g, or t
  misc_difference 2717: note = a, c, g, or t
  misc_difference 2718: note = a, c, g, or t
  misc_difference 2719: note = a, c, g, or t
  misc_difference 2720: note = a, c, g, or t
  misc_difference 2721: note = a, c, g, or t
  misc_difference 2722: note = a, c, g, or t
  misc_difference 2723: note = a, c, g, or t
  misc_difference 2724: note = a, c, g, or t
  misc_difference 2725: note = a, c, g, or t
  misc_difference 2726: note = a, c, g, or t
  misc_difference 2727: note = a, c, g, or t
  misc_difference 2728: note = a, c, g, or t
  misc_difference 2729: note = a, c, g, or t
  misc_difference 2730: note = a, c, g, or t
  misc_difference 2731: note = a, c, g, or t
  misc_difference 2732: note = a, c, g, or t
  misc_difference 2733: note = a, c, g, or t
  misc_difference 2734: note = a, c, g, or t
  misc_difference 2735: note = a, c, g, or t
  misc_difference 2736: note = a, c, g, or t
  misc_difference 2737: note = a, c, g, or t
  misc_difference 2738: note = a, c, g, or t
  misc_difference 2739: note = a, c, g, or t
  misc_difference 2740: note = a, c, g, or t
  misc_difference 2741: note = a, c, g, or t
  misc_difference 2742: note = a, c, g, or t
  misc_difference 2743: note = a, c, g, or t
  misc_difference 2744: note = a, c, g, or t
  misc_difference 2745: note = a, c, g, or t
  misc_difference 2746: note = a, c, g, or t
  misc_difference 2747: note = a, c, g, or t
  misc_difference 2748: note = a, c, g, or t
  misc_difference 2749: note = a, c, g, or t
  misc_difference 2750: note = a, c, g, or t
  misc_difference 2751: note = a, c, g, or t
  misc_difference 2752: note = a, c, g, or t
  misc_difference 2753: note = a, c, g, or t
  misc_difference 2754: note = a, c, g, or t
  misc_difference 2755: note = a, c, g, or t
  misc_difference 2756: note = a, c, g, or t
  misc_difference 2757: note = a, c, g, or t
  misc_difference 2758: note = a, c, g, or t
  misc_difference 2759: note = a, c, g, or t
  misc_difference 2760: note = a, c, g, or t
  misc_difference 2761: note = a, c, g, or t
  misc_difference 7558: note = a, c, g, or t
  misc_difference 7559: note = a, c, g, or t
  misc_difference 7560: note = a, c, g, or t
  misc_difference 7561: note = a, c, g, or t
  misc_difference 7562: note = a, c, g, or t
  misc_difference 7563: note = a, c, g, or t
  misc_difference 7564: note = a, c, g, or t
  misc_difference 7565: note = a, c, g, or t
  misc_difference 7566: note = a, c, g, or t
  misc_difference 7567: note = a, c, g, or t
  misc_difference 7568: note = a, c, g, or t
  misc_difference 7569: note = a, c, g, or t
  misc_difference 7570: note = a, c, g, or t
  misc_difference 7571: note = a, c, g, or t
  misc_difference 7572: note = a, c, g, or t
  misc_difference 7573: note = a, c, g, or t
  misc_difference 7574: note = a, c, g, or t
  misc_difference 7575: note = a, c, g, or t
  misc_difference 7576: note = a, c, g, or t
  misc_difference 7577: note = a, c, g, or t
  misc_difference 7578: note = a, c, g, or t
  misc_difference 7579: note = a, c, g, or t
  misc_difference 7580: note = a, c, g, or t
  misc_difference 7581: note = a, c, g, or t
  misc_difference 7582: note = a, c, g, or t
  misc_difference 7583: note = a, c, g, or t
  misc_difference 7584: note = a, c, g, or t
  misc_difference 7585: note = a, c, g, or t
  misc_difference 7586: note = a, c, g, or t
  misc_difference 7587: note = a, c, g, or t
  misc_difference 7588: note = a, c, g, or t
  misc_difference 7589: note = a, c, g, or t
  misc_difference 7590: note = a, c, g, or t
  misc_difference 7591: note = a, c, g, or t
  misc_difference 7592: note = a, c, g, or t
  misc_difference 7593: note = a, c, g, or t
  misc_difference 7594: note = a, c, g, or t
  misc_difference 7595: note = a, c, g, or t
  misc_difference 7596: note = a, c, g, or t
  misc_difference 7597: note = a, c, g, or t
  misc_difference 7598: note = a, c, g, or t
  misc_difference 7599: note = a, c, g, or t
  misc_difference 7600: note = a, c, g, or t
  misc_difference 7601: note = a, c, g, or t
  misc_difference 7602: note = a, c, g, or t
  misc_difference 7603: note = a, c, g, or t
  misc_difference 7604: note = a, c, g, or t
  misc_difference 7605: note = a, c, g, or t
  misc_difference 7606: note = a, c, g, or t
  misc_difference 7607: note = a, c, g, or t
  misc_difference 7608: note = a, c, g, or t
  misc_difference 7609: note = a, c, g, or t
  misc_difference 7610: note = a, c, g, or t
  misc_difference 7611: note = a, c, g, or t
  misc_difference 7612: note = a, c, g, or t
  misc_difference 7613: note = a, c, g, or t
  misc_difference 7614: note = a, c, g, or t
  misc_difference 7615: note = a, c, g, or t
  misc_difference 7616: note = a, c, g, or t
  misc_difference 7617: note = a, c, g, or t
  misc_difference 7618: note = a, c, g, or t
  misc_difference 7619: note = a, c, g, or t
  misc_difference 7620: note = a, c, g, or t
  misc_difference 7621: note = a, c, g, or t
  misc_difference 7622: note = a, c, g, or t
  misc_difference 7623: note = a, c, g, or t
  misc_difference 7624: note = a, c, g, or t
  misc_difference 7625: note = a, c, g, or t
  misc_difference 7626: note = a, c, g, or t
  misc_difference 7627: note = a, c, g, or t
  misc_difference 7628: note = a, c, g, or t
  misc_difference 7629: note = a, c, g, or t
  misc_difference 7630: note = a, c, g, or t
  misc_difference 7631: note = a, c, g, or t
  misc_difference 7632: note = a, c, g, or t
  misc_difference 7633: note = a, c, g, or t
  misc_difference 7634: note = a, c, g, or t
  misc_difference 7635: note = a, c, g, or t
  misc_difference 7636: note = a, c, g, or t
  misc_difference 7637: note = a, c, g, or t
  misc_difference 7638: note = a, c, g, or t
  misc_difference 7639: note = a, c, g, or t
  misc_difference 7640: note = a, c, g, or t
  misc_difference 7641: note = a, c, g, or t
  misc_difference 7642: note = a, c, g, or t
  misc_difference 7643: note = a, c, g, or t
  misc_difference 7644: note = a, c, g, or t
  misc_difference 7645: note = a, c, g, or t
  misc_difference 7646: note = a, c, g, or t
  misc_difference 7647: note = a, c, g, or t
  misc_difference 7648: note = a, c, g, or t
  misc_difference 7649: note = a, c, g, or t
  misc_difference 7650: note = a, c, g, or t
  misc_difference 7651: note = a, c, g, or t
  misc_difference 7652: note = a, c, g, or t
  misc_difference 7653: note = a, c, g, or t
  misc_difference 7654: note = a, c, g, or t
  misc_difference 7655: note = a, c, g, or t
  misc_difference 7656: note = a, c, g, or t
  misc_difference 7657: note = a, c, g, or t
tcagacagcacatccacacacacagcaagtgccagagcacagtttttcgcctgatgttctcccagcaacggaatttgtaaatccgcataaatgttgtctccgatttcaacatcaaactgcattccgaagcaggtataacggatgttttctgcatgaaaatcccgaccgtagatcttatagggaatatgcagagtttcggcacggcgctgcagaacttccagaacttccggttcctgctccgcaaaatagacacacttctgctctccggtgataacgtgggatttatcttccgcaatggcagctaacgtatctcccagctctcttgtatgctctaagaaaatccggttcatcacggcataatcgtgacgaatgttgtttacatcatcatattttgcaccctttccgcattcaaatacattgaaatccgtatgcttttccgaaaaataagtcagtgccaggtccgcctgaatgcccatggggctgatacataccgactccggcagatcggaggcaatgtccagaatctccggctggatctctgtcatcagacggcagaagtcagattcactgatcatcgtatcattgacacggaagcgttcgcgaaagtccgtgatatgagggctggtcatcagtcccacagagaatcttgtctgcaggattcgggagatcatgttggaaacggagccttttcccttgcttccggtgacaacgatgcagggagtaacggatttttgccaaagcagagatctcgtcagctcaggatgtctttttccggcatcctttgcggcatagtcctgatgtgtggaagctcgcagataggaagcatagacgaagtcttccgcctccttacgtgtagtgattttatgaaattgcagtgatgtttcggaagtgttattcatataaatacctttttgtagcctacaattttccagatactttagtatcatgtattttcgtacactgtgcaggcacatatttgcgcatgaaaaaactattttttacactaagtctttgatgtaaagtcagattgtatcgtctcaataatttttcccgcaacatttatgccggaagccttttcaataccttccagtcccggcatgacattgatttcgcaaaaataaggtttttctctgccaaaaagcagatcaattcccagaaaatccagtccggtctgctcgtaaatatctgcggctatggtacggatgccggaagtgacagggtaaggctctaccgaagcgcccagagctacatttgcacggaaatccccctgggatgtgcgctgcatacaggcaacggcttctccgcggatgctgtaaaagcgcagatctctgccgtagctttctgagataaattcttcgaagagccattccttggaggaagggtagttaagagagagttcctcataagaagctttatcccggatgcagacgatttcttctcccatggagctttccagtcctttaccgacaaagggaaggcccagttgttctacaatagaagaaaaaggcaaccgtgaagttcccagaagatatttcgggatcaaaaaggctttggaatgaagccttcgtacctgttcaaatttattaatatagatattataagcagttaatggattatagcttcgggtggcaagtgcatttatagcatccttttcccgtccccatttatagcggttgatgacaaaatccacgggttccagtattttaccatgatttataacaccatgcggagagaccacagtatcatggatccctacaatctgcagatccatatccagggcagaagcttcctgtaccagacggttgcaggtataagcgttagtcatagtattatatttttctatgatatatcctctgataggcataaggcacctcgtgatttcagtattctcatggttaacatagcaaaatgttgtcaaaatagcaagaaatatagttcttctattgaaaaaggactaatatcctgcgtataataagagacataagagcataaaagtgggatgataattccacgatatgcgaatattgggtagaattgtggtagtgcgtagcacgaagcaattcgtaggtatcaaagtcgggggcttttgaccccgacatcattaaaatatattaagaagaaacaaaagaggagacatacaatgaaattactcgaagagcgcattcgcaaagacggtacggtaaaagcagggaatgtattaaaagtagattcttttctgaatcatcagatggacattgatctgttcaatgaaatgggaaaagagtgggcgcatctgtttgcagaccgtaagattacgaagattctgactgtggaggcttccggtatcggtatcgcctgtgtggcagcccagcattttcatgtgccagtggtatttgcaaaaaagtcccagtccgtaaatattgacggtgaagtatattccaccaagatcgaatcctttacgcacaagagagtatatgacgtgatcgtttccaaaaaattcctgcatccggaagatcatattctgatcattgatgattttctggccaacggatgcgcactggagggtctgatcgacattgtcaataaagcgggagcttctgtagagggtgtcggcattgccgttgagaagggattccagaagggcggcgacctgatccgttccaagggtatccgtgtagagtcnnnnnnnnnnnnnnnnnnnnnnnnnnnnnnnnnnnnnnnnnnnnnnnnnnnnnnnnnnnnnnnnnnnnnnnnnnnnnnnnnnnnnnnnnnnnnnnnnnnngcgacctgatccgttccaagggtatccgtgtagagtcgctcgctattgtggaaagcatggatgacaagaccggagagatcacatttcgatcttaatagttagataagttagataggttagataggttagataactactcagaaccacattcgcaaacgagttaataaaaatttaatacctctcttgacaagaagtcagacaaatgcttatactgactaatgttgagagagtacaataaaggggttgtatgaaggtgtcatacaccctttttgcgttgactcaccggtttatctgcagatctgtgcccgcgctgctacatggatctgtaacgaagcagcagcgcagaaagaggagaattatgaaaaagaaagtcgtaagtttactcgcagctatggctctcgcagttactgctctggcaggatgcggatccaatgatgcagctaccaccggcacagatgcggcaactgttgcagctactactgaggtggcagctactactgaagcagcagctgatggcgaagctgtcagtggtgtaaaggcaggttttattttcctgcatgatgagaactctacttatgatctgaacttcctgaacggagcaaaggcagcttgtgagaagcttggcattgagtacatgaccaagaccaatattcctgaaggacaggaagcttatgaagcagcttgtgagcttgctgatgcaggttgtaatttcattttcgcagacagctttggacatgaggactacatcatcgaggctgctaaggagtatcccaatgttcagttcagccatgcaaccggaaccaaggctcatactgagggtctggacaacttccacaatgcatttgcttccatttatgatggccgttaccttgcaggtatcgttgcaggcatgaagctgaatgagatgatcgctaacggtgatattaccgaggatcaggctaagatgggttatgtaggtgcttatacatatgcagaagttatgtccggttatacctcattcttcctgggtgcccgttccgtatgccccagcgttaccatggatgtaacctttaccggttcctggtacgatgagaccgctgagaaggaagcagctaacaagctgatcgagggcggatgtgtactgatcagccagcatgcagactccatgggtgctcctaccgcatgtgagaccgcaggcgttcccaacgtatcttacaacggaagcactgaggcagcctgccccaataccttcctggtatcttccagagttaactgggagccttactttgagtatgctattaaatgtgtagcagatggaactcctatcgataccgattggtgtggtactctggagaccggctctgtagagctgagcgatcttggtgctgctgtagcagatggtaccgcagaagcagtagaagctgcaaaggctgatctgatcgcaggcaaggctcatgtatatgatatcaccacctttactgtagacggtaagaccctggacagctatgaagctgatattgatactgatcctgattatactcccgaccatgaggtagtaagtgacggatacttccatgagtccgatgttgcattccgttccgctccttacttcaatgtaagaattgatggaatcaacctgttggatgagcagtattaattgacttattgaaatagcccggacggcgcagcgtttattgccgcgccgccctttttctaccttatggatcttttgcttttgcggatggatgaggtagaaaaggggcggccagtgtgcttatgccaggtattaaaagacctgaaaattgcaggtcatggataaattggaaaggtgactaggatggaaaaagagacaaaagtagctgcggtttcgatgaaaaacattaccaagacttttggatccgtgattgccaatgataaggtaaatctggatatctataagggtgagatattatcactgcttggggaaaacggcagcggtaagacgacactgatgaatatgctctccggtatttattttccggatgagggacagatctttattaacggtaaggaagaggtcatcaaatcccccaaggatgcgttacggctgggaatcggtatggtgcatcagcattttaagctgatcgatgtactttccgctaccgagaatatcatcctgggtctggaaggcaggcttaatatcaaggaggcatcccgtaaaatagaggagatctgtgacaaatacggttttgaagtagatccgaagcagaaaatctatgatatgacggtatcccagaagcagaccgtggagattgtaaaggtgctgtatcgtggtgcggatatcctgatcctggatgagcctaccgctgtactgacaccgcaggagacagagaagctctttaacgttctccggaaaatgagagatgacggcaaggctattgtcattattacccataaaatgcatgaagtggaatctctgtccgacagggtggctgtgcttcgtaacggtcagtatattggaagcatgctgacaaaggataccaccgttacggaaatgaccaatatgatggtgggacatgcggttactttgaatattgtcagaccggaacctgtgaatccgaagccccgtatcgaagtacagggactgaccgtacgtaacgaagaaggtatcgttaagctgaaggacgtctcctttaccgccaatagtggtgagatcctgggaatcgccggtatctccggctgtggacagaaggagcttttggaagccattgcaggtctgcaggtaacagaagccggcacaatcagctatgtggaagatgatggaagtaaggaaatgctgatcggcaaggatccgttgaagatcgcagagatgggtgtatcgctttcttttgtaccggaggatcgtcttggcatgggcctggtaggcaatatggatctgaccgataatatgatgttacgttccttccgacagggacatacaccgtttacgaaccgaaagccttccaaacagcttgcaactgatgtggtagaaaatctggaggttgtaaccccgggtatcaccactccggtacgcagattgtccggtggtaatgtacagaaggttctcgttggaagagagattgcgtctgcacctaccgtactgttgacggcttatgtggtacgtggactggatattaattcttcgtatactatatatgacctgatcaatgaacagaagaaaaagggcgttgccgtgattttcgtaggtgaggatctggatgtgctgatggagctgtccgaccgtatcatggtattgtgcggcggagaagtgagcggtattctggatgcgagaaagacagacaaaaatgaggtcggtatgctgatgaccagagtaggaggcaaagaacatgaaggaaaagaataaagagcctttgtttcatatcgtaaaaagagatgcgcttccctggtataaatctctgggtattcgatttttggcaatcctgctggcactgatcctgtgcggtatcattacgacgatcaccacgggaatcaatcctttacaggtatatcagtccatcgttctgggtgctttcggatccgttcgcaagacctgggtcacttttcagaatatagcgatcctgcttttgatcgcattggcattgactccggcatttaagatgaaattctggaatatcggcggtgagggacaggtgctgatcggcgggctggcagcagcagcctgtatgatctgtctgggagataagcttccgaacgcagttgtgatcctgtgcatgatcgtggcaagtctggcagcaggagccatctggggcttcattcccgcatttttcaaggcgaaatggaataccaatgagacgctgtctacgctgatgatgaactacatagctactcagttggtggcattttatacgatagtatgggaggttcccaagggatccggtaagatcggtatcatcaaccagaacaccaatgtgggctggctaccgcagatcttcggctccaaatatctgttaagtattgtagtggcagtagtgatcacgatatttatgtatgtatatttgaactacagtaagcagggatatgagatctctgttgtgggtgagagcgaaaatactgcaaaatatgtgggtattaaggtggaaaaggtaattatccgtaccatgcttctgtccggtgcactgtgcggactggtaggcctgcttctggtaggaggcatcaatcatactgtgactaccacgattgcaggtggacagggatttaccgctgtactggtatcctggatgtccaagttcaatcctctgaccatggtattctccagcttcctgatcatattcatggatcgcggagccagtgagatctctaccaattttggactgaatcattcttactccgatattctgacaggtattatcctgttctttatcatcggctgtgagttcttcattacttacagactgcagttccgtaaaaaagcagaaaaggaggaacagtaatcatgtggtcatttttacttgcatttattccgagagcaatcgtacagggaattcctctgttatacgggagtaccggtgagatcatcacggagaagtccggtaatctgaatctgggaatccccggcgtcatgtatgtgggaggtatctgtggtgtcatcggatctttcttctatgagagatccgcaggagacgcggcgaacatgaatgggtttcttgccattgcgattccgatgctctgctgcctgttaggatccctgttgatgggattgctgtactgcttcctgactgtcaccctgcgggcgaaccagaacgtgaccggtctggcaatgaccaccttcggtgttggctnnnnnnnnnnnnnnnnnnnnnnnnnnnnnnnnnnnnnnnnnnnnnnnnnnnnnnnnnnnnnnnnnnnnnnnnnnnnnnnnnnnnnnnnnnnnnnnnnnnnctgcgggcgaaccagaacgtgaccggtctggcaatgaccaccttcggtgttggcttcggtaacttcttcggcggatccctgatcaagctggtaaacagtgatgtaccttccattgcactgtctgctaccagcagttatttcagtaagtcccttccttttgcgggaaaacttggctggtttggtaagctgtttttatcctatggattcctggcttatctggcagtgatcattgcgtttgcggcatcgtatgtcctgagtcataccagaacaggcctgcacttaagagcagtcggtgagggccccaataccgcagatgcagccggtatcaacgtatcccggtacaaatacatcgctacctgcgtgggatgtatgatcgcaggtctgggcggactgtactatgtaatggattatgcctgcggcgtctggtccaacgatgcgttcggtgacagaggctggcttgccattgcgctggtcatcttcactatctggagaccgaatatcagtgtatttgcttctttcctgtttggtggtctgtatattctgtatctgtatctgcccaccggtatcgagcatatggagtatcaggagctgtataagatgatcccttatgtcgtgaccttactggtactggtcatcaccagtatgcggagcaagagagagaatcagccccccgcaagtctgggactggcgtacttcagagaagaaagataataattttatagaaagacgattaaaaacggcgttttccggaaatttccggagaatgctgttttttagtgcacattttggaaaaaactcacagaaactttaggaaaacttttgattttattcggatggaatttacctgtgtctgttatgctgagatcaattcagagaaaataaacggaagggagaaaaaagatgaaagtattgatcacaacagactggtacaagccggccatcaacggagttgttacttcggtatgcaatctgcgggaggaattacagcaaagaggacatgaagtgaagatcctgaccttgtcccgtacagctcgttcctacgaagaagagggtgtgatctatatgggttccgtgaatgccggatatatttatccgggagcaagacttcgggtgtccccgggacgcgaactgtatcgcgggattatagagtggaatccggatattgtacattcccagtgtgaattttctacctttttcatggcaaaaaagatcgcagaggaatgtaagatccctctggtgcatacttaccatactgtatacgaagattatacccactatttttccccttacaagaaatggggcagggatatggtacagttcctgacgcgacagatctccgagaaggtggacagtatgatcgctcccagcacaaaaatagagacattactaaaaggctatggcattcattgtccggtatcagtgatcccatcggggattgatctgagtaaatatgacgcgcagacccggacggattctcgggagagaatccgaagaaaatataaaatggaccggaagaccacagtgcttttatatgtaggtcgtctggcaaaagagaagaatgtggaagaattgctggagtaccagcagaaaattcaggagagcggcacaatactgatgattgtaggcggcggtccttatttggagactttacggaaaaaggcagcagaactgggtgtgacggaaagcgttatttttaccggaatggtatcacccgctgaagtagcatcttattatccggcaggagatctgttcgtcagcgcttccaccagtgagacccaggggcttacctatgcggaagcactggcagcaggattaccgttattatgcagaagggatcaatgcctgcgggcggttgtggaagaggacaaaaacggctggcagtaccggaccgaggaggaattcttgaaagacctgaagaactggaaggagaaagaagacgatgaacgcagaggaatgtgcagttatgcaaaacagtccgcagaaatattttcccaaaaaagatttgcgggaagcatggaacaactataccagcgacagatcgaagaaaaacaggtcgaaagagaaaaacgcttggcaaagagccgtcaatattgcatcctgggttagtctgatcctctgtggaatactggcagtctggagctatcagagcggcattttccaatcggtggagactatgcagcagtttgtgaaccgtttcggaatgatcggtgcactgatcttcgtgctgatccagatcgttcaggtggtgtttcccatcataccgggtggcatcagctgtctggcaggagtgctgctctttggagcggtgccgggatttttctataattatataggaatctgtgtgggttcctgtattgcttttggaatagcaagaagtctgggaagaccggtgctgtacaagatgtttcccgggaaaatgattgaaaaatacctgacatggacggagctaaaggggagatttttgaaattatttacactggcaatctttctgccggtggcaccggatgattttctctgttatctcgccggaacgacgaatatgacatggaaacagtttgtgacagtcatctttttgggaaagcctttctccattgcgctgtatagtctgggactgacgacactgttccaggtgattttccacctattataggagagtatacttatgaaaatttatatatataaaggcggactttcactggtggcaaaaagcggcgttggcagcgcaatacgccatcaggagaagatgctgcgagcagcaaaagtgaccgtgacggacgtctggaaagaggcggatatcgtacagatcaataccgtattgcctgattcgccgctggtggcacggcgggcaagacggcaggggaaaaaggtcgtctattatgggcattccactatggaagattttaagaattcttttatcggttccaatctggcggctcctttattcaaaaaatggatccgccattgttatagacagggagatgtggttatcacaccaacggaatactcccgggaattgttaatgaaatatgatctgcatcgggagatttacgcactgaccaatggtgtggacactgaatttttccacaaaacagagcaggcaggtggacgattccggatattttttcatcttcctgtggataaaaaggtcgtgatatccgccgggcatctgattcacagaaaaggaatcgaggattttctggaaatggcaaaaaggatgccagacattatttttctatggtttgggggcgggaacaatgcattgattccggcagagatcaaaaaggctgtggcagagaagccggaaaatgtgatctttgccggtttccaaccgtccgggatcctgcgggatgcgtactgtggtgcggatgcatttgcttttttcagttatgaagagacggaaggaatcgtggtattggaggcattatcctgtgagattcctgtgatcgtgagagacattccggtgtatgaagggtggcttaccgacggcgagcaggtgcgcaaagccagcaatctggattcctacgagcaggcagtccgagacatcttgtatgaagaaccgctggaaaaagtaagacgcagaatccgggcaggcagggcactggcggaggaacacagcatgcgggcgacaggtgagaaactgtatcagatcgagcagaagcttttgtagacatccctcttgcaaagtccgcgcctttatcataaaatgagagtaccttacaaaggaggtgcttacgatgaaccttgtaattactatcagccgaagattcggaacaggagccagtctgatcgcacaggagttgtctgagaagctgggggtgccggtgtatgataaggcgtacatagagcatgagctgaatggtgacagttatgctacggaagcggaggttattaaggggttggcggaacatccctgtattattctgggacgctgcgcatctgagatcctgaaggatcagccgaatgtatttaacgtgtatgtgtgcgcagataaggaagatcgtatcgaacgtatcatgaagaaggaaagtctttcccacgatgaggcgaaggaaatgcttgagaaaaatgatgcagaacgcgccgcctattattatgagaataccggtaaggtgtggggcgatgtgaacaactaccacatgatcctggataccaccaagctgggaatcgagaactgcgcggatattctgatccggtattttgagagagtggaaatcatttgatagaataaacttacccatgaaaagccctttcggacagcttgctgtcaagaagggctttttatgcgggaagtaaacgaacatgagcaagtaggacgatagtccggaatgcgaatgggcgttacgatttcgagagtacgcagtacggagaaatcgtttagactatgaatagtgtataaatgcgaaacagatgcccaatacggacatctgtttttgtatatacaagaatcggttattaatagatgcttgtacagaaatcggtatctggcaaatatataataataaaatcaatcaataacgtaacaacacaaagttaaaaatatatttttaaatataacaaaaaatgatatatgcaattaaaacttttaatcaaattataaaacgagagaaatacggaataaaatagcatttttccagaatttataggtatatgacaaaaatgtcacattaaaatacatcaattaacaagataagaacataacttgcttacagaaattatgagtgttaagatagtgcaatcagataagtgaaaatagtaaaaataacaggttttgaaaataaaaagtaatcatatggcaggaggatttccatgaacagcgcagacatagcagcaaaatatcagaaaacttattttatgccccccgaggtgacctacgactgggtgaagaaggacagcattaccaagccccccatctggtgcagcgttgacttgagagatggtaaccaggctttgatcgatcccatgagcctggaagataagctgaaattcttcaagctgttggtaaagatcggtttcaaggagatcgaggttggttttcctgcttcttccgataccgagtacaattttatccgtgccttgatcgaacgtgacatgattcccaatgatgtgaccattcaggtgttgacgcaggcgagagaacatatcatccgcaagacctttgaagcggtaaaaggtgcgccccacgcagtgatccatctatacaactctacttccgtagagcagagagaacaggtatttaagaaagataaagaagccatcaagaagctggcagtagacggcgcccagatgttaaagaatctggcagacgagaccgaaggcaacttcacctttgagtacagccctgagagcttttctcagaccgaggtggattatgcactggaagtctgcaatgcagtactggatgtatggaagcctaccgctgaccgcaaggccatcatcaatctgcccaccaccgtacaggtggcaatgccccatgtatttgcctgtcaggtagaatatatgcacaagcatttgaaatatcgtgacaatgtagtactcagcgtacatcctcacaatgacaggggctgtggcatcagtgatgcggagttcggcgtactggccggagcagatcgtgtggaaggtactttgttcggtaatggcgagcgtaccggtaatgtggatctggtaaccgttgcactgaatatgatgtgccatggtgtggacagtggactggatttctctcatattatggagatccgtgaagcttatgagaacttcaccggcatgaaggtacatgaaagagtgccctatgcaggagatctggtatttaccgcattttccggttcccatcaggatgccatcagcaaaggtatggcatggcagaaggaaggcaagaccggcaagcgttgggatatcccttatctgcccatcgatcctgcggatgtgggaagagagtacgaatccgatgttatccgtatcaacagtgtatccggtaagggtggcgtagcgttcgtattgaagcagcagtttggcttctcgctgcccgcagccatgaaggaagaggttggttaccttgtgaaaggtatttccgacagacgtcatcaggaattacttcccaaggagatctatgcgatcttcgaggaaaattatatttatccccgcagcatcttcaacattccggagtgccacttcaaacaggagaacggcattcaggcagaggtgactatcga

SEQ ID NO: 531 - DNA, 7431 bp, unidentified
  source 1..7431: mol_type = unassigned DNA
atgtctctttccgaagaagcaatcactcttcagcgtgctgcgcacgaactgatgtatttgggtatggacggcagtcccgtctatagcgatgacttgtcacggcggaacggtgaggtctaccgtcttaccatggctttataccggtcgggtgtaaaaggcactaccatcgaagagcaggcaaatgtctgtcttgcccttcttatgggttacagcgcctcttttgtggaccatggcgaaaagcagcagcatgtccaggaagtgctggactgttgttgggatgtgctcgacgcccttcccgcttccttactgaagctccgtctgcttaccgcctgctacggtgaagtgttcgacgagtctttggccgacgaaggccgttccatcatcgcctcctgggattccttatcacttactcccgaacagcaggaagcggttgatgaatttcagaatgtgacagacaatccctatccatgggaatatatcgatgaataaaacttttcatataatgcttaacaataaatccgtattgattaccggaggaacgggttccttcggaaagaagtttgtggaaaccattctccgtgattatccgcaagtaaagaaaattattatttactcccgcgatgagctgaagcaatttgagctgaaacagaaatatcccggtcataagtatccgcaactgcgtttctttatcggtgatgtccgtgacctcgaacgcctgacgcgggcttgcgaaggagtggacgtgattatccatgcagccgccatcaagcaggtggataccgctgaatacaatcccgaagagtgcatcaaaaccaatgtacacggtgcgcagaatgtgataaaggctgctcttgccaccggtgtacagcatgtggtggccctttctactgacaaggcttgtgcccccattaatctttatggcgccaccaagctcacttccgacaagctgtttactgctgccaacaatatcagcggttccaagaacatccggttctccgtagtccgttatggcaatgtgatgggttcccgcggttccgtaatccctttctttatcaacaagcgtgacaacggggcgaaggaacttcccataaccgatatgcgcatgacccgtttcaacatttcactggaagccggtgtcgctttggtcatgtatgccatcggacatcacctgggtggtgaaatctttattcctaagattccttcctatcatatccaggacgtggctaccgccattgcacccaatctgccgcaggtggaagtgggcatccgtccgggagagaaactgcacgaggagatgattactgtaaccgatgctcttgatacaatcgatttgggcagatattatgtcattcttccttccgtatctttcaagcacagtcgcgaagagttcatcagacatcacaatgcagtacccgttcccgacggtttccactacagcagtgacaacaatacggagtgggagacagtagagactatgcgcgagaatatcaagaaatacgttgaccctaatttcgaggtgaaatgataagcaagcctattccatacggtcgtcagcatatcacagatgaggacatccgggcagtcatcgataccctgaaaagcgattacctgacacaaggtcccaaaatcagggaatttgaaacgaaatttgccgaatatgtaggtgcacaatatgccgtagcggtgaacaatgctacttcggggcttcatcttgcagctaccgcactgaatgtaaagccgggtgacaaggtgattgtcactcccatgacctttgctgccagtgccaactgcattcgctattgtggcggcgaggtggtattctgtgatattgacaaggatacttacctcatggatatccgtaaactcgaagccatgcttaaagcttctcctcgcggtacttacaaaggtattgttccggttgattttgcaggctatcctttggatctggaagagttcagaaagcttgccgacgagtacggtttgtggattatcgaggatgcctgccatgctcccggcggctatttcatggacagtaaaggcaagaaacaacattgtggtaacggttgttttgccgactgtgccgtattctctttccatcccgtgaaacatatcgctacgggtgagggaggcatggtgaccaccaacagcaaggagctctatgacaagctttgtctttaccgtacgcatggcattacgaaagaccctgctttattgcacgagcatcatggtggctggtattacgagatgcaggagttagggtataattaccgtctgactgattttcaggctgccttgggtatttctcagctggagcgtgcgaaagcaggtcttgaacgtcgtcatgaaatcgtaagacgctataatgaagcgttttccggaatagatggtatcaagactccgttcaatactgccgatgtctatcatgcttatcacctttatatcattcaagtagctgaccgcttgggtctttataattatctgcacgagaacaatgtctatgcgcaggttcattatgctccgcttcatctgatgccttactatcagcagtggggcaataggaaaggcgatttacctatagtagaagagtattacgaacattgtctgagtcttccgatgtatcccacgctgacggacgaggaacaggagtatgtgattgaaaaggttatagaatttgtagcgaaatgaaaaatatagcaatcattcctgcacgtggcggcagtaaacgtattccgcgtaagaatatcaagccctttatgggtaaacctatcattgcatattccatagaggcagctttacaaagcggtctttttgaggaggtgatggtttctaccgatgatgaggagattgccggaatagcttgtaagtatggtgccaaagttccttttatgcggagtgccgagatgtcaaatgactatgccggtactgatgatgtaattcttgaagtactgaggaagtataaagagcaaggcagggagtttgaaacggtttgttgcatttactcaacggctccttttgtcactcccgaaagactccgggaagcatacggaaaaatgaattcggagatagattccgttttcacttgtgtggcttattcctatcctatacagcgcagccttcacatcgtggatggaaaaattagtatggtttatcccgaatacaaaaatgcacgttcccaagatttagaaccgatttatcacgatgccggtcagttctatttctctcgcactgctccctttgtggagagccggactttttggggtgagaatacagccgggttggtgctttccgaacttgaagtgcaggaccttgatacacagactgactgggcattggcagagatgaagtatgagttgcttcataaatgatgtaatgcagaaaatctatctccgtgccgatgcaagtgctgccatcggctacggtcactttattcgtactctggctttggccgatatgctgaaggacgattttgattgtaccttctttacttgccatcctaccccttatcaggtgagtgagatggagaaggtatgtcctttcatccccttacaggaagaatcacattatgatgagttcctttcccttttgcaaggtgacgaaattgtggtacttgacaactatttctttactactgattaccagcgtgccatcaagcaaaaaggttgctgtctggtgtgtgtggatgatatgcacgacaagcactatgtggctgatcttatagtcaatcagggattgggttacacgcgtgatgactattcgtgtgaaccatatactcaatttgcctttgggcttcaattttcattgttgaggaggcctttcttcaatgttgcgctgcagaataaacggaacaattattcaggagatttatatgtattggtggcttttggtggttctgatttcttgaatttgacgtatcagaccattcatgcaattaaagccaaagacaatgtgaagaagataacggcaattgtcggtgattcgtatgcagccgagaatatggttgatgaccccaaagtaacctatcagaagaatttgtctgccggttccattgcagacttgtttagtactgtagatgtcgccatattgcctgcctctacgatgatgaatgaggcattggcctgtggaactcctgttataggagggtattatgttgataatcaggagcacgactattatatgtttttgcgtgaagggctgattcagggggcgggtgattataccgatgccgctgcctttactcttgttgctgagaatttggataagatggccattcgtaaaagacatgccatcactccggatattcccaaacggtttgtcaatttgtttaaaagtctgttgatatgcaagtaacttcacaaagagcttcggccatattgtataattatctgtctggcaaccattttgataaaccgttcttattgccggcaaatgtgtgtcctgtagtgcccctgtcgtttatgaaagcaggtgtcggttttgagtttatagacatagatgaaagccatgccatgtcaaccgagaaatgtttgacagctatagaggcgggaaaatattccggtcttgtatttgtgcatgcctacgggaaaaagtatgacaacaaagaattttaccgggcagtgaaaagtctcgatccaaatctttgtatcattgatgattgttgcttgtgcattcccgaattggcagattccttgcctgaaaatgtggatctctgcctttacagtaccggatatgccaaattcatagaactttcctatggtggctatgcaagttttagggggggtacgaagttgttgattatcagtatgatagcattagtgaacaaaagcattcggtatatataaggaaatgtctcctggagaatgtcagatatatgcttccggctgactatccttggctggacgcctcaaatttgcaaatgaccgatgaggaatattttgacatcattgaaagaaagctcccaaaagtgattgcggaaaaagagaaaataaacaagatatacaggaatctgcttcctgaatcgattcagatgggagatgatttccagaactggaggttcatgattgtcatcgagaaccggcagaaggttcttgacgcaatattcaaggccggtctgtttgccgggactaatttcccttcggtttcatacatgttcaaaggtgtttcttctcctgttgcggaagtggaggcgaagtatatcgtcaatttgtttaatgatttccggttcagtgaagcacaggcaagaaagatctgtgatgtgataaattcggttatatgaataaaagattattgatactgggcgcaggtgaaatgcaggttcctgtcatccgaaaggcgaacgatatgggattgcataccatagtcgcagatatggatgcgaatgctccgggaatggggtacgcctcggaaccggttcttgtcagcacgatggataaggaaggtgttttggaatgtgccaaacgtcactctgttgacggcatacttactacaagtgacgcgcctgtaaatgtggtttcctatgtcggggaacagctggggcttccgtccatgtccactgaggtcgcaaaaatctgtacaaacaaatacttgcagagggaaatgtttgcggccaacgggattgatgtaccatttttcatgctttgtgataaagatacggacttgggcacattgcaagattatccatatattgtcaaaccggtagattcctctgcaagccgcggagtaaaaaaggttacaaatcataaagaacttgtacttgctttttccgaagctctcggttattcccgtaccggaaaggccattgtcgagggctttataacaggccgtgaattcagtgttgaaacatatacgcaaaacaataaaactaccgttgtcactattacggagaaactttgtatcggtgaggcagaaggcttctttgttgaagatacgcacattgaaccggcgcgtataacgaaacaggagtgggagctggtttcggagaccgtatcaaaagcactttgcctgattggacttaataattgcccctcgcatacagaaataaagctgaatgaatcgggcgcttatatcatagaaattgcttgtcggcttggaggagattatataacctctgatttggttccattgtcaaccgggatagatatgcagagaaatctggtgaactgttctcttggtttgcccgttgatgtccttcgcaaacatgaaaaatgctcagcggtacagttccttaatccgctcaactatcagcgttgtgtggattttctaagctcttcccggtcatcggctgtttttcggtctgaaataagaccttattctgaaaaaaaataaaaaactctttagaccgtttagggtatatcatacttcagactgatagtatggaagagcttgaaagtattctaaggacgattaaatagtaaagacatgagagataagtgtatgattgtggctgagatgtctgccaaccataacggtaagaaagaaacagccattgaaaccgtcagggctgcaaaacgtgccggagccgatgccgtcaagttgcagacctatcgggctgataccattacgcttcgctgtgacaagcctgattttataattaatgaaggctctatatgggacgggcaatatttttatgatttgtatgaacaggcttatactccttgggagtggcatgaagagttgttccatgtggccaaggaagaaggactgatctgtttttcttctccttttgataagacagccgtcgatatgcttgaggctttggactgtcccgtttataagatagcttctttcgaaattacggatattccattgatagaatacgcggcttcgaagcataagccgatggtacttgctacaggcatagccaccgaagaagatattcaattggctgttgaagcttgccgcagaatgggaaataatgatattacggttcttaagtgtacctcttcttatccggctccagttgaggaagccaatctttgtatgattcgtgatttggcagaacgtttccaggtaaaaagtggactttccgaccataccctggggagtgtctctcccattgtggcggttactcaaggtgcgagtatgatagaaaagcactttattttgaatcgttccatcggtggtccggattgttctttttctatggaagagaaagattttgcccaaatggtaaaagatgtgcgcatggctgagttatctttggggaaaacgacttacgaattgacggagaaaatgagaggtagccgttccgcatcacgttctctctatgtggccgaggatatgaaggccggagaagtgattacggagcggaacgttcgctccgtccgtccgggcttcggcctgcaccccaaatatctgaaagatatattgggaaagaacgtgaaccgggatttggagaaagggacgaggtttgcattggagtacgtgaatggttag

SEQ ID NO: 532 - DNA, 7280 bp, unidentified
  source 1..7280: mol_type = unassigned DNA
atgagtttcaatattcctaaaagtgacaaaaaaagggttatcattgtcggtggtggttttgggggtctgaaattggccaataaattgaaaaggtcaaattttcaggttgttttagtagacaagaataattatcatcaatttcctcctcttgtatatcaggtagcttcgtcgggaatggagccgagctctatttcatttccatttcgaaaaatttttcaaaaacgtaaagatttctattttcgtatggcagaggtcagagctatctttccagaaatgaatatgatacagacatctatcggtaaagctgaatatgattatctggtatttgctgcagggacaacaacgaatttctttggaaatgaacatatagaagatgaggctatgcctatgaaaactgtgtcagaagccatgggattgcggaatgctctactttcaaatatagaaaggtcaataacctgctctacagataaagaacggcaggagcttctcaatattgttattgttggaggtggggctacaggcgttgaaattgcaggagttttatcagaaatgaaacggtttgtactccctcatgattatcccgatatgccaagtagtctgatgcatatatatcttatagaagccggacctcgtttattgccgggtatgtcgacagaatcttcagaaaaagccgaacaattcttaagagaaatgggagtaaatatattactgaataagaaagttgtcgattataaagatcataaagtaattcttgaagatggctcagagattgcaactcggacatttatatgggttagtggtgttactgctattccagtgggtaatttgagtccggcactattgggacgcggtagaagaatcaaagttgatgaatttaatcgcgttgaagggatgaataatgtatttgcaattggagatcaatgtattcagacttctgataaagattatcctaatggacatcctcaattggctcaggttgcgattcaacaaggaaagttacttgctgaaaatttaaaacgcatcgaaaaaagtaaatccttaaaaccctttcactatcgaaatttaggatcaatggcaacggtaggacgaaatcgtgctgtagccgaattcagcaaaataaagatgcaaggttggtttgcatgggttatgtggttagttgtacatttacgctcgattcttggagtacgaaataaagtagtcgttcttttgaattggatatggaactatcttacttatgaccaatctttacgaatgatagtatatgcgaaaaaagcaaaagaagttagagaaagagaagctttagaagcaaagacacacttaggcaatgatattttacatccggataataaataaagattatgtgtgttattcgttaaaaaaaatatcagacaggaaaaatttcctgcctgatattttttatatcatttgaccaatgtaacacttaatggctgctgtattgccgcagcagcttgttctagataggaaaaccaggattctggagtatcaaatccgtatttactccatcctgctccccaataatatacgaaatctgaacctggagtatactcgctgatagcaagaagttgtccatctgctcctcctctttcatttgttttttctttttcactgtaaaataccggtttcgcatcgttcaaggcttgtggaaatacagctccgacatagattataccattgttattgtcaacattatccgttgggtctgcatatccgatataacccttatcagcagacgcaacatatcggcatacatctgctggttcatgaaggacaatacctgcaacaataggtgtattttctttcagattgctatatgacacagttgtcttatttaattgggtaccagcatccaaacttataatacgagtttcaacaatatcactctctccttttacggtcaaagggttatattctaatttcaccgtgaaacgtagtggcccgttatctaagatttcgaaagatttataacaataagggtaaagaatagaatcattgaccatcagagcagcagtaccacctcctaatgtaggacctaccttatagcaatccaatccattaccatgatctacatggtaagaaactgatttatataattcatcagcagctttaggatcagtcttttttagttcagcaatttttgctttggtttcaggattcaattctcctgcatatctatcttctacaacaagttcaggaacagattttacccaaatatcatatccaaaagcacgctctccggtagcttgaagagccggaccatatgtacgaaatgcaattttatcgttttcccaagctatatcatcaacacgttcaggatattgttttcctgtcgtcattgtcagaaactgctcaggagtacctggttttattacatattctgattttgtattggctttaacatttgctggaaaaatgattttttcatcataagtaatctggtaaggtacttgctgtccttgagcatctattataataaatgtagccgtatcattaagttgcaatttttctgcaacagaggacattgctacttctacaatttcattgctccggtcaaaagaagaatcattttgaatggctatttgtacctcttttttttcagtacacgaaaaaccaacaatggaaaataagcttaaaaaaagtatttttctcatttttgttatataattaaagaaaccctacatagtcttgtaacttaaaagttacaagacttgtaaggtttagatataaaatttagaatattatttaggttgtttcccgatatatgctaatataccaccatccacataaaggatatgaccgtttacaaagtctgatgcttcagaggcaaggaatactgccggtcccatcaaatcttcaggcgttccccaacgtgcagcaggagttttagcaacaataaatgcatcaaatggatgtcttgaaccatcagcttgtttttctcttaaaggagctgtttgtggtgttgcaatgtaacccggacctataccattacattgaatattgtattctccatattcagaggcaatattgcgagtaagcatcttcaatcctcctttagcagcagcataagctgaaacagtttcacgtccgagttcactcatcatagagcatatattgataattttaccatgacctttttttatcatactggggataactgctttagaaacaataaaaggaccatttaaatctatatctattacttggcggaaatctgcagcagacatttcatgcataggtatacgcttgataattcctgcattatttacaagaatatcaataactccaacttctttttcgatttgagcaaccattgcatcaacctggtcttctttagttacatcacatacataaccatgagccttaattccttcagcttcataagcagcaagacctttttctaccaattcaggtttgatgtcattgaaaacgatttttgcaccagcttgagcaaaagctgtagccaaagcaaaaccaattccataagaagcacctgttacaagtgcaaccttaccttctaatgaaaagtttaccataaaaataaagttagtgtgttttgttaattaattcgatttatcgcaattctgtatttttgtagaaatcttgatctccataatctagattttcaccacccataccccatataaaagtataattacgagttgctgcagctgagtgtattgaccattcaggagataatacagcttgttctccttgcatccatatatgacgagtctcagtaggttctcccataaagtggcatacagcttcaccttctggaacctcaaaatagaaatacgcttccatacgacggctatgagtatgtgctggcatcgtgttccatacactacctggttgtaattcggtcatacccatctgtaattggcaggtttccaatacctgagaaaccaacattttattgatattcctatgattagatccttctaatgagcccatttctgcaaccacagcatcagcttttgtcacttttttatcaggatatgtcttatgagcaggtgcagagttaaaatagaattttgcaggatttttcggatcaatgctttcaaatgtaacagtcctttcgcctgctccaagatataatgcttctttataattcaaatcaaatattgcatctccggcttttactctaccaggtcctccaacgttgaatatacctaattccctgcgagagaggaaatgtgttgcttttaaaggatctatggcttcaagtattaatgtttctcctactggcttggctccacctacaataagtctgtcatacatagaataaaccatgtttacttcattatcggtaaagattttttcgatcaaaaaatctccacgtaatcttgttgtatcataactctttgcatcacggggatcacatgcatagcgaagttcataatttgttttcataagtatctgttgttaaatatgtaaataactcaatttatataatatcgatatcacattttatatatgtaagtacgtgaaaatgtgattgcgtaatcgattgcacaaatgtataaaaaaaatattattctacaattttttttctttactttttttcttatctctcattttcaaggaagactcccttttcaccaaatccggttgtaataaaatacattctctgtgctccatttcgctttcatggttcattttttttaataaaagttctgctacatttttacccatttcccggtttttttggtctactgaagtcaaaggaggatcaacaaacgaatcaaaaggttcattggcaaagccaacgacagatatatcttgaggaatacgtaatccaccgttacgcagtgtatgcataacccctattgcagaataatctccggcagagaaaattccatcagggcgatttttcatatttaatattttgagtccagcctcctctcctgttactaatgtaatgctgttttcaagaattagctcatcttctacaggtatttttgcgtcttcaagggcctttatataaccttctttgcgttttcggtatacactaagagtcataggtcctgccaaatgagcaatacgacggcatccttgtgatattaaatgctgtacagcatcataggaagcttggaaattatcaacttctaccatgctactaataggttctaaaggaactcggtcgaaaaagacaacaggaataccggcagaaattgctgtttcaaaatgtttataatcaatggtttctgatgccaaagaaacggctaatccatctattttttttgacatcatggttttaacaattgctttttcatcatcatatcgttcgtttgattgagatacaagtacactatacccgttttcatgagctatactttctataccaccgataacagaagcaaagaaatgacgatcgatacgtggaacaattactccaatgacaaagccttttcctgttcgtaaatgatgagctactgggtctggatgataattcattttttttgctaattccaaaaccgcagctttcatttttgcactaattctcggatgattttgtaaagctctcgatacggtagaggctgaagtgtttaattctttagccaaatcattgatagtaactttatgtattccagacatcttctttatcttttagtaaattttgtggcgacccatttatttttctctatataattttcaaatttcaggtcgcatttctctgcttcttctttaattacaggaatatcatctacatagaacccactgaaatatatttctgacccagggtgcatacatcgcgcatagacgtgcatatcatttaataaaatattacgattgatattggcatatataatatcatatgtttcgtttcctaataattctactccacctaattttacagaaatatctgaaacattatttaatgcaatattctctactgcgttttcgtaagcaaaggggtctatatctatagctgttattttgtcagctccccgttttgccgctaaaatcgctaaaacagctgtaccacatcccatatctaatacttttttccctgaaacatcccctttcaatatacttttaagtatcagacttgttgtttcatgatgacctgttccaaatgccattttgggatcaataataatggaatattttacttgtggtatattcttgtgatgtgtactgtatatgacacattcattatctataacaataggctggaaatagttcttttcccattcctcattccaatttttccctttgatcgattctattacataacttatggttgcattgaatggaaagttttcgataacagactctaacttttctttattgaataaggatgtttgaatataagcatctaatcctgtcgctgtctgaacaaaactctcaaatcctatgtccgcaagtaatgctgataaaatatccgatacagtttcggaatatggtgtaatttggacttttacattaatataatcattcattcttccttgttttactatatcttatttttgtattatccgttgtcctgcatatatttttgaaaaaaattttcaacttttcatttttttcatcaatctgggatatacaatattttttacgtgcccataattgggttgtaattgcaagactttttggtacatctttttggcttcagtataattttcatttttttcttcgacaagacctatagttgtaagtaactgtatgtacatccaattattctttatatatccatcatgactttccatatatttcaaggctttttggtagcctgctaatgccttgtctttatctcctccaaacatagatggcatatagaaaaggatattggaatacaagatatttacataaggattatcagggttcagagatattgatttttttgccttggacatcatacctttagccaatgttgctgcttttatcggagagagagctatttggtatccaataaggtttgccatcagtcctaataataaagcatcattcggtgtttgtttgtacatttggtttgccaaagccaaagcatttgccaatactctttccgcatcgtcttttctttttttatccaacaaatgtcccacaagaccgtaatagtaagtcagtgtttcgagttgacaatcatggttctgccactctggatccttcgaaattttattaatcaagatttcccactggggcattttaccattgatatacatattaaatgctgttgctttgtagtcaatattagcagcttgaattaaagatatggataaaaataataatattactaaaattgatgttatttttttcat

SEQ ID NO: 533 - DNA, 24305 bp, unidentified
  source 1..24305: mol_type = unassigned DNA
tcattccgcgcgctcatagcggacagtgaacccgcccgcgtccgccatccactgcgcaacggtcgcctccatcgccgcgacggtcgcgtcccagagttccgctgcgcgctcgccggaaagataccgttcgcggcaggaaacacgttcatcctccaaaacacgctgcaagtcgttgtcgtccagatacggatacagcgccgaatcacgtgtgatgtccgctggcgtgagggagtccagcagcagctccggcgcgggcagcgtcagcgtcagcacagacccgtcgcgtgtcatggtcacctgctgcaaatcaatgccgaaactgccctcataggtgtaatcggcgttgatgctcgccactgtgccgaggaacgccgccttgacttcgtagttcagcgcaccctcttcggtgacgtgcagcgtctccagcttcgcgctctgctccagcttctgggacagcacgacggacgcgcgaatcgccgcggcggactcatccggcatgatgcgcgcgatccacttcgcggcgtacggcagcagcacaatcaccagcacgagcgtcagcgcggaggtaatcagccccaacagccactttccgatgcgcttcatagtcggcctcctgtccagatgtgcagctgaacgagcagcggcacaatcagatagcggaagatttccacggcgacgaacgccacgccaatcagcgcgaaaacgtacagccagacgcggcgatggcggtgcttttcccgcttgcggcggcacggcggctcatcgggcggcggctggggaatataggtgctctgcgcgggcggcgtctgctgtcggaaacggcggattgtgccgtccggacgctgctcgtagcgttcgtcttgcggtagtttgggctgcatgagcgtcatctccttccgtggctgcattgtgtgattacgaagggcaaaaagcgcggattcccacgcaaaaccgacgatgttggtcgtaccccttccttattatacgacaaaatcagcaagttttcctgcattttcggaagaaaaagcaaaaaagcaggaaaaatacagacggcacggattttcctggaagacaattgacatacggaaacaggtgtggtaaaataagcaaggtggtttcaggtgatttttgtgtccgattcgtcggtcagaagatagtgtaaaagtttgccgatcgcaaaagcatcggcggcgaacgggagggggacggaaacgatgacggaagcaacggtgcagcagtcggcgatgaccatgcgcgagcagatttggctcaatcgtgagcaggtgcgcaaggaaaaaccggcctatcgggcgctgaaacgcgcgcaggatattttcttctccctgctggcgctgattgtgctttcgccgctgctgctgattgtagcgctcgcgattgtcattgatgacccgaaaggctcgccgatttttacgcaggtgcgcagcggcattgacggcaaggagtttcgcatccacaaattccgctccatgtgcgtggacgctgaggcgaagctggcggatttgaagcgccgcacagagatgaacggcccgattttcaagcaaaaggatgacccgcgcatcacccatgtcgggcatttcatccgcaagtgcggcatcgacgagctgccccagttgtgggatattctggttggcagcatgagcatcgtcgggccacgtccgccgctgccgtgtgaagtggcagcgtatacggattacgagcgccagcgcctgtatgtccgtcccggtctgacctgcatttggcagattcagccgaaccgcaatgacgtgacgtttgacgagtggatggacatggatatgcgctacatccgcgatcgcaccttcctgctggactggaagctgattttcggcacggtatggacggtttttgcgggcacgggcgaataaaaagcgtgcataaatatgccgctggacgggaaatgcaaagaaatcatcggaaagcgtgtgtatgccaaggacgtcaccacgcttttttcgcgtttcatattatcccgttttcaaattcgcggcgcaactgggtgcattctcataaggcgacgaacgttgccacgctcggaaaaagatataattaggaagagaagctgataaaactgcattttccacagaatttatcgagatttacttgcccaataacggcttgcatggtataatgaaaaatgcttgatgggtatgtacctgtcggcagatggttcgccgcaatgtttgcatgacgaacttttttttcaaaaacgagacgatggggggggacagcatgagagcctacaagattgcggtcgccggcgcgggctacgtcggcatggcgatggcggtgctgctgtcccagcatcatcaggtgacagtggtggatattgtgccggaaaaaatcagcatgatcaatcgccgccaatcgcctgtgcgggatgacgtgatgcagcaggttttgtcgcacacgcccctgcaactgagcgcaacgctcaacgcccaagccgcctatgccgatgcggacttcgtcatcattgccgtcccgacgaattacgatgatgttacccagcgcttccagacggcggcggtggaggaggttatcgggctggtcacgcagtgcaatccagatgcggcggtggtcatcaaatccaccgtcccggtcgggtacaccgcgtcggtgcgcgagaaattccataacaggaacatcctcttcagcccggagttcctgcgcgaatcgcacgcaatggaggacagcctgcgcccaagccgcattattgtcggcacggacatgcaggatacgcgcctgaccgcgtccgcccgcacgttcgctgcgctattgcaggaaggcgcggaaaagccgaacgtggacacgctgctgatgggcttcagcgaggcggaggcggtcaagctgttcgccaacacctatctggcgctgcgcgtggcatacttcaatgagctggacacctacgcggagagcaagggcttgaacacacggcagattctggatggcgtgtgtctcgacccgcgcatcggcagccattacaacaacccatcgttcggctacggcggctactgcctgccgaaggacaccaagcagctgctggcgaactacgctgatgtgccgcagaacatgatttccgccattgtcgagagcaacaagacgcgcaagaactttattgccgaccgcgtgatggcgctgacgaaggaagatcatcccgttattggcgtctaccgcctgacgatgaagcacggcagcgacaacttccgccaaagcagcatacagggcgtgatgcagcgcctgaaggcgaaaggcgcatccatcgtgatttacgagccgacactgccggatggtgaaacgttttccggcagcagggtggtcaacgacttggcgcaattcaaggcaatgagccgcatcatcgtggcgaaccgctacgacaaggcgcttgatgatgtgcaggatagggtgtatacgcgcgatattttccagcgcgactaagtacgactgaataagggagcggtaatcatatgcagcatggactaccagaacaggcgatagaaccgacagcatcccgcacgggcgcgaataaacttggctatcgtgccgtcaagcgggcgttcgacctgacggcgacggcaatggcggttatcgtactttcgccgctgttcctgattctttccgtcattgtctatctgggtgatcccggcgctgtcatctacgggcaggagcgtatcggcaagaatggcaagccgttcaaaatgtggaaattcaggagcatgtaccggaatgctgaccagatgattgatcagctgagcgaggagcagaagcgccagtatcatacggagttcaaaatcgacaatgacccgcgcatcacgccgataggcaatttcctgcgcaaaacgagtttggacgagctgccgcagctgttcaatgttcttgcgggcgaaatgagcctcgtcggaccgcggccgctgctgaaatcggaaatccagcagtattatgcggattcggcggatgtgctgctgtccgtcaagccaggcgtgacgggctattggcaggcatacgcgcgcaacaatgcgacctaccagagcgggcatcggcagcagatggagatgacatacatccgccaggcgtcgatatggctggactgcaagattctaatgaaaaccgtggttgctgtcctccgcagggacggcgcgaagtgagggcaaagcaatgaattacctgattttcggcggttccggcttcatcggcacacacctgattcaccgcttgaaagatgcgtgcataaagcccggcgactgcatttacgatttggatttggtcatgcccggcgaagaaggcgttgtgcccggcatcgtggagaaaaacgagggggtcatctatcgccgcgtggatgtgcgcaagccgattgcccttgatttcacgcctacgccggatgatgtgattttcaaccttgcggcggtgcacaggacgccgggacatccggattacgcctatttcgagacgaacattcgcggcgcggagaatgtgaccgcctttgcggagcagcacggcatccgcaaaatcctcttcaccagctccattgcgccctatggtgcggcggaggagctgaaaacggagaacacgctgcctacgccaaacacgccatacggcatcagcaagctggtggcggagaaaatccaccagatttggcaggcaagggaagcgaaccgcgaactgacgattgtacggccgggcattgtgtatggcaagggtgagcatggcaatatgacccgcctgtacaacagccagaagaagcactatttcttttacgcagggcgcaaggatacggtgaaggcgtgcatttatgtgaaggaactggtgcgtttcttccaatatcggatgattgaccatgattttccgggtgtggatgtgtacaactgcacgttcgagccggcgtacaccatcgagcagatatgcagcgccatgcaggcggcgaccgggatgaagcgccatattccgctgattccgggcggactgctgatgaccgcggcgacgattcttggccccatcggcggcaagaaagtcggcattcacccggcgcgcgtgaagaaactgatggtgagcacgaacatcagcggccaaaagctggcgaagagcggctacgcgttccacgcggggctggaggacaccttccgcgactggttcgaggactgcggtaaacaaggcttgtattgaacatccgacgcgatgaggaggaaaatgatgaaagttgtcattcttgccggcggcttcggcacacgaatttctgaggaatccgcattcaagcccaagcccatgattgagattggcggtatgcccatcctgtggcatatcatgaagacatattctgcctatggctacaacgaatttgtgatttgtgcgggctacaagcagcacgtcatcaaagagtggtttgcggattacttcctgcacacctccgacatcacgttcgattacacgcatggcacgaacgagatgattgtgcacaacaagcacgccgagccgtggcgcgtgacggttgtcgacactggcttaaatacccagacaggggggcgcgtcaagcgtatccgcgagtatatcggcaatgagccgttcatgctgacctatggcgacgcggtgggcgacgtgaacattgcggaactggtggcattccatcaggcgcacgggaaaatcggcaccatgtcgatgtacaacttcgggcagaacaagggcgtggtggaagtcggtgcgaatagcgtgattgacgctttccgcgagaagtcggacatggacggcgacctcatcaacatcggcttcatggtattccagccggagctgtttgacctgattgagggcgatgaaaccgtgtttgagaaaggcccgctgaccaaacttgtcgcacagaaacagctggtggggtacatccaccaaggcttctggcagtgcatggacacgctgcgggagaaacagaagctggagcagctgtgggcgtcgggcaatgcgccgtggaaggtgtgggaaaaatgaagcagttcgatttgtcgttttatcagggcaagaaagtgttcgtgacgggacataccggcttcaagggctcgtggctgtgcaaggtgctcgccaatgccggggcgattgttacggggtattcactgaatccccctacgtcgccgtccttgtttgaaatcgctgatattgcgcaggatgtgcactcggttatcggcgatatccgcgattatgcgacgctgaaggccgcgtttgacgccgcacagccggagattgtgctgcatctggcggcgcagcccatcgttcgtgacagctacaaaaatcctgcttacacctatgaaacgaacgtcatgggcacggtgaatattctggagtgcgtgcgaaacagcaattgcgtcaagtccttcctgaatgtgacgaccgacaaggtgtacctgaacaaggagtgggcgtggggctaccgcgagaacgaggagctggacggcttcgacccgtactccaattccaagtcctgctcggagctggtgacgcacagctacaagaacagcttttttgctgatgggcgcgtagcaatctccacagcgcgcgcaggcaatgtcatcggcggcggcgacttcgccaacgaccgcatcatcccggactgcatccgcgcggcgatgaagcaggaggatattgtggtgcgcaacccgttctccacccgcccgtatcagcatgtgctggagccgctgtatgcctacctgatgattgccgccatgcagtacgaggacggcaagtacgctggctattataacgttggcccggatgatgtggactgcttccagaccggcgcgttggtggatttgttcgtgcgcaagtggggcaatggcatgaagtgggtcaaccgctatgacggcggcccgcacgaggcgaacttcctgaagctggactgcgccaagctcaagacgacgttcggctggaagccccactggaatctggacacggcgattgagaaagttgccgaatggagcaagtgctatctgtccggcggcgatgttcgcgcgtgcatggacgaagaaatcacggcatttttgtcggcaggagaataagatggagaatgtaatcgttaccggtgcaaacggttttatcggcaaaacgctggtgaatgcgctgctggcaaagggctgccgtgtcacggcactggatgtccgctttgatgatgtgctggcggatgacccgcgcgtcacctgcatcagcgtgctgaacaaggacgtgcctgcccttgcgaaggagattcccgcggcggattatcactgcttcttccacttggcgtgggcgggcacatccgggcctgcgcgcgcggattatgatgtgcagctgtcgaacgtcaagctgacgtgcgactacatcaagctgtgcgccgaggtgggctgcaagcgtgtggtgtatgcatccagcatcaacgagatggaaacctacgagtatcttcagtcggatgatattgacccggcgggcggctacatctacggcacgggcaagctggcggcgcacctgatgggcgaaacggtcgccaaaatgaccggtgtggaattcatcccggtcatcatcaccaacatctatggcgtgggtgaaaaatccgcgcggatgatttacaccgccatccgcaagctcatccacaaagagcattgctccttcacggcggggtatcagacgtacgacttcatctatatcaccgatgccatcaacgccatcatcgccgtggcggaaaaaggcaagccgttcaaccgctactacatcggttctggtgagcctaagccgctgcgggagttcctgctggaaatgcgggatttggttgacccggcggctgaaattgggctgggggatttgcccttcaagggtgtgaacgtctcctacgaccagttcgatttgaagaaggttgaacgggacacgggctatgtcaatcagattccgtttgcgcagggcatcaagatgacggcggattatattcgggaggaagcataaaatggtgcagaagtttgattttcagccgctggatttgcagggtgcgtaccgcatcaagcctttttatgccacagacaaccgcggcggcttgattaaggattacaatgttgacaccttccgcgcgaatggcattgaccacgatttgaaggaagtgttctacaccatttccaagcgcggcgtgattcgcgcgacgcacttccagctggttaaacagcaggcgaagctggtgcgctgcatctccggccatgtgtatgacgtgattgtggatttgcgcccggattcgccaacgttcgggcagtggcgcggcttccacctcacgggcgaaaacacggagatgctgcttgtgccgcagtatttcgggcacggctatctggtcattgaggattcggtagtcagctacaagtgcgccgaggtgttctatggcgagggcgattccggcatcatgtacaatgacccggatatcggcattgaatggccttttgagttgattggcggcaaggagaacctcattatcagcgaaaaggacttgcacctgatgagttttgcggactacaagaaactgtaaggggagccgaggatggatatcgtctattcttccagcgacagctactgcgagattgcaggaatttccatactgtcgctcttggagcataaccggaacgtcaaggaactcaacctctacctgattgacaaccagatttcggcagagaacaagcagaagctggagaacatgattgcctcgttcggccgcacgctgacgtatctggcgcatccggacattgagaagcgctccgccactgaaatcaacgtcggccgctggaacatcagcacgttctaccgcttgttcctgccctccatgctgcccgaaacagtgaaaaaggtgctgtttattgactgcgatacgctggtcatgcaggacttgacgcccctgtgggaaatggacatgggcgagaagtggctctatggcgtggatgactgccgcggtgctgcctaccgcaccaatttggggcttcagccgacggacaactacatcaacaacggcgttctgctggtggatttggacgcgtggcgcaaaaacaacgtcgaggatatgttcctgcgctacatccgggagaatcagggcgatatcacctttgtggatcagggcgtgcagaacggtgtgctgagcaagctggggcgttcgggcatcctgcatcccaaatataactgcatgacggtctttttcgcgtttgattacaagaacctcatcaagctgcgcaagccgcctgtgccgggcgaccccgcgcagtaccgggaagcggtggagaatccggcgattgtccacttccagtcgtgctttcgcatgagcatccgcccgtgggtggcgggctgcaagcacccgtatgccaagacgtatctggcatacaaggcgaaaagcccgtggaaggatacgccgatgaagcctgacgaccgcacagcgccgcagaaggtgctcagtgctgtcacgagcgccatgccggagaggctgatggtggactgcatctccttcgttcacaccaagatttacccgctggcgaggaatttgaaacagaggatgaacaaaaaatgagccgataggagaacaagatgcttgattttgatttactgaaagactgctacggctgcggcgcgtgcgtcaacgtctgcccgcgcggcgcggtgcatatgacgcagggggcggatggcagctacatccccgaaattgacgaggcgcgctgcatcggctgcggcaggtgcgaccgcgtgtgcatccatcagcacgcggataaaaatcatacgccgctgggcaaggagggctgctacgcggcgtatcagctggatacgcaggcgcgcaaagcgtcggcatccggtggcatgttcttcccactggcgcaggaaatgctgcggcagggcggctatgtgtgcggctgcgtgtggaatgagcagatggacgcggtgcacatcgtctccaataagctggaagatgttgagcggatgcgcagttccaagtatgtgcagagcgacatcggcaattgcttggcgacggttcgtggcctgctgaaggcggggacgcccgtcatgttctgcggcacgccctgccagtgcgcggcgtgtgcggcagtgacgggcaatccggaaaatctgctgctggttgcgctgatttgcgagggggcacccacggcgggcgtctggcagcgctaccgggatgcgaaagcggcgcagtacggcgagaaaatccgcaatgtgaacttccgcagtaaaacgccggtcggctggacgatgccgtattttgtgctgacgacaaaatccggcaagcggcatcaggaaatgagctatcggcagaatccgtatgtgctggcgatgctccaaggtctgacgtaccgccaaagctgctatcattgcgagtttaagggcgacaacggcagcgcggatatcgtcgtcggcgacctctggaaggcaggggaacggcttatccagcaaagcgaaaatcagggaatttccgcgctgattatcaacactcaaaaaggcaaagattgggttgataaagccgcaagcgcgtggttcatggaggaatatccgctggagcgggtgtgcgccaacaattcgatgctggtgcgcgcgggcaaggaaaatgcacatcgggcgcagttcttttcacagctggatgctacgccgattgagacgaacctgaatcagtatattgtgcatgaaaatggcataaagctgcgcgtaacgcaagcgctggttgccgttgggctgtacaagccgctgcggaacgcggtgcgtaagctgcgccggagataaggaggcgcggcatgaaaatactgcttgtaaacaaatactttaatatgcacggcgggtcggaaacctactttttcggtttggcggatttgctgcggcaggcggggcacgaggttatctttttcgccatgcaggatgaaaagaacctgccctgcgaacaaagcgcgtatttcgtcagcaatgtggagtttaacggggagttaaccgccacgcagaagctgaaagccgccttccgcatggtgtattcctttgaagcaaagaaaaaaatctctgcgctgattgaaaaggaaaagccggatatcatccacatcaacctcttccaccgcgtgctgaccgcttccatcgttgatgcggcgaaaaagcacggcatcccggtcgtcctcaccatgcacgacctcaactgcgtctgcccgaatcatgtcatgctcgaccacgggaaaatctgcgaagcgtgcctgcacgggaattactggaattgcgtcaagcgtgtgtgcttcaaggattcgcgggcgaagtgcctgatggccgccatcgagagcgatttcaacaagcgcagcgggctgtacaggaaaattgacctgtttatcacgccgtccgagtgttacaagaacaagctggaagcgtctggactgacaaagtcgcccattgtgcacatgaaaaacttccttccggcggatacgcggtatgccatgcagggcaaacgcggcgattatgtgctgtattatgggcggctttcggcggaaaagggtgtcctgacgctggttcgggcaatggagaagctggaaaatgttccgcttatcattgtcggcactggcccggaggaagatgccatccgcgcggaaatcgaagcgcatcatctaaaccagcgggtaacgatggtcggcttccagtccggcgaaaacctctggcagtatgtgcgcaactgcgcctgcgtggtcgtgccgtccgagtggtacgaagccagcggttataccgcgtgcgaagcgcaggcgatggggaagcccgttgttgcgacaaacgccggtggtctgccggagaatattgttgacggcaaaacgggtttcatcagcccgatgaaggacgaagccgcactggcggatgctatcgggcgcgtgatgcgcttgagcgacgaggaatatcagcggatggcagaaaaatccgtcgccaacgcgaaaaaactcttcgatgcgtccggctatgtagcgaaactgctggttttatacgcaaacctgaaaagaagaggaaattgatgatgaaagtatacacacaaacgtggtatcggggcaataattacggcagcgtactgcagtcctacgcgcttcaacataccatcagcgacatggggtatgcgtgcagcgccctgaattataagcccacaaaggcggatatgtggaagctgaagttcatcaatcacagcctaaaagaaaccatacagtacaaaatcaacgaatatctgatgaagaagaacggcgcgtccgaagctgtcaacaacctctccctgtttgatgattttcgtgcgcagcatatgcagattacgccgccgtgctccactgcgccagaaattgctcggatttgcggtgatgatgccgtattcgtctgcggaagcgaccagatttggaatccatacctctatgatccttactattttctggagtttgtgcaggatagccgccgcaaaatcgcgtatgcgcccagcttcggcgtgatggaaatcccgcacagatgccagcagcggctccgcaaggcgattgctccgttccgctacgtctctgtgcgggaaaagcgcggggcggaaatcgtgcgtgaattgacaggcaaacaggtgatggtggcggttgaccccacgctgttggtgagcatggcgcattggcaaacgcttgcgaagccgattgacagcgaacaaaagtacctgttctgttattttctcagtgaaaatgcgcgatatttggaaaccgcagagaaaatcgcacgggaaaagcatctgacgattcggatgctgccgatggtcgctgcggacttcaagaagccgggaaccgtcaaggagcccgtcggcccgcgcgaatggcttggacttgtgaaaaatgcagattatgtattaaccgattcgttccactgcacgctgttttcgattcgcttccataagcagttcaacgtcctccagcggttcaaggagggtgacaaacgcgggcagaacagccgcattcatacgctgctgcaaacggcaaatatgcagaatcggctggttgtgccgggcgaggatgccacaacggaaatcatcagcgacggctgtttccaaaccgcggatgcgcggatggcggcacaggcagcagattcccggcagtggcttgaacaagcgctgcagtcgtgtgaaggcgcgggcaattcggcgaattgacaaaaatcaagatggaatgtgaagcagcttatgaagattctgcatattacctatgggtttaacggcggcggtgttggattcgtgattgcaaactattgcgcaaaccagccgatgccgggaatagcatttgacattgttggcgagagcatcggcaagccgcatcttttgcaggaacggtttgaaaaagcaggttttcacacgttttatgtcacgcccaaaaagcaaagcctgctgaaaaatatcaaggaaatgcgccgggtgattcaacagggacactacgacgcggtgcatgttcattttgaagaatggtcgtttttgtacctgtggattgccaagctgtgcggcgtgaaagtgcgcgtttgccacgcacacatggcgtatatgaccggcgcttcggctaaaccgcactatcggctgttccgcgtgctgctgaatcgctttgcgacgctccgcctggcgtgctccaaggatgcaggcgaccacctgtacggcaagcatccgtacaccgtgctgaaaaacgcgattgaggcagagaaatacgtctatcatccggaaacgcgccgacaaatccgggcgcaaatggggctgacggacaagtttgtggtgggcgtggtcgggcggctgacatatcagaaaaatccgcagttcaccgtggaaattttcgcgaaagttaaagaaaaaagaccgaacgcggtgctgatgttcgtcgggcagggcgaattggaggaggaaatccgccgcttggtgcagacgaaggggctgacggatagcgtgctgttccttggcctgcgcactgatgtgccggatttactgcaggcgatggatgcgtttgtgctgccgtcacgctttgagggattgggcattgtctatattgaagcgcaagccgcaggcttgaaaacttttgcgacagcggaggttgtgccgcaggaagcgtgcgttgatgaatcgctgttcacctatctgccgcgagaggcaaccgcacagcagtgggcagatgcgatgctggcggcggataccacccagcgggagaacaagcttgaggtgattcaaagccacggctatgacatccatcaggaagctgaaaaactgagagccctttacctgaaaggtaaggcagaaggggaaaaatgaggtacttcagaaatccaaattttatttcgttctgttttttaatcctgattaagcccggctgcatcagcggtatccccgcgctgggaatacttgacacgctgctgaacatgattcgcatcatgctggtgctatttacactcatcgtattgttcaaaaacgcgcaattgcttccggttaatcggctatttggcgtaacaatgctggtggttgcgtcgattctctgggagccaaccgccacgctcattggtggcggcagcattgcggatttcggcgcgctgatgaatgacttgggcatcgcactggtgtgctatattgggctgcgcgcaggatacgattccttcatcgaaggtgtcgcaaaagtttcgggcgcatatgtgctcatcaactgcctgaccgtgattttgttcccggcagggatgtatgcaacaacgaagtattcgcaaaacttcttcctgagttaccggacagcgtggttcgtcatttacctgctggcgttgacaaccacgctgctttggaatgcaaacgttggttcgcacttcacaaaacggtttgcgattgccgtggctgtcgcggcgactctgtcgatgatcttgcagtggacggcgacggggctgttctgctttagcatcggcggtctcgtgctgctctactgcacatggaaaaaaaggaatccgttcaagatttcgacggtgatgctcacggaagcggcggcgttctgggcaatcgtcattgcccgcctgatggacatgttttcgttccttctggtgaacattctgcacaaggacgtgacgctgacgttcagaacgcgcatctgggataacgcacttgcagccatccagcagaatttactaacaggggttggacgactggacgcagcgcagatggaagctattctcggctatggcgtgtcacatccgcacaatcgatacttgtatgtcaccctttgcttcggtatcattgggctggctttattccttctgattgtttactatgcaaacaaaggcacaatcaacccgcatagggtgcgtgaaggcagaattatgatggctgccttcattgctctgctgagcgctgcgcaggtggaatcgctctctgccacgggcggttatgcgattccgctgtatctcattgctgcggcgctccattgcagggaaggcagaagaaaggaaatgggggagactctccgcagcacatgttgacggcgcgcggaaaaacaactatttatagtagaaaaatctaagtgctgagacgggatgcgcgtcgtgaagggaaatgaatatggagaagaaagtgacttccgcatttggctggaagtttttcgaaaggatatccgtacaaggaactaactttctggttacgttattgcttgccagactgcttacaccgtccgactatggaacagtgtcagttgtgacaatttttattgcgttagcaacgacatttgttcagggcggatttaacacagcgttaattcagaagaaagacgttgatggcaatgattatctcacgattctcgtgttctctgagattgtcgcagcggcgctgtatgctgtgatttttttcgccgcgccttttattagtaatatttatcatacatcggagttaagcagcctcctgcgcgttatggcaatcgttctatttccgggggcgtttaatgcggtgcaggttgcctatgtaacaagagatttgcgtttcaaagtgctgaccatttcaagctttgtgtccgctttgctggcggcggctgtcggaattggcttggcggttgcaggatttggcgcatgggcactggtgatacagcagttggtgaaccaaaccgcgacctgctttgtcacatattgtattgttcggtggattcctaaaggaagattttcagtccagagcctgcggcgacttttgccgtttggcgcaaaagtgttcgcatccaatttcattgtcgccctgtttcttgacataagaagcttgctgattggccagatttattcatcagaagctcttggatttttcaatcgtggcaagcagtttccgcaagccgttatggaaagtgtgaatggcacgattcagacggtgttacttcccgtttattccaaaaagcaggattctgttagcagtgtcgcgaaaatggtttccaaaacggtgagaatatccagtctcctgctgtttcctatgatggttggattggcagcggtcgctgaaccgttggtttcactgctgctgacggacaagtggctggaatgcgtcccgtatttgcagattttcgctattggatacctctttcaggcgatacagctggcgattattcaagcgattaaggcgattggcgacagcggcacaccgctaaagctggaaatcatcaaaaaatgtgtggaagtctttttcctgattgttacgattcggcaaggcgtgctgattttcgcgtcttccttgctgatttgcagtgtgatttctcatctgctgaatatgttcgcagccaaaagaattctaaactatacggttaagcagcaattgatagacattctcccggccaccctgttttcggcagtgatggcggcttgcgtcaagtgcgttactcagcttttgaatggcgcatttgtaagccttgttgcaggaattgcaactggcgtggctgtctaccttctgctgtgcatgctgttccgtgttcccgaaatcaagcagctgaaaaataagctattcaaacgtaagcatgcttaaagcgatgatggtagaaagtggcgggcaaacgtcatgtttcatagctgccgccacaaaatatgggaggaaatacgctatatgaaggggattatccttgcgggaggctccggcacgcgcctttacccgctgacgaaagtaacgtcaaagcaacttttgccggtttacgataaaccgatgatttattatccgatgtccgtactgatgaatgcgggcattcgcgatatcctgattatctccacgccgcaggacacgccgcgctttgagaatctgctgggggatggccggcagttcggcgtgcacctgacgtacgcggttcagccgtcgccggacgggctggcgcaggcgttcctcatcggtgaggatttcatcggcagtgactccgtggcgatggtgcttggcgacaacattttcagcggacatggactaaacaaacggttacatgcggcggttcgcaacgcggaaaacggcaggggcgccaccgttttcggctactatgtggatgacccggaacgcttcggcgttgttgagtttgacaaggccggaaaggcgatttccattgaagaaaagccggcgcatccgaaaagcaactattgtgtgacaggcttgtatttttacgacaaccgcgtggttgagttcgccaaagacctcaagccgtccgcccgtggtgaactggaaattacggatttgaaccgcatttatctggaggatggttcgctgaacgttgaacttttaggtcaaggattcacttggctggacacgggcacgcacgaaagcctggtggatgcgacgaacttcgtgaagacggtagagcagcatcagcaccgtaaaatcggctgtctggaagaaattgcgtatctcaatggctggatcagcaaagaggagctgatggaggtctatgaagtgatgaagaagaatcagtacgggcagtacctgaaagatgtcatggatgggaaatatcaggaacatttatactaaggggggggggagaagcacgatgacgattattgttactggcggcgcaggttttattggcagcaacttcattttccatatgctcaagaagtacccggacgatcggattatctgccttgacaagctgacgtatgcgggcaatctgtccacgcttgcgcccattatggataacccgaatttccgtttcgtgaaggcagatatttgcgatcgggaagcagtctacaagctgtttgaggaagaacatcctgatattgttgtcaattttgcggcggaatcgcatgttgaccgctcgattgagaacccggaaatcttcctgaaaaccaatattattggtacggcgacgctcatggatgcctgccgcaagtatggcatccagcgttaccatcaggtttcgacagacgaggtgtatggcgacctgccactggaccgccccgatctgttttttaccgaagaaacgccgattcacaccagttcgccgtacagcagttccaaggcgggcgctgaccttctggttcaatcgtattaccgcacctatggtctgccggtgtcaatttcccgctgctccaacaactacgggccgtatcattttccggaaaaactgattccgctgatgattgtcaacgcgctggcggataagccactgccggtctacggcgaaggcttgaacgtccgcgactggctgtatgtggaagatcactgcaaggcgattgacctgattatccacaagggccgcgtgggcgaggtttacaacgtcggcgggcacaacgagaagcagaatatcgagattgtgaaaatcatctgcaaagagctgggcaaacccgaaagtttaatcacgcatgtcggcgaccgcaaagggcatgatatgcgctacgccatcgatccgacgaaaatccacaatgagttgggctggctgccggaaacgaagttcgaggacggcatcaaaaagacgatccaatggtatatcaacaaccgcgaatggtgggagacaatcatcagcggcgagtatcagcattactacgcgaagatgtacggcaaccgctgaaccggaggaaatgaacgtgaagttttttgtaacgggtgttggcggacagctggggcatgacgtgatgaatgagctgctcaaacgcgggcatgaaggtgtcggctcggacattcagacggcttatagcggcatcatagacaattcaccggtgtcaaaagcgccgtatataccgctggatatcacagatgttgacgcggtggagagggtcatcacggcagtcaatcccgacgcagtgattcactgcgcagcatggacggcagttgatctggcggagaatgcggagaatcaggaaaaggttcgcgccatcaacgcgggcggcacgcagaacatcgcaaatgtatgcaaaaagttaaattgcaagatgacttacatcagcacggattatgtgtttgatgggcagggaactgcgccgtggaagccggattgcaaggattacaagccgctgaacgtctacggtcaaacgaaactggagggtgaattggcagtcagccggacgctcgataaatacttcatcgtgcgcattgcgtgggtgttcggcttgaatgggaaaaacttcatcaagacgatgctgaacgttggcaaaacgcacgacaccgtccgcgttgtcaacgaccagatcggcacgccgacgtacacgctggacttggcacgcttgctgattgacatgaacgaaaccgacaagtacggatactatcacgcgaccaacgaaggcggttacatcagctggtacgatttcacgaaggaaatctatcggcaggcggggtatacgacgcaagttgtgcctgtgacaaccgctgaatacgggctgagcaaagcggcgcggccgttcaacagtcggctggacaagagcaagctggtggaagctgggtttacgccgctgccgacgtggcaggatgcactgcaccgttatctgcgggaaattgggcagtaaggagaacgccaaaatgggacagattcgagtcgaaaagaacatgaacggcattgcaggactttgcgtgattgaaccagcggttcatggagatgcgcgcggctacttcatggagacgtacaacgagcgcgacatgcgggaggcgggcatcgacgttcacttcgtgcaggacaaccagtcgatgtcaacgaagggtgttctgcgcggactgcacttccagaaaaagtatccgcagtgcaagctggtgcgcgtcgtgcggggcacggtcttcgacgtggcagtggatttgcgcgccgattccgaaacttatgggaaatggtacggcgtcacgctgtcagcggaaaataagaagcaattcctgattccggaaggctttgcgcatggtttccttgtgctgagcgacgaagcggaattctactataaggttagtgacttctggcacccgaacgatgagggcggcttggcatggaatgacccgacaattggcatcgactggcatgtgcggggcgaatatcgcggcagcgcaagtgcggatggctgcacgctggcggacggcacgccgctgaatttgagcgagaaagatcagcagtggctggggctgaaagatacctttaagttttaagacgaatattatcgtaggaggaagctatggcaaacgggcacttcctcctttttattttgcggcagcgggaaaaatcggccatcagcgtgcggaaaaaacacaaattccaaacggaaaacaaaactttgcataaaatgttcggaaaaacgcttgacagcggcggaagaatacggtacaataaagtgtacccaaacggcgcgggatgtgcagtctgggaaatcggcgaagggggaggaaacgtcatgacgaagtgcaagggtgcagttatgatgggttctctttctttccggggacaagcagttgcaggagcgcaccgttcaggggactgaacaggcggcgctcttttgtttgcctgacggcgaaggaggtttcgactttcatgaagaaagttgcagtcatcatgggcagcgacagtgacctgccggtgctgaaaggggcgtttgagcagctgaaaaagctgggcattccctttgaggcgcatgtttattcggcgcatcggacacctgctgaggcggcggcgtttgccgcatccgcgcggaaaagcggtttcggcgtgctgattgcggcggcgggcaaggcggcgcacctcgcgggggcgctcgcggcgcagacaacgctgccggtgattggtattccggttaagtcctcgacgctcgacgggctggacgcgctgctatccaccgtgcagatgcccagcgggatgcctgtggcgacggttgccatcgacggtgcggcgaatgcggcgctgctcgcggcgcagattcttgcggtcgaggacgaagccttggcggaaaagctgctggcgatgcgcaaggcgcagcatgacgcggtcatcgccaaggacgcggcgctggttgttgaataacacaaaacacgaacattctaaatctgcaagcatcaactgttgcggcagacaaccgtgatataataggaggaaacagcaatgaagaagcttgaacagctctatgaaggcaaggcgaagaaggtttttgcgacggatgatccgaacgttgtgctggtggactacaaggacgacgcaaccgcgttcaacggcctcaagaagggcacgattatgggcaagggcgtcatcaacaaccgcgtgacgaatttcctgatgaagatgctggagaagaacggcatcccgacgcattacattgaagagatttccgaccgcgagacgctggtgaagaaggttcacatcgtgccgctggaagtcattgtgcgcaatatcgccgccggctcgctgtccaagcgcctcggtctgcccgaaggcacgaaactcaagcagactgtgctggaatactgctacaaggacgatgagctgggcgacccgatggtcaacgagtaccatattatggcgatgggctgggtctccaagccggtgcttgaccagattgccgcctatgccctgcgcatcaacgagctgctgacggcgtatttgaaggaagtcaacattgagctgattgacttcaagctggagtttggcatcacgaacgacggtcagctggtgctggcggacgaaatcagcccggacacctgccgcttctgggatacccgcacgggcgaaaagctggataaagaccgtttccgccgcgatttgggcaacgtggaagacgcttacatcgaaatccgcaagcgcctgatgggcgaataagaatatctgcaccccggatggcaatcgactgtccggggcgcttgtgtggtactcaaacactggtcagcatgaaggagcaatgaagatgaacaagctggagtcagcctgctatcttgcggagggggacgaagcgccgtttgacaagctgcacgaggagtgcggcgtgttcggcatttaccgcgcggattccgccaacaagagcgtcgtcgcggagacgtatcatgcgctgtatgccttgcagcaccgcggtcaggagagctgcggcattgtcgtcaacgatgatggcgtgatgaaggcgcacaaggacaacggactggtgacggaggtgttcacgcgcgacgcgctgagcaaaatccacgagggcacgatggcggtcggccactgccgctatggtacaacggggatgcacagccgttccaatgcccagccgctgctgattaaccatcaaaaaggcgcgatggcgctggcgcacaacggaaatttgaccaacgcggcggagcttcgcgaacagctggagaagaacggcgcgattttccactgcacgtcggataccgaggtgattgcctacattatcacgcaggagcgcctgaagtgcggttcgattgaacaggcggttttgaatgcgatgcaggtcatcaagggcgcgtattcgctcgtcgtcatgagtccgacgaagctgattgcctgccgcgacccgcatggcttccgcccgctgtgcatgggcagaatcggcgacgatgtggtgtttgcgtcggagagctgcgcgctggatgccatcggcgcgacgttcgagcgcgatattgaggcgggtgaagtcgtcgtcgtcaacgaagaggggattcattcctataagatgcccggcgcgtgccacgacggcatgtgcatcttcgagttcatttatttcgcgcggcccgattccgtcattgacggcagcagcgtccacgaggcgcgcatccgggcgggcagcttcctcgcgcttgaccatccggttcaggcggatgtggtcatcggcgtgccggattccgggctggatgccgccattgggtacagccgcaccagcgggattccctacggcatcggcttcatcaagaacaagtacatcgggcgcacattcatccagccgggacagaagcagcggcaggatgccgtgcgcatcaagctgaatgccatttccgccaccgtcaagggcaagcgcgtcgtcatggtggatgattctatcgtccgcggcacaacctgcgcgcgcattgtccgccttctgcgcgaagcgggcgcgacggaagtgcatgtacgcctgtccgccccgccgttcaccgacccctgcttcttcggcacggacgtggacagcaaggagaacctgattgccgcacaccattcggtggaagaaatcggcaaaatcatcggcgcggactccatcggctttttgtccctggaggcgtgcgacaagctggcggcggacagccactgcggattctgcaaaggctgcttctgcggcaaatatccggttgatccgccgctggtgacggagaaaaacaaattcgaccagcccattcacggcggcaaggtgcaggacgacgactaacgcgacgaatgcgacaaaggagcagacaaccatgatgaagagcgagagcgaaagctacaaggcagcgggtgttgacattaccgccggttacgcgtcggtggaactgatgaagaagcatgtcgcgcggacgatgacggcgggctgtgtcgagggcatcggcggcttcggcggcctgtttgcgctggacgcggcgggcatggaagagccggtgctcgtttccggcacggatggcgttggcacgaagctgaaaatcgccatgctgcttaacaagcatgataccatcggcattgactgcgtggcgatgtgcgtcaacgacgtgatttgctgcggcgcgaagccgctgttcttccttgattatatcgcctgcggcaagaatgtgccggagaaaatcgcgtccatcgtcgcgggcgtggcggaaggctgcgtgcaggcggaatccgcgctcatcggcggtgaaacggcggagcatcccggcatgatgccggaggacgact

SEQ ID NO: 534 - DNA, 39748 bp, unidentified
  source 1..39748: mol_type = unassigned DNA
tattcttattgatgccttttcggaaaaaccacaagacggtgaatcaaaatatgcggatttgccctcaaacattttcttcacggtttcggcatcttcggcagacatcttagcgtcaaccttgtcgcagtcctcaacatcaaaatacacggtaggctcacacgcatagaaactgattttcggcacggcaaatactgcggcggcaacgcataaaacaattgcaaccaccattacagcaatctttttcttcataacattcactccttttcgcttatccctttaaattatattaagcttgtatcattataatttaatcggcatatacaccaattttaaaatcatttatttgtaggttaaaaaatttttcgtcaatgcttacaagagagcaattttacttttgttaaaaaggcacaaattgcatacaaattcaaagccttgcttattgagaaaaatcggtctgaaaatatgcagaaaagcagtttttaccatattataaaggcataaaaagaagaattttgacgaggtagttattataactaaaattgtgagcaaagtaaactttatgtttataaggtattttgcttgtttatttcagtcaacaggattacaataattgtggaaaacggaaaagaatagtattgtttacaacggttatgtgattgaagaggttagaaattaatgaagaaagtcaaaaaaatgctctcacttgcgtttgcaagtctgtttagaagaaacaaaggtcagaataccgtaaaagaaaagcgacagcgctcacaccagataaatatgctggaaggtccgctcgtaaaaaaaattcttcttttcacacttccgcttgcaggatccagtattcttcaacagcttttcaactcaaccgatgttgcagtggtcggcagattttcaagcagtcaggcacttgccgcagtcggaagcaacgctccgctcatcaatatgcttgtgctgttattcacgggactttcggtcggcgcaaatgttttgattgcacgatatatcggtcaaaatgaccgtaaaaaggtttcggaagctgttcacacggtaataacactttcacttatatgcggatttcttcttctgatactcggtcaggttattgcagcaccgctgttaaggctgatgaacacaccggatgatgtaattgaccttgcggcaacatacctgagaatttactttatgggcatgccgtttgtaatgctctacaactttgggtcggcaattttgagaagtgtcggcgacacaagccgtccgctctactgtcttgtaatttcaggtattgtaaatgttcttttgaacctcttctttgtaatcgtctgcgatatgagcgttgcaggagtcggcattgcaacagtaattgccgacggcataagcgccggacttgttatgatgttcctcatcagaaacgaagacgagtcaatcagagtcaatccaaaaaaactttcattcaagaaagaacatctcattatgattttgaaaatcggtgctcctgcaggtattcagggtatggttttctcaatttcaaatgtattcattcagacagccataaacggcttcggttcacaggcggttgcaggctcatcggctgaactcaactttgagtacattacatactatatagtatgtgcgttcagccaggcagccgttacattcacaagtcagaactacggcgcacttcagtttgacagatgcaaaaaggtgtttaggctttgtatgcttttcagctgtattttcacaggctgtgtgagcgttatattcatgctcggaagcggatttttcatcaccttcttcacaaccgaccccaccgttatcaagtacgcaatcatcagaatggcgattgttatgcttcttgagcttatgacaggttcatacgaaatcagcggcggtgcgctcagaggaatcggacattcactcctccctgcaatcctcacaatctttggttctgttgtgttcagaatcatctggctcttcacagtattcaaggcattccacacctacgatatgctccttatggtttaccccgtttcatggcttatcacaggcacatccgttttgattgcctacttcatcatcagaaaaagagaattcaaaaaggtaagcgccgcttttgaaatttaaaatcaaatagatttttacggctgacatcggcattggtgtcagctgtttttgtttagaagaggctctaaaattaaaaaaataataaaaagcaattatttcgtactttttgtgcggaataattgtttttttgctgtattttatgttataatccaattataaacacacggaggtgcgacaatgactaaacggactgttgccaacaattttttatactacattttttgcggattcagcggtgcggttacttcgctgatagtatggctgtttctaaaacttatgggtttgggaatcggtcttgtgtgggatacaattccgtcaaattttgatttcaaattttatccgattattgtctgtacggcgggcggacttattctcggaatatggcaaaagctgacaaatgccgttcccgatgaacttgacgaggttatgaaaaaggtaaaaaaagataaattttacccgtataacaaggtgcttttgctctgcgtttcggcacttttgccccttgttttcgggggaagtcttggccccgaggcaggtttgacaggcgttatcgtcggactttgctactgggcaggaagtcatatgaaagacgctaaaagtaaaattcccgaactaatgcaaatcggcataagcgcaaccctgagtgcggtattctacgcaccgcttttcggtcttgcatcggtcaatgaagaaaggcttgacagcgaagaaaagcctaccgatatccgttcaacaaagcttatttcaaacatcattgccgtactttttgcggcgggaactctgtttttgcttaactccgttttcggcggaagtatgggacttccacgacttggtggttataacattacaaattttgagcgtttgtggggaattcctctcgcacttttgggcgctgtatgcggttttctgtttatcatatcttcaaagattttcggaaaatttttcgcactcattcagggcaagctcggcattattatcagcacaactctcggcggaattatcctcggtgttatgggtacatacctccccctcacaatgttttcgggcgaagaaagcattaccgttgtcaaggaaagctttgccgaatttgcaccgtggattctcattatcagcggtgtgcttaaacttgttctcacaaacatctgcataaagtcgggttggaaaggcggtcacttcttccccgtcatcttctgcggagtgagcatcggctacggtgttgcaatgctcggcggacttgacacggcattctgtgcggcagtcgtaacggcaggacttctcggtgtcacaatgaaaaaaccgcttgccgtaacaatgctccttttgctctgttttgacgcaagagttattccgtggattttgctcgccgcattcctcggaagcattattccgactaaaattttcggcagtaataaaaagaaagctaagtgagcatataaaaaactgctttgcgaaccaccgtttcctttggaacgcattgaaggaatgaccgctcttatgggtggcgaggctttatgcgtgaagaatttaacagcagatactcatttgtaaaatcgtcaatttgtcagggacttgtttggtgtttttggcacacacttttgtggatagttgattcagaatttatgtattcctcaatgccgatataatgttctttgtgatactgacaatcctctatttaatcattactccgcttgccgtgttgttcagaaataagactaaaatccgcaaccaacgctaacatttcggttaaattcagtggatagacacgatcaaatttttaatgtaaaatttgtaggaaattattttttaatatggtgaaaattagtttttcacttcaaaatagtaaaagaaaataatatatacaacttattttaggaggataaatatgcttacacatatcggaacagacactatagaaacagaaagattgatactccgcaaatttaaaatttcagacgacgaggctatgttaaaatattggattgccgataaaaaaattcagtctctgtattccgaacctgtttacaccacaaaagcagaagttgatgaacttctcgaaaaatatatcaattcgtatcaaaaaaatgattactaccgttgggcaatcatagaaaaaaattcaggtgaatgtataggtcagatagcatattttcttgttgacagcaaaaataattttgccgaaatagaatattgcataggctctgattttcaatgcaaaggatatgctaccgaagcaacgaaagcagttatacaatatggatttgataaaattaatctgcacaaggtacagatttgtacaaagacaataaataaaccttcaaagcgtgtcatagaaaaatgcggttttacatatgaaggaacattgcgtgattacttttatatggacggagaatatgtaggtcgattgtatttttccatgttaaaaagtgaatttgaatcaaaacaaaattaaacaggaacatttatctacacaacaacctccccgtaagctgaaatgctttgcagggaggttgtattattcttatatggaattttattttacttgcggataattattgctttgccgttgcaatgaatctttccgtttgaaactgtaactgtttcaccgctgatttcgtttttatagtcgccgtcgggaaggtcaacttttacatctgccgactttgatttaaggctgaaaatgccgacttttttgctcttgttgttgtcacgctcaagaattgcaatatcgttttcatcgtctgcatcagccttgaaataatcgtcatcatcaagaacggttttcttgattgtatcgagctttgcaaaaaggttgctcaaatcaatgcctgtgttgcgtgggaaaacatccttgtcaaaaaggcttggagtttcgtcacaaccgaactcctgacctgcatagatgagagttgaacccttcaagaaatacagaaaagctgtgtaattttcaaggtcgctcttttccttaacatagtggcaaattcgtggctgatcgtgattttcaaggcaacgcattttatcgtaattctgcggataaattgcctcctgataattgagcatatccatataatttgaaagtgtggtttcgcccttcaaatatttgtcgaaaacctcacggatatcgtagtcatattccatatcaaaagcgtcaaaaagctcatagtcgcttgcggcataaataccgctcttgcgagagaacacattgaaagagctgtgtacgctttcggcaagccaaatgcagtcgggatttacctttgcaacagcctctctcgcctgtttccaaaattcaacgggaacgaatgatgcaacatcgcaacggaagccgtcaacaatcttcgcccacataatgagtgaatcaatctgatactgccataattctttgttagaataatcaaggtcgattatatcgctccaatcaccgactttgttgccaaaattgccgtccggctttctgtagaaaaactcgggatgttcaaccgaaagatttgagtcgggcgaagtgtggttatagacaacatcaatgatgcacttcatgccctttgcgtgaattttttcaacaaggctcttgaaatcgtccattgtgccgtattcgggatttgttgtgcgatagtccttgtttgcataaggacagccgagagagccttttttattcttgacgccaatcggatgaatcggcataaaccaaatgatgtccgtaccgagtgactttattcggtcaagatcctctgcaacggcattaaatgtgccgtcatttgtatggttgcggacataaaccgaataaataaccttgtttctcaagctgatttcagtattttttgccatttaaaacatctccttatgtatttttccacggtctgtttttaccgttccaacctcgttctgcccagtaatttttatcggcttcattccagccgcttttctgaatcattctcataataaagaaaaagccttttgtttttaaacctgccttaactttgccgttatttttctttaccttattggcaattgaggtagtctttttgtcaattttctttttgagttcatcggtgacacctgaataatttgttgcacgaacattgacaccgtaacgataagtttttggaacgccccaaaagaacatactgtcggcgatatccttgttggcagattttgtacccgaacctgcggctgtcgaaattacaaccgcctgctttgtgaacattttctgttcgggacggtgaaccatccaacgataaccgtaatgatcaagaaatgctttcattgagcctgtgcaatgataaacatacacgggcgttgtgaagatgagtacatcagcctcgtccatagcctcggtaatctttttcagtcgctcataatgcggacaaagtgtttcggattttagaaaacactgcgtacaacctacgcaaaaatcgccgaaatctctcggaagaaaaaactccgtaacctcgccgcctaatttatcggcaacctgcttgccaatatgataggttgagcctttatggttctgaccgtttattactgcaattttcattttatgtcaccaaattcatcaatttcaagtcaattttagcacaacaaagcaatattgtccatatgatttttatgccttttaagagcatttttatgcgaattttttactcttataaaagacaaaaagcacctgtcctctgacagatgcttttattgtcaatcatcataatgacctttgcactggtaaacaataataaagtcattatttacactataaacaagtcggtctttatcatttatgcggcgactccacaatccacttttatcgttttttagcggttcgggtttacctgctccgtcaaatggattacgctgaatttctttaagcaacgcattaatttttttaagagttttcttatcttgcgtttgccaatataaatactctgaccacgcatcatctgcaaatgaaatattactcaccgctcattttctccaattcttcaagtgatttcgttacaatatgaccactttcaacctgagattttgccttttcaatctgagtcatatttgattgcgaatagaacggatcaatcggtgcatcgactgcaaacggaatacttctttcacgaagtgccttttttgcgtaaatcataaaaaatgtggtcagattcatacccatttcagcacacatttcgtcaagttcttttttagtattgtcatcaaaacgaagacttactgttgtcatatcaatcaactcctttcactgcttatattatatgataaaagaattaattttgcaatagtttaaagcaaatttaattaaaactctttcatttgtcagtcattttgaagtagaaaacagctccccgaaaacggagagctgtgataagtacaaatagatttgtcaaacgaatcagaagtcgatttctgtatcgtagtagcaagccttgagaagtttttccatttcttcctgatttggctggcgtgggttagaacctgtgcaagcatcggcaattgcgttcttggcaacttcggggagcttttcgaggaattctttttcgtcgataatgctctcgtcagccttaacgccacccggaccgtagttcttaatgccctgcggaatgttgagctgatcgttcattgaacggagttcagcgatgagtgcgtcaacaagttcttctgttgtttcgcccttgaggttgatgaacttagcaatcttagcataacgctcagctgcaacaggatcttttgagttatacttgataaccttaggaagatacatagcgtttgcacagccgtgaataatgtgaccgcctgtgaaagccgcacctgtcttgtgagccattgagtgaacgataccgagcagagcatttgagaatgccatacctgcaaggcactgtgcatcgtgcatcttgtcacggcaagccatgtcgccctcataagacttcttgaggttgtcgtgaatcatctcaattgcatggagtgcaagcggatctgtgtactcacagttgagagttgaaacataagcttcaattgcgtgagtcatagcgtccatacctgtgtgagcagtaagtttagccggcattgtttcggcaagtgcaggatcaacgatagcaacatcaggtgtgatattaaagtcagcaagcggatatttgataccctttgcatagtctgtgataactgagaaagccgtaacttctgttgcagtacccgatgttgacgggatagcgcagaatttagcctttgtacgaagtgtcgggaaactgaacggagtgatgatttcctcaaaggttgtgtctggatactcatagaatacccacatagcctttgcggcatcaatcggagaaccgccgcccattgcaacaatccaatcgggttcaaattcacgcataacagcggcgcccttcataactgtttcaacagatgggtcaggctctacgccctcgataagcttaacctccatacctgcttctttaagataatcaacagccttgtcaagaaaaccgaaacgcttcattgaaccgccgccgacaactacaacagcctttttgccggataaatttttaagacttgagagagcatccttaccatgatagagatctctcggtaaagtaaatctgtacattttaattacctcctgaaaggatattttgtcaacttctccttgactaccgtaattataacaccgaagatttataaagtaaataccttttttgaaaataatgtgtgtttattttgtgaaattttcactatagttctttattggaatttatgttgagaaatatgctcagttacagcccgtaaatgttgtcgtcgcccttggcatatttcttaacagcctccataaaaagctttgcagcaggatttgaaatattctttccccatgccataacataggctatgcttgtgtccgcatcatcaataaggtatgaatcggtgtattcgtcagaagtgtatgcggcaaccgaggttggtatgacagacacgccgattcccgaagaggacgacacatatatggaaacaagatcgtcaaatgaattttcaattttcggggttatgtgaaatgtacggaacaaatccataatttccatatatacaatcggtgcaaccgattccgaaagtaccaaaatactttcgtcagccaattcggaaagcttaacgctttttcttccgctgaattttgaatttttcgctgttacaacggacaaagtttcattatgtgtaatgattgattcaatacctgagctttcgggaaccatatctctcggcataaagcaaaagtcgtattcaccgcctgtgattgcaagtgtgcggtcagcctcgtcaagctgtcgcacatcaatcgtgattcccgggtatttttccgcaaagtcggctatacattttgtcgggaacgaaagcgaggtaacatcacagccgagcgtaattttaccctgacctccgtcatgcatctgcttgataacggtttttgctttctttaaagtttcaacaatttcaatcgcatagggcaaaagtgccttgccctcgcttgttatgataacatcacggtgagagcgtgtaaaaagctgaaccccaaactccttttcaaggtcgcttacatatctgctgacggttgactgagaaacatagttccgccttgccgcctctgaaaagttgagcgtctgagccacagttataaagcaattgagctgatttatatccataataacctccgttttgacaatttcccgcagtattttgtcggtttttttcaatattatgcaaaactgtaaatttaggactgccaaatcgtcatttttgcataatcaacggtattgaataatttttccatatttggtacaattcaagtatagcataataatatgcaaaatgtaaataacttattttaaaacaaggagcttaacgaatgaagaaaatagttgtaaccggtatgggtgcggtaacacctgtcggcatcggtgttgaaaactactggaataatatcacggcaggtgcatcgggcattgacacaattaagacttttgatccatctgaactcgctgttcagattgccggcgaagtaaaggactttaatccgtccgactatcttccaaaggatttaatcagaaaaacagatccgtttatgcagtacgcttatattgcggctgaggaagccatgaaacagagcgcaatcaagattgaacccgaaagaacaggtattgttatgggtactgcaatggcaggtattgcaacaatcgcatatactcaggaggcactcacaggcgcatcacataaaaaggtaggtcctcgttttattcccaaaattctcggaaacattgccgccgcaaatatcgcaatcgactacaatattcagggaccgagctttacggtaagcacagcttgttcgtcaggcggtgacgcaatcaacacagcttgtatgtgtatgcagagcggcaaggctgatattatgctcgcagtaggagcagagtccgttctctgtcctcttgtaatttattcgcttgccaacgcaaaagctctttcaagaagaaacgattcgccaagcactgcaagccgtccgtttgatgttacccgtgacggttttgtaataggtgaaggcggcggtgcgctcgttcttgaaacagaggaacacgctcttgcaagaggtgcaaagatttatgcagaaatcagaggttgcggcaacacggatgacgcttatcatgtaactgctccgcatcccgaaggacgaggtgcaatcgcttgtatgaaacaggcaattgcagaggcaggaatcaatccttccgacatcggctacatcaatgctcacggtactgcaacaaacaagggtgacacagttgaaacatcttcaatcaagaaggttttcggcaacactctcccctatgtaagctcaacaaagggcgcaacaggtcatatgatgggtgcaggcggtattacagaaacaattacctgtgtcaaggctattgaaacaggcacagttccgcctacaatcaatctcaacgaggttgatcccgaatgtgccggcattgactttgttgcaaataccgcaaagaaagccgaaatcaactttgccatgtcaaacgcattcggattcggcggtcagaactcaagtattatcgtaggcaaatacggcaaataatctgccgacaaaacaacatacaagcaacacacatatgtgtgtataaaataatgtacatccatacataataggacaggaggatattatgaatttaacatatgattcacagatgttcagagaaacatttgaaagtgaatttacatggcttaacggctttatgagaaatgtaagacgcttttcggataaacctgccgcaattgatcctcagagtggcagaacatggagctacaaagaacttaatgccgatgcaaacagatttgcaaacgctatgaaaaaagacggcgtcaagaaaaacgacatcgtgtttatgcagctttacaactcaccgcagtttttgtttggttacattgcgccgcagaaaatcggtgcaatctcaaatcccgctaactttaacctatcaccgggcgaaaccgcagaaattatgggacacaacaagcctgttgtttatgtttatgatgcagacattatgcaaacagccgtacaggctcttgaaatctgcgagcataagccaaaattgattctctgcgttaataattctaaaaaggaagtaactcttcccgaaggacacattttctttgacgattacatcaaggacagcagttacgaaaatccgcctgttgactatgcgccgcatatttatgatgaggttttaagacttcaaacctcaggtacaacaggtactccgaagggcgttccgcttaacgcaatcaacgaagttctttcggctcacgatgtaattatgcactttccgctctcacccgttgacatcacgatgaatatgactccgtggtttcaccgtggcggtattcattcgggcggtcctacacctaccctttatgcaggtgcgtgtcttgtgattatgagaacattcaacccgagaagctgcatggactttatcgaaaaatacggaattacattcatcacaggtgttccgtcaactcttgagatgcttgcaaaccgtcaggaaaagcatcagaaaaacctttcttcgctcaagggcattattaccatgggcagtccgcttgaaaaagccgcttgcatccgctatcaggaacttctctcccccaacatttttaacggctacggcacaacggaatctttctggaatacatttcttcgtccgtatgaccttcctgaaatggcaggttcggcaggcagatcatgcacagatgatgaggtaagacttgtaaatgtttatgacgacagaaaagcagagcccgatgacacagtcccctgcgataacaaaacagagggagaaatcatcatcaaatgtccgaacaaaactacatactgctatgtaaataacgaaaaggctacaaaagacaagttctacaagggttggatgtacacaggcgacatcggcacttggaacagcgaacagttttttacaattgcaggcagaaaagatgatatgattatcagcaagggcgaaaatatttatcctgcaagaattgaggaaattctcaactcacacccgaaggttcaggaatgtatcgtaacaggtgttcccgattcaacaagaggcgagtgcgttgcggcatatgtaataaaagctgacgaaagccttacagttgcagagcttattgacttctgcgacagctcaccgaatatttcaaaatatcaggctccgagatattaccgctttgtcaacgatcttccgcaaaccgctacaggcaagaaacagcattttgtaataaaaaaacaggcagcagaggaccttaaaaacggtttgttgcttaaaaaataattacggattttccgtatatatgtaatggagaaaatatgaccgagaaattatacaaatcaaaggtttcatactatgaaacagactgtatgaacattgttcatcactcaaattatatcagatattttgaagatgcaaggatccagtatatgcacgacatcggttgtgatgttgccgaaatgcagtcaaaaggattgtatattccaaatgttgacgcatatgcccgttacaaaaagccgcttaaattcggcgatgagttttccgttgaagtaagccttgtattttttacggggtcaagaatgatttttgactataaagtcttcaacaataaaaacggagaactttctgcaacaggcagaacaacacactgttttgcaactcccgagctaaaaccgataagcataaagcattcaaatcccgattattacaatcggcttcgtgacaatactgtcagcccggaagatattacaataagaagataaacaattttacaagcaaaaagtgcgtaccgaaattcagtacgcacttttttgatataggaaaataggaaaatatcagtcatcaaagttgggagtctgaattgcatcgtagcctgtttctcccgtacggattttaaccgcctgtttaagatagtaggtaaatattttaccgtcacccgggttgcccgtaaaggctgtttttctgattgcctcaattgtttttctctcccattcttcggaagaaacaacaatttcaaacttgattttcggcaaaacctgaacatcaaccttctgtcctcttacatactccgacataccacgctgaattccgcagcctacaacctgatacgctgtaattccgtttacgccgatatccgtgagagcctttttgacatctacaaacatttcttcacgaacaacggcctctatttttataagctgaatatcgttattgttttccatactttaaaacctccgttagttgtcaagaccgttaaatgacggataagcagattcaccgtgctgtgaaacatcaagtcccataagctcatctctgaggtcaaccctgattttgcctgtaagaagtcttgtgatgccgtagcagatgagtgttccgacaaccgcaattacaattgtgatgccgatacctgccgcctgagcaccaaactgtgcaaactcaccgtacacaagaccgttacctgcactgctgttgattgccgtgcatgagaacacacctgtgagaagtccgccccagataccgcctgtaccgtgacagctgaatgcgtcaagcgcatcgtcaaagccgaattttttcttgccgtatgaaatcataatatagcaaacggggcttgttgtcaaaccgataataactgccgcccacatcggaacaaagccggcaccgggcgtgatacctaccagacctgcaaccatacccgtgcttgcaccgataagcgtaggctttttgttcttgacaacatcgcagagcatccacgagagcattgcggctgcggctgaaacacctgttgtcataaatgcgtgagccgcaagaccgtcggcggcaagtgcagaacccgcattaaagccgaaccaaccgaacataaggagcgacgcaccgagtacaactgtcgggatattgtgaattctgtaaattgaatgttcataatcgtgacgcttgccgagaagtatgcaaagtacaagtgccgaaacgcccgaactgatatgtacaacatcgccgcctgcaaagtcgagagcaccgataccgtctgcacctaaaagtcctccctgtccccacaccatgtgagcgagcggataataaacgataagcgaccagaaaattgtgaaaacgaaaattgacttaaacttcattctgcctgcaaccgcacccgtgataagagcaggagtgattacggcaaacatcatctggaacgcagagaataccatattcggaattgacgcatcatccgtgtagccctccgtgagtgaaacaccctcaagaccgagccaacggaaatcaccgataaaagcatttcccgaaggggcgaacgaaagcgaataaccgaaaagcacccacataacaattccgacaccgataataaaaattgatgtcatcattgtatttacaacatttttctttcgtacaagaccgccgtagaacattgcaagacccggagtcattacaaatacgaaagccgaacaaagcagcacaaagcctatatttcctgaatccatttttaacctccacataaaccgtttttgccgaagcaaaaaaataaagctcacaatgtttttatctgattttgcaagtttttaaaaatttgttgcaaaatcagaagaaaccaaagtgaacttccttgtcctttttatattcagttttccgaaaacttcgtaagacctttgccttactgtcttgaattataaagcctcactaaccgattgtcaatacttttttgaatattttttaaagttttttgctgttttttaaattacagtttacaataacaggtcaaaaatctaagctatgtcacaaatttaatttttgcaagtttatttaattttcttgcaaattattttttttgattacagcatattctttgtagcgtttgtagcggcgaacctcgttcgccgctacattaaattgtgcaaacagctactatactacgctcgggcataatatgttttttatattgcgaaccatcttcccgaacgcaatttttcatttaatgaacctatctgcacgaatcaggtacggcggctcgccgtactggcgtataatatcgtccctacaaaataaaaactacggtcaacatagtcctgtcaaccgtagttaaaatcaagatattttattttgcaaaatcggacgctctgctttcacggataatattaaccttaatctgtccgggatattcaagctcttcttcgatttttttacagatatctcttgcaagcggaatcatacgctcatcatttacaatttcaggcttaaccataactctaacctcacggcctgcctgaattgcaaaggtacgctcaacaccgtcaaaagaagacgcaacctcttcaagcttctggagtcgcttaatgtagttttcaacattttctcttcttgcacccggtcttgcggctgaaatagcatctgccgcctgtacaagacaggcaacaattgttctcgcctcaacatcaccgtggtgagcgtgaatagcgtgaataacagcgtcgctttccttatactttttggcaagatcgacaccaatctgaatatgtgttccctcaacctcatggtcaatggatttaccgatatcgtgcaaaagacccgcacgcttagcaattgtaggatcaagaccaagctcgctcgccatcatacctgcaatgtatgaaacttcaagagagtgatcaagtacattctgaccgtagcttgtacggtaacgaagtctgccgagaagcttgacaagctccggatgaatgttatgaacacctgcgtcaagcacggctctctcacctgtacgcttgatttcggattcaacctctcttcttgccttttcaaccatctcctcaattcttgcgggatggattctgccgtctgcaataagcttttcaagtgcaattcttgcaatttctcttcttacaggctcaaagcatgagagcgtgatagcctccggcgtatcatcaataataagatcaacacccgtaagagtttcgatggctctgatgttacggccttccctaccgatgattctgcccttcatctcgtcattgggcagaggaacaaccgaaattgttgcctctgaaacctgctcggctgcaagtcgctgaattgcaagcgaaataatgtttcttgccttgtcgtctgcttcctctttgagctgttcggtatattccataatcttaaccgacttctcgtgagcaagctcattttcaagctgtgaaagcaaatagcttttagcctgttctgccgtgtaacccgaaattttttcaagcatttcaaactggctctttttcagagtttcaacttcttcgagttttgcatctgcatcacgaagctttttgttgaccttttcttccttgcgttccatattgtcaagctttttgtcaagagtttcttccttttgctggattcttctctcctgacgctgaacttccttgcgtcgatcggaaatttctttctcgctctcgtttctgaaacgatgaacctcgtctttaccctcaaggactacttcttttttccttgcttcggctgttttgattgcatcagccacaatcttctttgcctcctcctcagcacttccgatttctttctcggctgtgtttttgcggatggcaattccaaggaaaatacctgcacctgcgccgataacaactgcggcgacaatgcagataatacttatccacaatggcaatctggacacctccttagtttgattttttaatatttcacagttcccaatcaattagactttaaaggtgccgctaaaaagatattcaattttcatttttactttgtaaatatttttaatacattatatatacatacgcaaccgcaaaacaccctacagattgcacagaacgtttcaaaaggcgaaacgccataaaaattacaaaaaatatctatatataacggctcttttaaagagtctgattaaaaaagtcgcaaaagtcaaaaactgtacttttgccaaaatccgcatcagcggactatacaattttataataaaataaccaaattgtcaagaataagcacgggaattttgcagataattattacggaaataaaaaagattacagctttttgacggttacagcttaaatttgccttaaaaaagcaaaatgtgaccgtgttttttaccgtatttgtaaaaaagtcaaaaatttttcgttaaatttttgtcaagctattgaagaaatgaaaaaaatgtaatataatagaagcaccttagaattttaggaggaatttttttatgtcagtaaaagttgcaattaacggtttcggccgtatcggtcgtcttgctttcagacagatgttcggtgctgagggttacgaagtagtagctatcaacgatcttacagatcctgctatgctcgcaaaccttctcaagtacgatacagcacagggcggctactgcggtaagatcggtgaaaaccttcacacagttgaggccggcgaaggctcaatcatcgttgacggcaaaaagatcacaatctacgctaagccaaacgctgctgagcttccttggggcgaactcggtgttgatgtagttctcgagtgcacaggtttctatacatcaaaggcaaagagccaggctcacattgatgccggcgctaagaaggttgttatttctgctcctgcaggcaacgacctcaagacaatcgtttacagcgtaaacgaaaagactcttacagctgacgatacaatcatttcagctgcttcatgtacaacaaactgcctcgctcctatggctgacacacttaataagtatgcagaaatccagagcggtatcatgtcaacaatccacgcttacacaggcgatcagatgattcttgacggtcctcacagaaagggcgacaagagaagagcaagagcaggtgctgctaacatcgttcctaactcaacaggtgctgcaaaggctatcggtcttgtaattcctgagctcaacggtaagctcatcggttctgcacagcgtgttcctgttccgacaggttcaacaacaattcttacagctgttgttaagggttctgatgtaacagttgaaggtatcaacgctgctatgaaggctgctgcttctgagtcattcggttacaacgaagatccgatcgtttcttcagatgtaatcggtatgaaattcggttcactcttcgattctacacagacaatggtatcaaagattgctgatgatctttatgaggttcaggttgtttcttggtacgacaacgagaactcatacacaagccagatggtaagaacaattaagtatttcgctgagcttggctaatctgaatttacagattattctttgggctgtcctttttggacagccctttttgttttccttttcggaagatatttatccttatttttctttattcgtaaaattatgctttaaaatgtaacatttagtcgcagtttataaaatatacacgaaaaattagttttaaattttttgaatttgcttgaaattgacatataattttggtattatataagtgtgagcaaacaatcaacaaacaacagatattaaacaaggagcaattcttatgaattacagctttaacgaggcaagaccggctcttgaagtttttcacaccggcgattcagtgcgtgcatatgattttttgggcgcacacctcgtgaaccgtaacgacaaaaacggagtagtgttccgtgtgtgggcaccaaccgcaaggagcgtttcggttgcaggcgattttaataattggaacaacgaggcaaactatatgtataacatcggttacggtgtgtgggaagtgtttgtcgagggtgtaaaacagttttgtacatacaaatactgcattgagagcgaatacggcgacaggcttatgaaagcagatccgtatgcttttcatgctcaaacccgcccaggccaggcctctgttgtatatgatatagaaagctattcgtggaatgacagcgaatggtttaataaacgcaaagaaaacaacatttcatcgtcaccgatgaatatttatgaaatacatgcaggctcatggagaaaatatcctgacggcaacttttttaactatcaaaagcttgccgatgagcttatcccctacctaaaggagatgcactatacccatgttcagcttatgccgattatggagtatccctatgacggcagctggggttttcagacaaccggctactatgccccgacttcacgctatggcacaccgtctgattttatggcttttgttgacaagcttcacggtgaaggcattggtgtgattcttgactgggttccgtcaaattttccgacggacgatttcggacttgcaaggtttgacggttcgcctctttatgaaagcaacgatccaaaaacaagcaagcgtgactcatggggaacctgccttttcaactacgcaagattcgaggttacaagttttcttgtttcatgcgcaatgttctggctcgacaaatatcatattgacggtttgagaatcggcgcactctcctctatgctctacctcgattacggtaaaaccgagggcgaatgggaaccgaacaaattcggcggaaaagaaaatcttgacgctgttgattttgtaaaaagactcaacacggctgttcatatgtaccaccctgatgttatgatgtttgctgaagagaacacatcgtggccaaagcttactcataaaatagaggacggcggtcttggtttcgacttcaagtggaacatgggctggatgaacgatatgctgcactatatgtcactcaatccgatgtggcggccgttcaatcatgacagtcttactttcagcttttattatgctttttcagaaaaatttcttctgccgatttcacacgacgaagtttctcacggcaaaggctcactcataaagcagatgcccggaaagtatgacgagcagtttgcaggcgtgagagcattcataacatatatgtacgctcatccgggcaagaaactcgtgttcatgggaactgaaatcggacagtttgacgagtggaatcacgaagaggcaattcaatgggatttgcttgaatttgaaaagcataaaaagctcagaacattttttaaggagctcaacaaattttatcttgactgcaagccgctctacgaacttgacacggtctggaaaggctttgactggattcaccatgacgattacacaaacagtgttattgcattcaagcgcaccgacaaaaacggtgatgaaattgtttcggtatgtaattttcagcccatcaggcgtgacgaatactgcatcggtgttcctaaatacggtctttatgacgaggttttcaactctgatgaagagcgtttcggcggaagcggtgttgtgaacggtaataatatcaaaaccgaggtaatgaaaattcacggttttgatcagggactttcactcactctcccccctctcagcgtaatctatctgaggtgtgcaaaagaacttgaacccgatgaagctcagaaagaaaattgatattttcagtcacaagactgtaattaataagtttaataaagataataaaataaatatcggaggtattttaatatgtttccaaaaaaggaagtagtggctatgctgcttgccggcggtcaaggctctcgtcttggcgtgcttaccaaaaagcttgcaaagcctgccgtaccgtttggcggcaaatatcgtattattgatttcccgttatctaactgtgtaaattcaggcattgacgctgtaggtattctcacacagtatcagcctcttgttcttaacgaatacataggaaacggacagccgtgggatcttgacagtatgcactcgggtgtaaactgtctcagcccttatcaggctgttgacggtgcagactggtattcgggaacagccaatgcaatttatcagaatatcaactacattgagcgttataatcctgaatatgttgtcatcctttcgggcgaccatatctacaaaatggactacaacaagatgcttgaatatcataaggaaaagaatgccgcttgtacaattgcggtaattgatgtttcgcttgaagaagcctcaagattcggtattctcaacacaaacgaggacggctcaatctacgaatttgaagaaaagcctgctcatccgaaaagcactaacgcttcaatgggtatctatattttcagctggaaggaacttaaaaagtatcttacagaggatgaattcaaagagggttcaagccacgatttcggtaaggatgtcctccctgccatgcttgacgcaggtgagcgtatgtttgcatatccttttgaaggctattggaaggatgtgggaacaatcgacagcctttgggaggctaatatggatcttctcgatccaaaggttactttagacctcaaggatatctactcaagaaacccgatgatgcctccgcactatgtttcaaacgaggcgtcaatccaaaattcactcgttgccgacggatgcaatgtttacggcaaccttgagttctcaattctctttgcaggtgttacaatcggtaaaaatgctacgattaattcttcaatcatcatgcccggtgcggtaattgaggacggtgccgaggttcagtttgctatcattgccgaaaacaccgttgtaggcaaaaatgcaaaagtcggacaaaaccccgaagaaacggaaaatattgacgactggggaattactgttgtcggtgcaaataccgttatcaaagaaaacaccgttatcaaagcaaaaaccatgatagacagcgacacggaggtggacggcaatgagaagtaataatgtactcggtttcatctttgcggcaacacttgacgacaaaatccccgagcttgcgtcttcaagaacaactgcaagcgttccgatcggcggaaaatacagaattatcgactttgacctttcaaatatgtcaaactcaggtatcagcaatgtaggcatagttgcaaaaagcaactttcagtcacttatggatcatgtgggttcgggcagtgcatatgacctttcaaagagaaggagcaatctttcaattctcccgccatatgacggcaaggctttttcaagctttgttgaaacaatctacaatatgcacggctacattgagcattgccgtgaggagtatgtgcttatttcacagggcaatgtaattactaacattgattacacagatgtttttgacttccactcaaagaagaaggcagacattacacttatatataagaatcatgcaattccgcagggctatgacagaccgattacccttgatgtagacaatgacggcaaggtaaatcagatttttgtaaagccaggtgttgttgacaaaggggtattcaaccacgcatacggctctattctcatcaagaaagaccttcttatgagtgaaatccgaaacgccatcagcgttaatcagcttgatgtaaggcgacttattcagagcagtctgggcaaatacagtatttatgcttatgaaaataagggttactgtgcggcaatcagctcaatcaacgattactttgagttcaatatggatcttatgaaaaaagaagtaagggatgagcttttcaatccgcaaagacctatctatacaaaggtaagagatgacgctccgtcacgctacggacttacaagcaatgtgaaaaattcaatcattgcacagggttgtgttatcaacggtgaggttgagaactgcgttatttcaaagggtgtttatgtcggcgaaggcgcaaagctttctaactgtattgtaatgcaggacacaaaaataggttgcaataccaacctcaactatgttatcatagataaggatgttaccatcaaggatggtcgatcacttatgggatatgattcgtaccccatttatattgctaaaaaatctgttgtataaagttgtttaaacaggaggtaatcttacaatgagaattttatactgtgcttcagaggctaatcctttctgcggcagtggcggacttgctgatgtagcaggaagtcttccgcacacactttgcagaaaaggtcaggattgcagaattgttgttccgctttacggcacaattccgcaggaacttaaaaactccatgaacttcatcacaaactttaccgtgccggttgcatggcgtcatcagtattgcggtttgttctgggcaagatggaatgactgtacatactattttattgataacgaatattatttcaagagaggcactctctacggtcattatgacgacgctgaaagattcgctttcttctcccgtgcaattcttgaaatgcttccttacattgatttccatcccgacatcattcattgtaatgactggcagacggctcttgttcctgtttactactatctgttctattcacacagaccatggtactataacattaagagtctgttcactattcacaacatccagtatcagggtgaatacggctgggaagttaacacagagtgcgtcggcattcctgcatccgaaacaaagattcttgaaatgaacggcaaactcaatatgatgaagggtgctatcgaaacagctacccgtgtttcaactgtttctccaagctatgcagctgagattaaagacccgtggttcagttggggacttcatgacgaactcaatcttcgtcattacaaactttgcggtatcaagaacggtattgacacagaaagctacaatcccgaaacagactatcagctttatcgcaactattcaaaggacgatatgagcggcaagggcgaatgtaagcgtgctttgcaggagcgtttgtgtcttgaacagcgctgggatgttccgctggtcggtatggtaacaagacttgttgcgcacaagggacttgacctcgtaagaatgggccttgaggagcttatggacacagaaaatatgcagtttgtaattctcggttcaggtgacaaggagtacgaggactacttcaactatatgcaggcgaagtatccgggcagactttgcttctgtcacggctttgttcccgaacttgcaagaaagatttactcaggcgcagatattttccttatgccttctgctcaggagccttgcggtcttgcacagatgattgcactccgttacggcacaattcctgttgttcgtgaggttggcggtcttaaagactctgttttcgacagtgctgacaactacggtaatggatttacattcaaaaactatgaatgtgcagatatgcagcttgccgtaagacgagcattgtggggcattcaggacgaccagggttggcatcagcttatgtggcgtgctatgatgagcgacaacagttgggatcgttcggctcaggactacatcaatctctacaacgataccctcaagtgggcttaatcgtgcagtcaaatcttataacaaaaaattcagtcggaaagcagatttcaaatttgctttccgacttttattttatttgaaatagcaatctcgtaggggcggatattatccgccagcacggcgagccgccgttcccaattcgagcagatagtttgatagaaaaacaattccaatgcccgaattaggtgaatttatgtttacaaaaaattatttttcacaaaaacaaaaaaggttggaaactactgcggggagcagtcgatttccaaccttaaaattttgcattagtttttcatcaggttctctttattgcgtgcggaacacgaattttacctgcaagcttaccaagagcaaacacaagaataatctcgggaatgcacttaacggcaacactgatgaatcttgctgtaagataaactgtgtacggtgttgaaccgccgccgtagagtgtgtaaagccaaaaagctatgaggaatgtttcaacgcagagcatatttgtaaaccatgcaagaacaactctgagcggagttacattgttcttataaagaaacataccgtagataaaacctgtaataaagccgttgattgtaaagccggggaaatatgcgcctgtcggggcaatgataaatgaaagaatatctcccaaagcgccgacaattgcagcaggaatcggtccgaacattacgcctgttacggcaatgggaaggaacgctgcgctgagctttacattgtttccgaaaaacggaagtgtgctgtttgcaaaaaatccgagaacaatacgaagtgcaagcagcattgcaattgccgcaagagcgtagatactcttcatttcaagcaaagagctttgaatttttttgagttgtgacatattttttacctcctgaatctctgttgttgcttcaggaagaaaaaagcggacagattgctctgcccgctgaattatatgtcccaaagtaacagcgggatgcgaaatctgtaccgcaggataaacctttcgttcttgcggcaactccccgtccgcaaaacacttcacgcacaaatttctactctgtgatagatgcctttcggcaccatatgctattatacgcctgaatttgctgtttgtcaaccaaaaattaatttagagtttactgaactgttgcttttttcttctttgtaagaagggcatcgaggctgttgataagtcttgaaagcggcttgtagattatgaaaacaactaccgaaatgatgagtcccttaatgatgttgaacggacctacgcagtacaggcagaatgtaaatgtgccgtcaattgcagggaaaattgcctgtcccattttgataatttctgtaagcggcataaatgacgagtagagcggaacaagtacgaatgtgttaagaaccacaccgatagccgccattgcaaccgtacccgtaagcattccgacaatcgcaccgactcttgtttttttgtacttgtagatgaaacctgccggcaggataaacgaacagccgatgaggaagtttgcaagctcccctactccgcctgtacttgtgcctttaataagaaacttaacgagaatttttacaaattcaattactgcaccggcaatcggacccatgctgaatgttccgacaagaacgggaacttcggaaaaatcgaactcatagaatgaaggtgcgatgaatccgagaggaaattcaaagaacataagaactgccgaaagcgccgcaagcattgcggttacggcaagctttgttgtctttgccgtgttgtctgaattaattgtttttgcttttgattttgtcattacgaccactcctgaaaattatttcgagttgtcgggaaaagaaaaatcccgctacaaacgtaacgggattgcgtaccaaaataaaacagacgaaccgcctgttctgccgcatcttctcgtatccggactataaccgtcggtgtctgaatttcacagactcggcaggctttcacctgttcgtggactttaaccaccggtggagaatttcactccgccccgaagacaactgttgattatattatatgccgattttcggatttgtcaatatctcttcagtgttttgagatattttttcgtttcatcgtcaattctgaaactttcaacgcatttccgaatcattttattaaaggttgcattatcaagcgaatttgactttatgtaccgcatagtctgttctctgcactttgcaagtgctgttgcaacaagccatgcccttgccatactcacataataatgcggatttttcgcattgtcacaacattcaagcaccgtgtctatgtactcatcttcaagataatagtcaagcatcagcacaagacctgcacgaattatccacggattgtcacttttggtgtatttacaaacatgaggaaaaaattctgatttgtactttttggtttctttgagatttgcacaaaagccgtcgcaaaccgcccagctgtctatacgctgtacaaaatcatcgctgtacatcaaaaattcttcatagctttcggttttgagcaaaccaattacaatacctcgcattgttttttcttcataagaattatcagttgtctgctctaaaaaactgcgtccgttgcccttagaaatttccttgccgagctttcgcataacaggcattcttactccgataaaaaagcccttgtcattgtcgggaatcaatgaggaatgaaaacttctgtacttttcatcggcatatgaacgaagttcctctacaaaatcattatagtcatttttagtccaattatctcttacaagctccataatgcaccgctatttttgctcattctttcttttgctgtcataaatttcacacggtgagttcaggtcaagatatgcaatatcgtggtgtggcactctgtcctcaaccggcggaagctgcatataatcaccgaaaaccattctgagatactcgtcatagcccgacatacacggcatttttatgccctcaaatgtgacataatcaacgcccgaataaatgtgtttcggatactcaattttcatccaatgagggcctgaacaaagctccgttacacacttgtttttatcaagcctgtacttaatcatatgcttttcggcagttctccaaatcttttctcggagctttttccctctgaaaattgaaagcaaagccttactgcctgcccccacaattccgccgtgcttttcgggaacaacctgagccaaaaacagcgaataaagcattgtccacacatactgcattttgcgtgcaaaacggctgtcgggacaaacatcaagcggaaagacatcaagcacaagtccgtgcggaatatcaacctcggtctgatttgtcttgaccatagtgtaatttgtgtcggttacggtcataaaaatattgcccgtgaacatatctctgtcggttttgagaagtcggaatcttccgtctgcgccctgttcatgccaaagcttgtacagcttttcgtagtcctctcgtggcagcataacatcaacatcatcatcccacggaacgaatccgccgtttctgagcgcaccgattaacgcaccgccgatgagatagaatgtgagattgttcttttcgcaaaagtccctgaaatacacgagcatatcaagctgtttaagctgtaactcacgcaaaagttcgggggtaagttctactttttcagtcataagtatctccgtaaatatcaaatacgggcggagattatccgcccaaaagttatttgtatgaatgaccgggaagtgtgttttccctgatttttctttttaccttttcaatgtgttctttcgcaccgctgtttttgattttcttccgccatgacggaatctgaatcaaaccaacaatcgtgcctattccgtaggcaacatggagcaacgggaaaatgaacggcaaaaacacaaactgaggctgaacatttttcattgtgcaacatccgacagcgtttacaatatcaaacattccgtaaattatcaaaagaatgtacaaaaaaagcggaagtccgagaaatgcaagcacggaacagccgagaagtgccattacaaaaagaaacggtgcaaagtgaaagtatgaaagacaaccgggacactcagagagtgtaagtcctatccaccgtccgtttgaatacttctgccttatcattccgtgaaggtcgtttcgtgaatgctgatacgaaataatatcggggcaacagcacatcttgtagcccgccattctaatgcggtagtgaaattcattatcctcggttctgccgagattttcgttaaatccgccgaccttggcaataacctctctgcggtaagccgcatgaaaaaggctgtcaagatattccttttgcgcaagcggtcgtctgtacgaagcaaccgaactgccgaacagagaatcctcagccgcaagcaaggtaagcttccagcttgaaacatttgaagtgatattcggtctgccgccgcctacaacattttcgccctgctttatgttataaacatttcgtgaaacaaagtttctcggaattcttgcgtgagcgtcaactcttatgataacatcgccctttgcggtcatcagagcggcattccatgaggttgcctgattacgctttacgcattgaacaactgacacattccaaaagccgtagtcggtatcacggaacttttccattttttctttagtatcatcggttgacatactgtcaacaaataccacctcaattttatcatgcggatagtcctgaagtgcaatatccctgaaaagtccgctcaaagcattcgattcgttataggctatcatacaaagtgaaactaacatataatatctctgctcccttcaagctcgaacaaccattttgcagacattgcagaggttgtcagaaaataaggtacggcataaaatgccggaacaacaaaaaagcacaaagccgcccagccgataaaaccgataaacagctttattgtggagatgaagttctttattgaaaaagccatcattctcggaagataaattccgagcggcagatgttcgttaaaaccgtaagccaaaaatgtataatgaacaaaaataatgtaacacaccacaacaaccgcagtgctgacgataaacgccaaaacaagcaatacagccacaaccgccgtgagtgagggtgaattgtcaattattttatccgaaaccgcactaagataattgaacacattgagcagaccgcttatgataaaaaacaagccgactgaaattacatcaagaataacagacttaaaaaataatttcggctttttataatagtaaaaaacatcaagaggactgcactctctgcccctgactacattgcacacacttctgtaaactccgtttatgagcggcagacacacaacaacaaaagcaaaaaatacaagcccgaaaatcattgtaagcatctgctgagtctgatttgggttttttacatcataaagtcctgccacagacattgcaaggctgaacgcaaacagccctgtcaaaaatgcaagcacagcgaccattatctctgagataattaccgatcggtttccctcaagaaccttttttgcctgttttctaacagttttttccgtattcattagcattcccttttcatctgaatttgttcataacgaaacgcattattctccgtcagtaaacattctgtacattgcctcaaggcaaatctgagcgtgtttaaagaagttctccttatccatactttcgtctgcgttgtgcatacgaacatcgtcatttttgaatgcaggaccgaatgcaacaccgtgacctccgagcattcttgcgtatgttccgccgcctgttgaataaagctcagccttttcacctgttacgctttcataagcgtcagagagaagctttacaagcttgctgtccttatcggcataaagcggttcttcgtgattgagaacagtaaccttgaggtcgctgatttttgcaacctttttgaactgtttgagaactctgtttccgctcacggtaacgggataacggatatcaaacacagcctttgcggtctgtccctcaatattcacgctgctgaggtttacggtgagcgagcccgaaacagcgtcgctcattttaagaccgagtgatctgccgtttgtttccttgttgattgcgtagtcaataaatgaacagattgaacctgtttcctttgttgtgtaaacatttgagataaggtcaacaagtgccgctgcggcattgtagcccttgtccggttcacacgcatgagccgctttgccacggctgattatcataagaccgtcaatagtgtaattaaattcaaaatcaccgtcacttgcgtctgcaaggcgcatgagagtctgctcgtcatagtctgatgaatcaagcattacatacgctctgtcgggaactgcattaactgctctgcctgcatgaaactggctgagtgttgttgcattatttaaaagtgtgctgacttcaagctgaagaatacccttttcggcaaagcaaatgccgtagtcgctgtcgggagtgaatgccatgtcgggaagtggatttttcttgaaataattttccatatcctccatacccgtttcttcacccgtgccgtaaatagcacgcagagtgttcacgccctttacaccgctgtccttgattgctttcaaacaatagagagtaacaagagccgcacccttgtcgtctgcaattcctctgccgtaaagtctgccgtccttttcggtaagcgcatacggcggaacgctccagctgtttcccgcaggaacaacatcaaggtgagtaagcacaccgcaaagctttccgctgtcgccaagggttatatgaccgctcttatcggttgttctctcccctgtcagtccgaaatcttctgctcttttaagaataaaattcaaggcattatcgcactcgtcattcttttcaccgtcaaccgattcaaaagaaagaagtgtgttaagatcctttaaaagttcgtctttgaagtcaagtattttgtttccaaacataataaatacctccgtacttaaatgctgattatatctttatcagtttttattttttctttttttaactgttttaacggtcacaataaccgcacaatagattaaaaatgctccgaatgcgcaaaggctgattttgacacctgttgaaaatccgggtgtttcataggtgaacacaatgtcacacttttccccctttggaatcttaacagccataaagccgtagtcaaccttttcaacatctgccgccttgccgtttacagttgcggtaaaaccatcgctgtaaggaacgctgaaaaacaacaggttatcgtcaccctttttattattgtaaacagccttaaagccgttatctgtatattcaaatgaagtacaactgttcaaggccctgagattacaaacctttttgtaatctgaattactgtaatcaaacttttccgtaatgctgtcataatcctccggatgtttgccgtacaaaagcttgtacttttcatcgctgtagcccgtaatatcggaatacttcttcataaggtcacggggaagaaccattgcatagagcaaagcctcggacttgtgtgcgttcgtcacaaggtcaaattcttcttcggcaatgaacttatcaaaagtgtatcccataggaatgtagtattcgttgcggtaaatatcaaaacggttctgcgttctgagatatttccaacccggcattcttgtgttgccgttttcgtcaacgaatgaattcagacttcccgattttccgtcgccacggtaatcaaaaagatacttacaactcaaaaacgggcgaagtccgtatacatcgaggtcaggtcttgacgcaacatcccttgtaattccgagtgcatcgtaaaactgcattatagatgttgaaacagaactctgaaagcagttaatgctctgaatctgccagaacattgccgtgttgtcaacacattcgtaaaaatcactgcgaacattgtcaatatcggcaattgtgatgccgtcacgcctgtttatgatatcttctttgatggcatttgtactgctgcttgagaaatagcctgtggcgattataaaatatgaggtgaaaagcgaaacgctcaggatacctacagtgagcataaccgtaaatctctttttgtttcgtctgaattttttgattatgagaacgaatgcaagcagacttaacaaagccataagaacatagagccaatagcgttcaaatgttgcctgagtgccgataaccgtattttgaatatcgccgctctcctcatccgtatagctcacaggcataagacctatcaacagagttgcgcctaccgtaattcctgccgaccaacgaatcgccctgttccaatcggtttttctgttttcaaacgccttgattgttgcaagaacaagcataagcacgcccatatagaaccatcttgcgtaataaattgagctgttcataagctggaacatactgttcaaaacaggcacacacgcaaacacagcaagcacggcaagaagctttttgagccagctttttcggcaaacctgaaaatatgcgataactcccgtcattccgacaagcggcaaccatgccgcaacagacgcccatctgcaatttgagccgggtgtgaacacagggaacgcaggcatatctgcggggaaaaacaggcttaaaattatcagccagtatttttgcggttgactgtagacaagcgaatcccagccgttcggaagctcggcaagccttgggttccccagtaatccgagcactgacggcagcagtatgaatgccgttgcaaggaatcctatgataacctcaagcgcaagcaagagaaaatttttgactttaaatttgtaggttttggtaagcgtaatcataagaaaatagatgattacgaacagaacctgtcccacaaagaagtagtagttcacaacacaggcggagaataccgcaagtgtgaacactattctttttccgtcatagatgaatgcgtcaagtgccgcaagcaacagcggaaacattatcatcggttcatgaaagtggaaaaagaacacattgtagattgaaaatcccgaaaatgcatacagcaatccgcctacaagagcgaaattcctgttagccacatatcttttcaaatagagatatgcggaaagtgacgcacagccgaattttaaaatcagcaacggtccgataagatacggtacagcctcacttgggaacggaattgtcagccaaaagaacggactgccaagtagataaaagctgaagcttgagagcatatccgttccgaggtcaacattgtgcatccaacccatatcaccgtttcttacggcgtcatgcacaagctgataaaacggaatttcctgaacattgaaatcaccgtaataatagaaaacaccgccacccattatgataaacggtagaaaaagtgctgttgcagttataattgatataagaaacacacgcaacccaaatagtttttgtgttggatatttttgcaaaattctgctcggcataaaaccctccacggagcaaaaagtctgaaaaaatctttttttcgataatttctttacttttaaattatgaatagtataatcagtaatataaatgtccttcaccgtcatttattcaaaagacacctacatattcaattcggagcaacgctctgctttgcttgcagagaacagaggacactcgcatttagattacattataacataatgcgatacaaattgcactaatttttagcaaaaaacaggagaaactacctatgaatatttcacatttttacgcaatgctttcaagaatgaggtacatcaaccgttggggacttatgaataacacacgctgtgaaaacctcagcgaacacagtcttgatgttgcagtgattgcacattgccttgttttgattcacaacaagcgtttcggcggtaatcttaatgccgaaagagccgcattgctcgcactttttcacgatgcaaccgaaatcataacgggcgatatgccgactcccgtaaaatacttcaaccccgaaatcaaaaatgcctacaaggaaattgaagcaacggcaggcaacaggcttgtgtcgatgcttccggatgattttaaggacgatatggataaaatcatcaaaatgaacggtgcaggtgacgatgaacttaaaaaatatgtaaaagcggcggacaagttttccgcactcataaaatgtattgaagaaataaaaatgggcaacagcgagttttcaaaggcaaaagaggcaaccgaaaaatcaattcacaatatgaatatgcccgaaaacgaggtgtttgaaaaagagttccttccgtccttctatttgtcacttgatgaacaggattgacagttaccgacaaaaaaatcaatattttcagtcagatttttcgctaaaactttacgaaaaggcagattttaattctaatttagcattaaaagaaattctcatatggtataataaactgtacttatgtattgtgtgctttttacccgattggaggagtaatatgccaaattacgaaaaaagcagtcagaaaagcgattttattgacataagctcaaataagcaggtcaaaaaattatataataaaaaaggcagacttaaaagaattctctgccttgtgttttcaataatcttcctgttgggcggcggcggaatgctctactactattcatttcttgacactctcaacttcaaagagcttgatgacacaaacaacaacaacacggcagctaccaactcatcggttgcaccgcttgagggcgacgcaacaaacctttcgctttcagagggagagcttctgcagaactccaaggagcttaatgttatgctctttggcgaagacaattcaaacggcgataaacacggcagaagtgatacaatgatcatgatgaccattgataacaaccacaaaaagcttaaactgacatcattccagcgtgacacatatgtttatatccccggttacggatatgacaagctcaacgcatcttataactacggcggagcaaagctttcaattcagacaattgaggcaaacttcggcatcaaggttgaccgttatgcggttgttgactttgacagctttaagaagattatcgacaccctcggcggtattgatatggaagttactcaggacgaaattgactatatcaactatcagatgtacaagaacaatcaggctgacacaagaacaactatcacagacgcaccgggtactgttcatctcaacggtcaggaagctctttggtatgctcgaaacagaggtcttaaaaagggcgaggacggcaacgaaatcggtcttgacggtgacgactgggacagaacctcaagacagagaaagcttcttgaaactttgttcacaagtatgaaaagtgcagacctcggtcagattgtttcaattgtaagctctgtcggtccccttgtaacaacaaacctcaagaaggacgaaatcacagcacttgtttctcacgctctcacatatctttcctatgatgtagaacagtattatgttcctgaagaaggtctttggtactatgatgataaaaccgaaacatggaacggtgcaatcacatcaacaatcaaaatttcagaccttgaagaacagagaaagaagtttgcaagcttcgtttttgaagaattgttcacaggcggtacttcttcaaaagaaacaacctccgcatcaaattgaatattgaacaaaatgcagacagccaattatcggctgtctgttttttacggcgagccgccgttccctattcgtgaagacaggttaattaaatgaaaaattgaaaatgtaaaatggaaaattgcggtcgtgaagacagtttgtttaaatacaaaacatattatgcccgagcgtagcatttgcagttttttctacaaaccgagccgtaagggcggatattatccgcctgctctaatgaatttttttgttcaataaatatgttttgatatgatgaaaattccgctgtaatataacaaccgcattgcgcataaaacaaaaatgcatcagaaccttacttggaatctgatgcattttatttgtttgattattattctattttcgtataataaatactcaaaaacagctgataaaattctgcctcgctgacattgaattctgcgtactttgaacccattgtaacctgaccggggactgaaaccatatcaattccgttcataccgccaagcacagcctgctgagcaagatatgacacctttgacgggttaagatttgtacatgaatacggagcggacgcattgaacaaatcgattggcgtggttaaatcttcctttgtctgctgaagaaccgtattcataaaagactgaatgtaaaccttctgtctttgcatacgcatattgtttgaatcggtcttgcttgtatcacgggttctgacaaagctttcagcctgctgtccgacaaggtgatagctttctccctcaacaaactccccgattgtttcgggtgacacaacatcaacaccgccaacgctgtcgttgagagcggaaatgccgtcaaggtcaagcgagaagtatgtattaatcggaatgttatagaacagcctctgaactgaatttaccgtattttcacagcttgattccttaccgtcaccgtatgaatacgaaagacaaatctgctgtttttccgtgccggcatacgcaccgcctgctgaatacattgtgacatcaatcatcgaatctctcgaaatgttgaagagtgttattttaccgtttgaagtgtcgattgacacaagcataagcacatccgcctgacctccgctcgccttgactttgctgttattattttcgtcaaggttgcgcttgtcaacaccgatacacagaacattcgtcaccttttcgttgaactgatatgtttcaccgttgtatacgacatacttaccgttttcctcggtttcaatgccctgtggggcggtaacatgaatatccgtattaaacagctcgtttccgccctggtaaatcaaatacgcaaccgtgcctacggtgagtataattaaaccaagtaatgtacagccgattgacaaaagcacctttttccaggttttcatctttcgatgctttgaatggtgatgatgcgactttgatctatgcttattatagtgatttgtggtgttactattcacgacaatgctgtcggaatcaactccatacacatctgtatatacttttttctttttctttattaacttgctgtccttgaaaatataaccttctatatccagccttgaaagattgcttacatgctccttactgttcttttctctttttgattcaagaatttccggtgtattcggatcaaacttgttttctatattttcagttgttgcctcagccgaactttcattttgtcggttcatctttcttcagcactccctgcacaagatatcttccgtcaccgctgtttaagcatgtgcttaaaacaagaattttatcatcggtagtaagctccgtatttctcttgttcacagaaacagaatgtgggtttttaatcatattgagataatccgaaaatacattgtcattggaaaaatcaaacgaattcataatgtgtcggttatcatattcaaaagctgacacaatttcgtatgtaagctttctgtcgggagtgtaaacatagatgtacctgttcttgttaaagaaatcgacatcataaaagcgatggagcgttgcaaacattgagccgtttgccatattatgaccgtaaagcacagtcactctgtcggaataatcacgcttgttgcacatctgcgaatagatactgcccgaaaagctgtaattcttataaatatcgtggtcaagatataagttatcgtcaagatgactttgcaaaacaggataatttacatttgtattcggaatgtaaatccacgaataaatgtcgctgttctgctgttgaagcgacttgaaatcaatcggattttcgacctttttcacattgattgacggtgaagtcacttctgttgcagaggttgtaccgttttcaatgcctgacgcatacgagcccgcgatgttatcaagactttttcgttcgttattttcatttaagtttttaacgactatgtacgcaagtgtgccgataattgcagccacaagcaaaataatcaaagctataagaaatttgtttctttttctgctcatatcaaaaactcccaatcggttatattgtatcatttttgtgtcagtgtgtcaattaatcattacttgttagtaaaattttattacaatttacaaactactacatctgcaatacaaaacctgattattcaaacatctaatgaataaaaaagagacttccttatgagaagtctcttgatttttagttaaggttggattatttgctctttacaagcttaaatacagccgcaccgcaagccgcaagagaaagaactaaaattgcatacggtacaacatcgcttgcgcctgtctttggtgaagttgttgaatcatctttctttgccgtagctgtagcaacaggacctgttgtgccgccgctgcttgccttacggtaataaggagtacaaacaaggtcacctgaaataataatattcatattagcatctgtatacttgctgtcggttctaaaaggaccgcccgaaatttcccagtggtcaaaagtatagccgtcatatggaagcggctcaatgtaaacatgctgttcgccgttttcgtcaatacctgttgtgaacttataattaccgttaccgccctctgtcggaataacttcaaccttatatttgaatgtattcggctgaggacttacggcagcaaatgcgggaactgccgacaataacatcatca

SEQ ID NO: 535 - DNA, 13032 bp, unidentified
  source 1..13032: mol_type = unassigned DNA
atgactttaaaaaagaacgatattgtaaaccttacaataacttcggcaactgccgagggcagcggagtcggaagaacagatgacggcattgccgtttttgtacagggttctgcaatcggtgacgaactcaaggtgcgtatattaaaggttaagaaaacctacgctttcggcaaaatcgaagaaattctcgttccgtccaaggcgagaattactcccgactgcgaaaactttatgaagtgcggcggttgcacatggcgacatatttcttatgaagaagaatgcaaaataaaacagcaaagagttgaggatgccgtaacacgcatcggcggtcttgataatgttgttttcaagccgattatttcgtcggataatatcacaagataccgcaacaaggcgcagtatcctgtcggtcttgaccgtgacggaaatgttgtgacgggtttttattcattccacagccaccgcataatcaattgcaccgactgtattttacagcccgaaatttttgcaagggtaattgaaattacaaaagattttatcgcaaaaactaacacggaaatttatgatgaaacaacaggcaagggcagacttcgccacatttatatcagaatcggcgaggtttcgggcgagcttatggtgtgctatgttgtcaacgcaaacggtcttaaacaggaagatttactcgtgaaaatgctcaaatccgaacttccgcagttaaaaagtgtgattattaattcaaacagagaaaaaaccaatgttgttctcggcagaaaaaacagaacaatctacggaagtgaccatattaccgacacactttgcggattgcagtttaaaatttcaccgttttcgttctggcagatcaacagaaaacaggctgaaaagctttacggcaaagccaaagaatatgcaaatcttaaatctgacgaaattctgcttgatttatactgcggaacgggtacaataggtcttacaatggctgattcctgtaaacagcttatcggtgcggagattgttgaagatgccgtgaaagatgcaaatgaaaatgcaaaagcaaacggcattgaaaatgcacgattcatctgcggagatgcctcagatgccgcatttcagcttgaaaaagagggtttaaaacccgactgcgtaatccttgacccaccgagaaaaggttgcggtgaagagcttgtaaagacaatttcaagaatgtcgccgagccgtgtagtctatgtatcctgtgaccccgcaaccctcgcaagagatttaaaattcttcacagaaaacggctacacccccaaagaaatcaccccctgcgatatgttctccggaacctcccatgtagagagcgtggctctgttgactaaagtacaggagtaaaagtgtgaaaattattaaatttgaagaaatctatcgtgatgatatgatttttacggttttacaggcaaaagatgctttgggtagaaaacctactataaatcctgaccttcttgatattaaggcaaactatcttgattgcaatgatatgttttggcttgcaatagatgaaaatgacagggtagtcggatgtattggatgttcaagaattactgatacagatcaggcatttttgcataggttttatataaaaccgtcattaaaacgaaagggaatcggcgcaaagttacttaatacggcagagttatggatgcgtgaaaacggtattgctgtttcaaaagtacatttggggacaccaaaagagcagtggtttgaatcttatgctttttatccgaaacacggatatatagaatatgaaccaaggtatatgatgaaggttctgtaattaatgaaagtcaaaagtaacatatttattatgattattgagtagtgcaacaaataaaatgaaatatgtttggggtttggggtacgatattgaattgacttatttaaaaagaaaaagtgacaccgatggtgacgctttttgatggaggtgcacaaaatggcaaagaagaaaaatgaaataagtattcgctcaagtgctgcggaatatctcacatatgttgcttctgtgggaaatcaggcagatagctttgaaatgcgttatgaggacgaaaatatatggctcacacagaaaatgatggcaacgctgtatgatgtttctgtgcctgcaatcaatcaacatctaaaaaaaatctttgaagatggcgaattagtcgaggattcagttattaagaaatacttaacaactgccgacgacgggaagaattatcaaacaaaacattataatcttcaggcaattattgcagttggatttaaagttaataatgaacgagcagttcgattccgtaaatgggcaggtcaaattgtaaaagattataccattcagggctggacaatggatgtagaccgtctgaagaagggcacgatgttcacagatgaatattttgaccgtcagttagaatacattcgtgaaattcgcctgtctgagcgaaaattctaccaaaaggttacagacctttatgcaacagctttcgactatgataaagatgcaaaaaccacaagactctttttcaaaactgtgcagaacaaaatgcactatgctacgcacagacatactgctgcggaactgattgttgaacgagcggatgcggaaaaggaacatatgggactaacctcttgggaaaatgctcctgatggtaaaatagtgaaaagcgatgtatctgtagcaaaaaactatcttactgaaaaagaattgtcttttttggaacgcattgtatcgctgtatctcgattatgcagagttacaagccgaacgtcatattcctatgagtatggaggattgggcgaaaagacttgacggtttcctcgaatttaacggtactgaaattctcacaggagcaggaaagataagtgcagagcaggcaaaacttcacgcagaaacggaatttgaaaaatatcgtgtaattcaggacagattgtttatgtctgactatgacagatatttacttgaactggaagaaaagatgaaagaagagtaaatggaaattttaatgttttgcgagaaattataaaagcatctcattgcatgagtctgtttattgagatatgattggcttggaggtgatacattatggcaaatgaagataaaaaggattttaatgctatgcttatggatagcaaggatatgcctaaatttcaaataatcacagatgaaaagagtattaaaaaatatggtggagataaaatgtattttgcaccgccaatcgactatgacaaagtaatgaaaaaaattccatatggtaaagtgattactgtcggaaaaatacgagaatactttgcagagttaagcagtgccgattttacagagcctatcacagccggaatttttgtttcaatagttgcatgggcgagttatcagcgcacagaggataaaaccccttattggagaacattaaaagcaaatggagaattaaatgcaaagtatcccggaggaattgaggcacaaaagaaaatgcttgaaactgagggacatactgtagtgcaaaaaggaaaaactaatatcaagtattatgttaaggattatgaaaaagcattatttacattgaaatagataatgcgaaaacttcagtttcacggacatatccccacaaacggcagaaccacgaaaaaggctgtggatgtattcccttgaaccaaaaatcagccaagaaattcattgtattcagatgagccatgttgaaagtgtggcattgattgaaagaaattaacaaaataatatagaaaaggacttaaaatgcaaaatacacttaaaataaaacgaacaaaaacagctttggcatttaatcttgcgattatcgcttgtgagattgccgcaataattatcgtgtttttcaaaataggctgctatccgcttgtatattacactgaggacagcaacctgtttgcacttgttgcctgtgcggttatggcaggctttcaggtgcgatatctcaaaagcggaaaagaaattccgcactcggttcagatgttcaaatatatggcggcggctgtgctttcggtaacatttatcgtagttcttgctgtactttccccgatgcgtggagagggcataaacggttggctctatatgctttttaacaaagacttcacctttttacatactttgtgtccgattcttacaattttatcgtttgtgctttttgaaaaagaacctcaccttaacacaaaatcagctttcacggctacaatccctacattattatatgcgattgtgcttattatacttaatatagttggtgcagttgacggcccatatgcgtttttgcgtgtgatgaatcaaccgttgtatatgtcatttgtttggttcatcgttatagtaggcggtgcgtttttccttgcacttctgcttcaaaaacttaattcgataggaagaaaaagaaaataatagataataagacagtaaacagatgaaaatttcagattggagtgatttttatgaaataccgcaagttggtggagaatgctaaaaagccaaacggcttttggggcaaaatgatgattaaggctatgaataaaggacattcaagccttacctcatggggacttgaacatatgaatatcgaacgcaccgcaactgtacttgacataggctgcggcggcggaaaaaccgttgaccgactttgctcaattgttgccaacggcaaggtttacggaatcgattattccgaactctcagtaaaatcctccgaaaaactcaattcaaaaaatatactctgcaacaaagcgaaaattcttcaggcatcagtatccgatatgccttttgataacaatacattcgataatatcacggcagttgaaacttactacttctggcctgataaggaaaatgatgtaaaagaagttttccgtgttctcaaacagggcggaacggttatgctgctttttgaaatgctcagaacagacgatgatccgttcaagtgggaaaaggttgaaaatatgctgaatatcaagtcggtaactccgcaggaaatcagagccgtacttgaatctgcaggctttgaaaacataaacacatacactaaggaaggtacaacatggctttgtgccacagcacaaaaaccgaagggtgatgaaaactaatgaaggctttgattacaggcgcaagttcgggcataggtaaagaaatcgccagatatcttgcagaactcggttatgaccttattcttgtatcacgctcaaccgataagcttaacaagctgaaagaggaactttcaaatgtgaatgtcagggtaattacgcttgatttttcacgagaaagtgacagtatggatttgtatgagcatattaagaatgaaaatgaacagattgattttcttgtcaacaacgcaggctttggagcatacggaaaatttttggatgttccgcttgaaagagagcttgaactcattcacacaaatgtttcaacggttcacattctcacaaagctttttcttaaagatatggcggagagaaacagcggatatattctcaatgtaggttctgccgcaggatttcttgcaggaccgacatttgcaagctactatgcgtcaaagaattatgttgtccgtcttactcaggcgattcatgaggaaatgcgtagggataataaaaatgtcaaggtttccgtactttgcccgggtccagtaaaaaccaacttcaataatgttgcggatgtaaaattctgcataagaggacttgacccgaagtttgttgcaaggtatgccgttgacatgaccatgaagggcaaaatgattattacacccggctttgaaatgaaagcggtgtcgtttttcagacattttgcacccgaaaaacttctcacaagaatttcttataatgtgcagatgaagaaaaacggtataaaataattgtcatatagaaataggggaggtgacacattgaggataaaattcgttgacaaggcgataaaactttacaaaagaataacaggcagatttgaaccgataacaagcaaatgcgttcacgataatatttttgcaattgccggacaatcggcattctttattatattatcggctgtgccgctctcaatgttctttgtgtcacttttgcaaaacctgcaaattccgattgattttgtttatcacggactcagcagtgtgttttcgtcaaaaattgccgatgacttaacatactttctaacctctgcctatgaaagtgctgtgggaatttctcttgtaacgcttgtagtcactctgtggtcggcggcacagggaatccacgcaatcacaaacggtcttaacagaatttatgacgcttacgaaaacagaaactggttctttttaagaataagggcgatgttctacacaattgcattgtttgtaattgtgcttgcgtcacttgtacttattgtcctcggttcaacaattaacgatttcctttcaccgcatttaaaatcgttgccggacataatcggaataatctatcatctcagatatatacttatctttttgtttctgacggtattgtttgccctgatttacaggaactttccgaacatctcacgcagcgagcataaggaatacggctttaagtcacagttgcccggtgcgtttctctgcacggtttcgtggtatgtgctttcgttcggtatttcggtttatgtgtcggatttcaacggattttccgtgtacggaggtcttaccagaattgccgttattatgatctggttttactttcttatggtttgtcttatggtttgtgcggaaatcaattatgtctatcatgacaggataaaagtgtttaccgttgcaaaatttaaaagaaaggtaaaaaccaaaggttcagagcttaatcaaataagaaaagaaagaaaaaataataagtcaaataaaagtaaataaatcaaaataaaacacttccgttcggtgatactaccaatggaggtgttttttatgaaaagaaaattttctaaaaaggtgatttcaatattgctcgtatttgcaatgctcatcggcggagcgtgcttttcatgcacaagtgcagcggcgtttgaccttggctatatcagcgaggacggaatgaagctcggttacagtataatcaagggctattcaaaaatgtcgatgaaaaaaggtcagtacaaggacgggaaaattgccgtttactgcggacttgatgtgaataatctatatgttatgggttcgctcggttggttctatatgacaaacggtgttgatctcgaccgtgcaatgacggataacgattacgcaatggagatgattgcaaagcttgattcgcatcttcaaggtgcaggcataacaaatgacagggcaaaagaaaagaaagccgagattttaaaggatgcaaagtatgtttatcaatgctttgacacattgggactttacattgttgatgttgacaaaaacagagccgatgaactcatgaacgacagcggtattgattttgtgcttgacggcggttgcgttcccaaaaatatgaaagacctcaacattgacggaaaaacagatgaaaaggacgctgagcttattcagaagtatcttatcaaagacctgacctttgacgattatgacgaaaatcagtatgctatttttgtttgcgatatcaacggtgataaaacccccgatatccgtgatgcgacagaaatcctaaaaaagtgacaattgtcataatttgtgcaaagtgaatatgattttaactgcgacagctgtaattttagctgtcgcttttgatttgtgacagcaatgtgaaactttgaataattatttgtaatttctcttgacattcaaaatgaaggtgctataattactgatacaaattgttttgtatcgaactattctatatagaacaatatctcataagtgtgatttcggaggtgaaataatgtgtgatgacaaaagcgtaaaaagctgtaagtgcaacaaacgctttaatgattcaatcggtcacgaaatcaaggtgcttaatcaggttttgcagagaaagttaatctattccgccaaggataagggtgtggataagctgactcttatgcacggctggattattgcatatctctatgatcatcgtgatgaagatgtttatcaaaaagatattgaaaacgcattttcaattgcccgttcaaccgttacaagtattcttaaacttatggaaaagaaaaattacataacgagggagagcgttgaaagtgatgcaaggctcaaaaaacttgtcttgaccgaaacaggtattgaacttcattacaaaatcgaaaatatgataaccaaaaacgaaactttgcttgacagtctgctgacaaaagaagaaaagaaacaatttctttttcttataaataaaattctcagcggacttgaaaatgcaaattaaaacggaaggagataagtatgataaaaactttggcaaaaaatatcaaaggtttcgtcaaagaatccgttctgactccgttctttatgatactcgaagtaattgttgaaacaattattccgtttcttatgtcatcaatgattgacgacggtatcaacaagggcgatatgcagcacatattcataacgggcggttatatgggtgcacttgcactcacgggcttgtttgcaggtatgatgggcggtatctacggtgcaaaagcttcggcaggctttgcaagaaacctcagacgctcaatgtttgcaaatatccagtcattctcgtttgccaacattgaccgttactcaaccgcaggacttgttacacgtatgacaacggatgtaacaaatcttcagaatgcatatcagatgcttttaagaatgtgtttcagagcgcctgtatcgctcatctgtgcaatggcaatgacattcatcatcaatgcaaggcttgcctgtatttatctcattgcaacaattttactttctgttgttcttgcctttattatgaaggcaacatacaagtatttcagtcaggtttttgaaaagtacgatgaactcaacgcaagcgttcaggaaaatgtaacttcaatcagagttgtaaaggctttcgttcgtgaaaaacacgaagttggcaagttccgcaaggcagccgacaatgtttacagactctttgttaaggctgaaaatgcaatggtaacagtatcaccgattatgatggttacttcatacgcatcaatcattcttgtaagctggttcggcgcaaatatgatcgtaagcagtgagcttacaactggtgaacttacaagtatgctcacattttgtatgaacattcttatgaatcttcttatggtggcaatggtgtttgtaatgctcacaatgagccttgcaagcggtaagcgtgttgcaggtgtgcttaatgaaaaatcaacgcttgcaaatcccgaaaaccctgtttacgaggttaaggacggaagcattgagtttgacaatgtttcattctcatacaacacaaaagccgaaaaaccgattctcaacgatatcaacctaaaaatcaaatcaggcgaaacaatcggtattatcggcggtacgggttcttcaaaaacaagccttgtaaaccttattgcaagactttatgatgtaaccgaaggttctgttaaggtcggtggaaaagatgttcgtgactatgatatcgaaactctgcgtgataaggtttcggttgtgctccagtcgaatgttcttttcagcggtacaatccttgacaacctcagatggggcaacgaaaatgctacagaggaagaatgcgtcaatgcctgcaagctggcgtgtgcagatgcgtttatcgaaagcttccctgataagtacaacacaaaaatcgaacagggcggtactaatgtttcgggcggtcagaaacagcgtctttgcattgcaagagctttgctgaaaaatccgaaaatccttattcttgatgattcgacaagtgcagttgataccgcaacagacgcaagcatccgcaaggcattcagcgagaatatccccgatactacaaagctgattatttcacagcgtgtatcaagcgtttcacacgcagacaagattattgtaatggatgacggtgagataagcgcagtgggtactcacgaagaacttatcaaaaacagtccgatttacaatgaaatttatgttgcccagacaagcggcaacggtgattttgatgcgaaaggagagctgtaattatgccgggaccaatgggaagaagaaaccgaggacctgcacaaaaggttgaaaattcaggtcaggttcttaaaagactattcggtattatcttcaaaaaatataaatttcagatgattattgttttcgtatgcatcctcatcagcgtacttgcaaatgttcagggttcattgtttattcagaatcttattgacgattacatcactccgatgattcagagcggcagccgtgacttcggaccgatgctcggagcaattttaagagttgcaattttctatgcgatcggtgcagcgtcggcgtttatctacgccaaaattatggtttatgtaacacagggtacaatgcgtgatttgcgttgtcagatatttgaacatatggaaagccttccgataaaatactttgacacacaccctcacggcgatatcatgagtgtttacacaaacgatattgacaccctccgtcagatgatcagccagagtattcctcagcttttcaacagcggaattacaatcatagccgttcttgtcagtatgtttacactcagtattcctcttacaattcttacacttgtaatggttggtgtaatgctttttgtaacaaaacagcttgcgtcacgaagcggaaggttttttgcaaaacagcaggcagacctcggtgcgactaacggttacattgaggaaatgatgaacggtcagaaggttgtaaaagtatttaaccatgagaaaaagagcattgaagaattcaatgagcttaatgacaggcttttcaacagttcatacaacgcaaacaagtttgcaaatatccttatgccgattaacgcacaaatcggtaacatcagctatgtactttgtgcaatcgtaggttgtatctttgctctcaacaacttcctcggatttacaatcggtaaactcgtaagcttcctcacattcaacaagagctttacccagcctatcaatcaggtcagccagcagtttaactcaattgttatggcgcttgcaggtgcagaccgtatctttaaacttcttgacgaagagcctgaggttgatgacggatatgtaacacttgttaatgtacgcaaagagggcgacaggcttgttgaaactgaggaaaaaacaggtatgtgggcttggaagcatactcacagcataacaggcgaaacagagtatcgtgaactcaagggtgcgcttgttatggacgatgttgacttcggttatacagatgataaaatcgttcttcacaatattgatttgtacgcagaacccggtcagaagattgcgtttgtcggttcaacaggtgcaggcaaaacaacaatcacaaaccttattaaccgattctatgatattcaggacggtaaaatccgttatgacggaatcaatatcaacaaaatcaaaaaaggcgaccttcgccgttcactcggtatagttttacaggatacacacctgttcacggataccgtaatggaaaatatccgttacggcagacttgacgcaacagacgaagaggttatcgcagcggcaaagcttgccaacgcagacagctttatcagaaaacttcctgacggctacaacaccctgctcaaaggtgacggcggcaatctcagtcagggacagcgccagatgcttgcgattgcaagagccgctgttgcagatccgcccgcacttatccttgatgaggctacaagttcaattgatacccgtaccgaaaagatggttcaggacagcatggataagcttatgcacggcagaacaacctttgttattgcccacagactttctacaatcaagaattcagactgtattatggttcttgaaaagggcagaatcatcgagcgtggttcacacgaacggcttcttgaacaaaagggcagatactatcagctttatacaggcaaaaccgcataatgataatcgaaaggggagagttgcaaaggctcccctttttctgttcttgaaatattgacttgtttattgtacaataatattcggaattgtgaggtgttaaaaatcaaagctaattcaaagctaatattaaaacttactgcattgctaacagtaatttgtcttgcactttgttcgtgttcaatcaatatcaatgtgaacggttccgattcggaaagcaaaacaactgtttcagaaatcggaacattatcggttcattaccttgatgtcggacagggtgacagcatatttattgaactgccgaatcaaaagtgtatgctgattgatgcaggcgaaaatatgtacggcaaaagtattaccgaatatatcaataatctcggatacacaaatattgattatctcgttgcaacccaccctcatgccgaccatatcggttcaatggcttatgttgtaaagcataataatatcggcgaaatctatatgcctaaggttacaaccacaaccaagacctatgagaatctgctcacggcaattgcagacaagggacttaaagtcaagtcagccaaagcgggtatgaatattattgatggcaacgatttcagcataaatattcttgctcccgtaacaattgacgatgataatctgaacaattgctcgataattctaaaaataacttataaaagcgacagctttctgttcctcggagatgccgaaaagaaagagcttgaaaccgttacggcagatatgagtgcagaagttcttaaagtaggtcatcacggaagcagaacttcaacaacaaaagcgttgcttgaaaaggtaaatccaaaatatgcggttatttcactcggcaaggataacagctacggacatccgcacaaaagcacattaaagttgcttgatgaattcggagttgaaacatacagaaccgatgaaaacggaacagttgtcatttcaaccgagggttcaggtgtgacaatcaaaacgggacaaacttcaatgaaaagggatgaataa

SEQ ID NO: 536 - DNA, 16356 bp, unidentified
  source 1..16356: mol_type = unassigned DNA
gtgataagcattttagaggaagcaatgacgcacattgatgaattggaaatagaaaatgaagaacttagggctgaaatagagcgtcttaaggcacgtaatttaggaggacgtaaaaggcataatgcggcatggatggcttcttatcaggaatttgcaattaagtatgaagcgggtatgacaattatggaaattgtaaaagaaggtcaaatcagccgaaggacagcgtatcgttatagggcatattatgatgaaatgataaatcaagtgcaggaatctgctatgtcggataaaggatgtatttataattgaaaaaagaaacgggcaagccacaacaataagtgcggtgaaaacccatttcttgattagaatggtagcaagaagatgtttgattgtcaagaactatgtaaaaatataattgtgaataaggggatattaggatgcaaaaacttatgtcaaaggataaaaaaggaagaattttagtgaatgggggttataagatttgcaatataccaagcaattgtagccgtaatgaatgttacaatgactgcgtcatagatatgatgattaaacgtttatatgaattggaacatgccccaaaatcaataaattataacatgaatatataaggttatttcaatttcaatcatattttttgcattgaaaagaagcttttttgaagaacgagctatgagaatagtaagtgatatcggcaataatatcgcagtaaggaagattataaaaaattaatattagtaaaaccgtaatataccgtaatatgcgcatttggtagtgacaatgtagaaggttttacgaggaatgatacgtattgcgaaaaatgaaatctataaattagaacaataaaaggtgaaagaaaattattaatgaaaaagtttgaaaaattgtatgaacttataaaccaaataatgaaagtcatgttataataatttagttatattcaaaagtgaaaaaggggatagttatattggaaaaaggtgatagatatattgcagatatactttttagaattaaaatattacagtataaaggacaggcatttgaagatttttttgtttttgttatgacgaaagcggaaccaaattttcagccggttaaagcatatggtaatataggtgatagaaaaaatgatggatttgttagccaaacaggtatttactatcaagtttatgcacctagagatgttaataaagaaaaaacagtaggtgatgcggtaaaaaaattagaaacagattttaaagggttgtatgataaatggaataatatatgtgcaattaagaaattttattttgtcgtaaatgatagatatgaggggttgccagcaccaataattcaaaaagctctcgaattgaaatcaaatccattatattcagaaatagaaattgaaacttttacagcaaaagatttgcaaggaaaatttgacatgttagatgaaaatgatatgcaggagatagtgggatttattcctgatgtgtcagattgtattatagaatatgatgcacttaatgaagttgtaagatatttattgaatgcagaattgccaattagtactggagaaaaattggttgtaccagatttcgtccaaaaaataacctttaataatttaagtgaagaaattgaagcaaatcttactgtagggagctatcaagaaggattattaaatcaatactttaacgaaaatccgggaataaaggatattttacaaaaaaagtttagggctttatatgaaaaggcatgtgaaattattgaagatgagcaagagaatgcttcagattgtagatgctattatattctggaaaattccgtgcctaaaagaaccatgtcgatgcttacatgtgtctgggttttgatggcatattatttttcaacatgtgatatatttgaagaaccaaggtagataaggctagatatagaaagggatgaaaatatgatattaccgaaaaaacaattgtcagtaagtgagtccttttttggatttggtgcttttctacttcagcaattatctaaacctatgacgatagatgatttatgggaatattataaagaagaatattctaataaaagatattcgacgaaattttcctttgatcaatatattatggccttagattatttgtttattattggtgcgattgaaaaaaatgaaaggggattgctgtgttatgagactgataagtttaactgctaatcaaaaatcttttcatccaattatttttaaagatggcattaatataattgcagggaaacaggttactcctcataatgagaatgatggcaatacatataatggcgttggcaaatcattaactttacatttaattcatttttgtttgggatcaagaaaaattgaatcttttgcgaaagttattccagagtgggagtttacattaagatttcaaatagatgataaagaacactattgcatgcgatcaacatgcaatcaaaataaaattgaatttaatggagagatactgaaaccaaaagaagttcaggagagattgagagaactttgttttggattaaaagaaacacccaaagatatgacatggacaactcttttttcaagatttgttagaaaatctcgtctgtgttattcaatatatgatgcttttgttcctaaagaaagcgattatagtaaaattttgaataattgttttttgttagggatagataaggaactaattgttgctaaaagggaacttcgcgataggcaagtggctgcagcggcaacagagaaggcaataaaaaatgatccgctttttcgacagtactatttgggaaaaaatgatgcagaattagatgttgcagatttagaatatagaattgcagaattggcaaaggaaatatctgtgttcaaagtatcaaaaaactatcatgagttagaaaaagaggctgatgaaaagagttatcaaaagaaagaactggaaaataaaagagtacttgttagcacatatataaaaaatattgaggaatctacaaaggaaactactgaagtaaaagaggaaaagttactaaaaatatatgaggcagctcaaatagaaattccagagatggtaaaaagaagtcttgcggaggtaacccagtttcatagtgagttattggctacaagaaacgtacgccttcgaaatgaactggcaaaacaaaaaagagcgttagaggaaattgacagcaaaatagtagaacttggaagtaggatggatgaattgcttgattatttgaattcgcatggagcattggaagaatatgtggcattgacaaaacaattatcatctttacagaatgaattgaacaggatacaggaatatcaaaaaattttgaagacatatcgagaaaataaacggagaattaaggaggaaatgataaagcaagataaggcaacagatgagtatcttgatgaggaaagcgggtatttggaagaattacgaaataagtattgggaatatgccaaacgcttttatcccaagaaaaaaagtggattggttataaaaaataatactggagaaaatttgttgcgatattcattagaagcacgtatagaagacgactcctctgatggggtgaatgaagtaagaatgttttgctttgactggttgattttgaattgtgagataagcaagatgagatttattgctcatgatagtagattgtttgctaatatggatccaagacaaagggagactctttttagaatagtatatgaaacatgctgtaaaaaagattttcaatatatatgtactattaatgaggatgcacttgaatcgtttgagggtataatgagtacagaagactataaaaatattgttagggataatgttattctggaactcaacgatgatgcaccagaaagcaaattacttggaattcaaatagatattgacttagaggataagagtaaggtgacagatgacatagcttgaaagatgaggaatgttcatgcaaactatgagcattcctccttttgcatatatgtatttaagacatatggtagactaggaggtaacagaaccataggaaaattgttgttgaatataggcatacactacttatgtatccatagataaaagaaagcaataatataattggagagataaatacaatccctatcataacccctcagatactttcatacactgtaaaaaagtatcctgaggggttttcctttgaaagactatattgaagaacgagctatagggatagcgggctatatcatcgaccacaacgccacggtacggcagactgccaaggccttcggcatcagcaaaagcacggtacataaggatgtgacggagcggctggcccaggtgaatccggcgttggcgaagcaggcgcggaaggtattggatgtgaataaatccgagcgtcatatccgcggcggactggctaccagagagaagtatctgcaccagcactagatattcgatgaggcaaatcattctatacgggaaagtgtcttgaaataccgggtaccaacttatataatggatacatagctatatgggacaaagtagttgggacataagatacaaaagatatcaggacctttacgcggcaggatcacttatgaggagagaaaaacgaaatggcaacagagtttctgaatgatgcacggaaagagatcgagagacggacagaagacttctgtggggaattaaaagcattctatcagggcaacggggaagcggaacagaacctgatggagcagacaacccagcctttctggcaaagtctgcgcctgagcagaaaaagactgcagcagcgggaactgacggtggatatggagatgcaggagccggcacgactggcggactatgatggtccctggaaggatggttatgattatagctgccgccgtacccagccggtaaaaatgagacggacttattaccgcaagggaaaaaagattgcgttcctaaagacaccggagattgcagcggcgagctttttgaaagcggatgtgcagggagatatggttatctgccctaactgtggacatgagggaaaactgaccagctatatcgatggctgtgatgcctgcggggcaaagtttctcgtcagtgattttgaaacaaaggtatccggattttctctggaggaggacgcaagacagaaaagtatttccaactttatgaaagccggtgctgtggtgggaattacagcgatttctcttgcggtactggccatctgtgcgggcggcattatgtttttgctgttggcgttgggcaggaacggatacaatgcggtaaaggcagccgcagccatgatgctgggaattggtctggctccggtatttttccggtcgttgttttacatgctcattatatttattgtaatgttgatcgtgatggagactcgcagaaagccgagaattcaagacgaatcgaaagtaaaggccgcaatcccggaattctccacgggtaattttcttcagaatctggaataccagctgcgaatgatccatctggcggatacggtagagcaggtacgctttttcgcatcctgtgatctggatacggtggtggcacggtatcagaatgtggtggactgttgcatttgcggtgtgcgttttctggaggcggagacacggggagagtcttacagaatcagcgtggaagtgaggacccgattgacactggatacaggaaagaagatccggaaccgttatgaggagatccggctggaactggaaggcagacaggatgtggtaacgcagcacagcagggcactccgggaatacaaatgccccaactgcggaggcagtgtggacattttgggcggcggagtctgcgaatactgtaataccgcggtggactaccgaaattttggctggatcatcacttcttatacaaatctggggcagccagagaatccttctgcgaaaatactggcgggagcactgggaagttatctgctcattttgcttttgagtctggtactcatggcgcattccgaggatggaaaagatacttttgagatcttacagagtgtccggatgtcaacggaatatctgaaagcggtgcagcaggatattatctatcccgatgctgtgatttcagattgtacggagacagacagcgaagatggaacttttgcttcaataaaggtgtactcctgtggggaccgggatgcagtaaaagaagactacaaaactgcactgctggaaaagggatttctggagatgcagcagtacccggagggattttctgtctttttgccggagaatccgtcagaatatgccgcggattcggaagaaggaatgttctatcttgtgatccgcgcagaaaatgcatcggagggaattacagtaactgcgacactggtggatgagaactgggatccggtacaggaataaaaatagaataagaaaatgcgacaagggacccgggcgaaagcttccgggtcctttttagagggaaagtgtttgtagttagcttattgggtgagaggaattctgtggaccaccctgcgatagagcttccacaggagcacagcagggaaactgattgccagatatgctgtggataaaagtccggtagcaccgcctacgattgcaataattaaaattccgatgttcatgatggattcctcgcttttttgtcagtctgtaaagtgcttgctgattccttcaaaaactttacatatcgtattatagtaaacagatacccccgggtgaatagttttgagcgacccttaacaccattttgtcgggttatttacagaatctttgcaaggcatttacagaatcttaacagggcgggaacgatcccgggagtaaggtttgcaatcgcaggaaatatcaagtataatagagaaaattgactgttacccggggtggaatagtcggagaaaataaaacggaggtaggaatatgagtatgacactggaacaggctaaggagaagcttgcaaagtatggtcaggaacatgttctgaagtattacggggagctcaacgaggaagagaagcaggggattctggatcagatcgaaactacggatatgagcattctggaagcttgcaagcataaagaagatctggcaaaaaaaggagtgatcacaccgttggctgccatgcagttagacgaaatcgaagcaaacagggaggaatttaccgcaaccggtatcgaagcgatccgacagggcaaggtagcagcggtccttctggccggtggtatgggcaccagactgggatctgacaatcccaagggaatgtacaatgtgggactgactcatgaactgtatatttttgaatgcctgatcaataatctgatggaagtcgtacatcaggcagacagttggatccatctgttcgtaatgaccagtgataagaacaacgatgcgaccatagcctttttaaaggagcatgatttcttcggatataatgcggaatatgtgcatttctttaaacaggagatggctgcggctaccgattatgaaggtaagatctatctggaggaaaagggcaagctgtccacttcccccaatggtaacggcggctggttcatttccatgaaaaacaatggcatgctggacattgtacacagagaaggcattgagtggatcaatgtatttgccgtggataatgtattgcagcgaatcgcagatccctgcttcatcggagctactattcagaaaaattgtgtggtaggctccaaggtggtccgcaagaatgcaccggatgagaaggtaggcgttatgtgcttagaggatggcagaccttctatcgtagaatattatgaactgaccgatgaactgatgaatgctaaggatgagaagggagaacccgcgtataattatggtgtgatcctgaattatctgttcaaggtacaggatctggaaaagatcatggcagagaagatgcccctgcatatcgtagagaagaagatcccgtatctggatgagaacggagaaccggtgaagccggaggctcccaacggctacaaattcgagagtctggtgctggatatgatccatcagatggacagctgtctgcccttcgaagtagtcagaagaaaagaatttgcgccgatcaagaacaagatcggtgtggactctgtggaaagtgccagagaactgctcaccgagaatggtgtggtgctgtaaacatttcgacagattttcacaacataaggttattgaggaatcgatagaattacagtaatctgatactgtaagaaacgaagaaaaaatttcatccggctctgacagatgagagattgtgcagccgccatagtgaacaaatagtattgtcctatgcacggcggataggagagagtgtatgagaattttggtaacaggtggtgccggattcatcggcagtcataccgtagtggaattacagcaggcaggctatgatgtagtcgtattggataatctctgcaatgcaagtgagaaagtgatccccagagtagaagccatcacaggcaagaaggttcctttctataaggcagacattctggaccgtgaagctctggaagagatcttcagcaaggaacagattgacgcagtcattcattttgcaggactgaaggcagtcggtgagtccgtacagaagccctgggaatattatgagaacaatattgccggtaccctgaccttggtagatgtcatgagaaaacatggtgtgaagagcattatcttctcttccagcgctaccgtatacggcaaccccgcatttgttcccattacggaggaatgccccaagggacagtgcaccaacccttacggctggacgaaatctatgctggagcagatcctgacggatatccagaaggcagatcccgaatggaatgtgatcctgcttcgttacttcaaccctatcggagctcacaagagcggtaccattggcgagaatcccaacggtatccccaacaacctgatgccttatatcacacaggtagcagtcggcaagctgaaagagctgggtgtcttcggtgatgattacgatacccccgacggaaccggtgtacgtgactacatccatgtcgttgatctggcaaagggccacgtaaaggctctgaagaagattgaggagaatgcaggactgaagatctacaatctgggaactggtgtgggctacagtgttctggacatcgtgaagaacttcgaagcagctaccggcgtgaagattccttacgtgatcaaaccccgccgtgcaggcgatatcgccacctgctattccgatgcttctctggcagagaaggaacttggctggaaggctgagaacggcatcaaagagatgtgcgaagactcctggagatggcagaagaacaatccgaatggatatgaagaataataaaacaatattgaaacatacaaagggacatggccggtgggtcatgtccttttgtgattcttaacggtgaaaaatctgaagcgcccggaatacctgctctacggtatccgccatattggtcatggcattgtcggtatgcatagcctcatccagggataccacgttccgcagaatcgggaaaaaggcatcgatgccctctgcgttgcaggcaacggcctctttggccacgcagccggaaaaagcaagtaccggtttttcatattttttggcaatcttggcaacaccgatgggagcttttcccataaccgtctgaccgtcaaggcggccttccccggtgatcacgacatctgcatcccggatatatttttccagatgggtttcttccagaatgatcttaataccggattccagtgtggcattgcagaaggtaagaaaagcaaaccccataccgccagcagcaccggcaccgggatatttggcatcggcatgaggaaactgttctctggccagagcggcataataagccagccatttgtccatctgcaggatcatagtggaagtagcgcccttttgcggtccgtagatggcggaacatccctgctctccgcagagcgggttggagacatcgcaggctatgcggaaagtacattccttgagttcgggaagcacatgatccgtagtgatggattccagatcctccagtcctttggctccgaagcggatctgatttccgtttttatccagaaagccaaagccaagtgcctgcagcattccgacaccgccgtcattggtggcactgccaccgataccgacaataaaatgccggcagccgttctggattgcatctttgatgacttcgcctacaccgtaagtggtggtgttcagaggattcttttcctctccgctgacctgggtaatcccggcggcaccggacatttcaatgattgcggtatgggtctcgtcgacgatgccgtaaggacagacaacggggtgaccggaagggcctgtgacctgcacctgtgtcatacggccgtcacagccgtttaccagagcatcgacggtgccctccccgccgtccgccagaggacggacggtaatatgagcatctttataaacacgtttgatccctgtggcggcgctcaaacccgcctgcatggaggtcatacttcccttgaaggaatcgatagctattactacattcataaggttcctttccgctgccgccggaattcggccgacaactgtcgttttcgtatagattttcggaaaatggcataatttctgaggatattatagcaacaccggaacaaaagaggaatggttcccggagaaaaataaaatttagcgtggtacagtggcaaaaacatcttataagatcattgcatctgagaaaacaatccagtataatgaaaggagtgcacatttagatgcacattacgcataagaagtggaataacaggaggacgagcatgattcagttaacacagggcggcgcttacctggtaaacggtacggacatcgtagcggataccccggaagcagccagtcagatacaggcgaagaccggcattacgatctccaaagaagaagcagcgaaaaacaccatggcatatggtattctgcaggagcataatacctccggcaatatggacaagctgaagatccgtttcgacaagcttaccagccatgatattacctttgtaggtattatccagactgcgagagcatccggactgcagaagttccccatgccctatgtactgaccaactgtcataactctctgtgtgccgtaggcggtaccatcaacgaggatgaccacatgtttggtctgacctgtgcgaaaaaatacggcggagtctatgtaccccctcatcaggcagttatccatcagtttgccagagagatgttagccggcggtggcaagatgatcctgggttccgattcccatacccgttacggtgcactgggtaccatggctatgggcgagggtggtcccgagctggtaaaacagctgttgaaccagacctatgatatcaacatgcccggtgtggtagccgtatacttaaagggtgctcccgtgaagggtgtaggtcctcaggacgtggcactggctatcattggcgcagtattcaagaatggctatgtaaaaaataaagtaatggagttcgtaggtcccggtgtggcttccctgagtgctgatttccgtatcggcattgatgtaatgaccacagagaccacctgtctgtcctccatctggaagaccgatgaccagatccgtgagttctatgggatccacggacgtaccgaagactataaggaactgaatcccggccaggtagcatactacgacggactgatcgaggtggatctggacaagatccgtcctatgatcgccatgccgttccatcccagcaatacttacaccatcgaagagctgaatgcgaacctgatggatattctggatgagacggagaagcgtgcgaaagtaagtctggacggtgccgtagactttattttgaagaataaagtaaagaacggcaagttcattgtagatcagggtatcatcgcaggctgtgccggcggcggattcgagaatatctgtgcggctgccgacattctgaagggcagatacatcggtgcggatgagtttactttaagcgtatatcccgcatccatgcccatatacatggagctgatccgcaacggctgtgcggctaccatcttagagaccggtgcagtgatgaagactgcgttctgtggtccctgcttcggtgccggtgatacgcctgccaataacgcattcagtatccgtcactctaccagaaatttcccgaaccgtgaaggctccaagctgcagaacggccagatcgcttccgtagctctgatggatgcccgttccatcgcagccactgcagccaacaagggtgtgctgactcccgcaacagacttcgatggagatttcggaaaatacaaatatcatttcgatagcaatatttacaagaaccgtgtcttcgattcccacggtgtggcagacgagagcgtagagatccagttcggccccaatatcaaggactggcccgctatgggtgccctgcctgagaatctggtactgcaggtagtatccgagatccacgatcccgtaactactaccgatgagctgattccctccggtgagacctcttcctaccgctccaatcctctgggactggcagagttcactttaagccgtaaggatccgcagtatgtaggacgtgccaaggagatccagaaggcagagaaagagcgtatgaacggcggacatccctgtcaggcagttccggtactgaaggatgttatgggtgaagtaaagaaacggtatcccgatgcaagtcgtgagaacaccggattcggttccactattttcgcagtgaagcccggagacggttctgcccgtgagcaggccgcttcctgccagaaggtattaggcggctgggcaaatattgccaacgagtatgccaccaagcgttatcgttccaacctgatcaactggggcatgcttcctttcctgatccagcccggagacctgcctttcaagaatctggattacctgttcattcccggtattaagaaagccgtggaagacaaggccgaggaaattaaggcatatgtggtaacaaccggagaaggcatgaaggaattcaccctgaagctgggagagctgaccgacgaagaacgtcagatcatcctgaagggatgcctgatcaactataaccgagtgtaactattcagagacatgtgacgaaccagcgcagatgcgtttcgcgaagagaggctgaatagttacaatgagaagtaaggagaaaaaatatggaatttaacaaaccggtatccaaccccatgatggtgggatccattgaattattaaaagcagaggacaccccggaacacagacagatgttcctggatgaactgcagaaagcaaagttcctgtctccggtcgtgatcgatccggtgcctgtgcccgatgaaaacggccgggtgaccatcgcaagagatgccaaagtacagttcccgatgctgtccaccgaggacggtcggaagttcttcatggcgttcactgactggacagagctaaaaaggtggagagatgaggagaatcagcagactttcgccatgaactttgacgattatgcgggaatgctgctgcgcaaagatgcacagggcaatatcagcccggcgctgggattcgtgatcaatcccttcggtggcaacatcgtggtgaccagagaaatggtagccagcatgatctcagcaaagctgaaagcagccggcagaccggtgcctcccgcacccggaacccctggcgctcccactcagcccaaacagcagtaaattaacactaaataaaatgtccatagcggacgatataagtagcagagaggtgacatggccagtcacttcctgctacttattttttacagtttgataatgacaccacggatggtaaccagacagaggcatattatatgtattctgtttctttaccatctttttttagtttaacagttcagccatgcaatatcatatgttctgcgtggatgctggcacacaaagcagaacatatgatattgcatgctgcggtgaactgttaaacgttacaggaagcgcgccctgttggttcgtggtgaggtcggggaaaggagaaaattacagatttgagaattgattccgcaagcataggaatggattccgtcagaagctatcacgcttctaagacaagcgtcagacgatttgagataacggattatcaggcaggtctgacagatgtatccactaagggacagaagacaccgaatggtgaggataccacacagaacacggaggaacaggagaacactgcagagaacaccacgatgacagccaaagactggcagagtcgttttctggtatcttctgccagatgggatatgcgaagcagtgccagtgaacagacattgtctaccatccgggaatatacggtgcgttatatttttgatttattattcccgtccaggaacagcactttgcgggactggatgcaggaaaacggatggagcagcggtaatcagaccggaaacagctggaatacagggaatagcgtaaataatacccagacgaattccggcagcacacagggaaccgcaacacctgcatcagacgtgttcaatctggtcacgtcccgtgtgaaaatattgaactatgtgagcgagacctggaacatagaacaggaggataccagtttttccaccgtgggaagcgtgcggaccaaggatggcagagaaatcaattttaatgtaaatgtaaatatgagccgcagatgcgaggaatactacaaagagcaactcaatgtagcagaattcacgctccatgatccgctggtgatcaacctggatactgatgtggcagaagtgtcggatcagaccttttattttgatctggatgccgatggcaaggaagaagagatctccgtgctgaatggcagcggctatctggcactggacaagaacggtgacggcactatcaacgacggcagtgagctgttcggcacccggaatggggatggctttgcagatctggcgcagtatgatgaggatggcaacggctggatcgatgagaacgattccatctggtcaaaattaaaaatctggtgcaaggatgaaaacggcaacgacgtactgtacaaactttctgacaagggtgtcggtgctatctgtctgcaaaacgtttctacggattttaccctgcagggagaccgtaaggctcaggacggcactaccaatgccaatgcgaccaatgctgtggtccgcaagaccggtattttcttatacgaaaacggaaatgtgggtacggtacagcacgtggatatggctgcctatgccgcacaggcatagaataaatataactattcagttacttcgccctataaatagcatcaaatgttcttacgaatgcaaacattcgacgctatttacatggctctgaatagttccaaataaatgcaaatttcatatcgaagacattctgaataaaacccatgaatcgggcaagactataggataaaccagggaaagtggttgaaacgattgtatagcaggcagttgactcagggaacaggaaggatgcggataggatatgagaagaaataaaaagagcggtattaacaaagaacgtattataatgttagcctcttcagcctttgtactggcagcattgaccatgacaggggtctatatgaaggggcagaatgtggagtccagggatgatggttataccttggacttcactgcgcttcccaacaatgcggatgacaaattacaggagatcacggagaataacgacgaacatcttctgaaggaggacgagaacatccccggactgacggcaaataatacagcgggaaatgagatcgcgggagctcctgtcaccgaggatgatctggattatatgccccaggaggtaggctccggcaacgtagagattccggggctgacggatcaggagacgctgctggaggccgcacagaaagagcagcagaattccgatgccgaccgacaaaaggaagagaccgggggaaagcagacagcaggcggggatgtggtcgttgagaagacactgcactttgcagaaagcgacggattacagcaaccggtgcagagtgatattctgatgcattactctatggacaagagcacttattttgctacactggatcagtataaatacaatcccgccaccattttttccgcggaagaaggtacggcagtgaccgcctgtgcacagggaaaagtgacttcaatcttcgaaaatgaggagatcggcaaggcggtgaccctggatctgggtgacggctatgaggccacttatggacagctgacggagatcacagtgaaagagaattcctatgtgaatcccggcgacgccatcggcagtgtggcagcgcccacgaaatactacagcaccgaaggaagcaacgtatactttgctctgacccacaacggggaaccggtgaacggggaggcattgttccgctga

SEQ ID NO: 537 - DNA, 25429 bp, unidentified
  source 1..25429: mol_type = unassigned DNA
ccattttcggaatcagggaaagccatcaggtagcggtgcttgagatgggcatatctgattttggcgagatgcacagactttctaccatgtcttgcccggatgtcatggtcatcaccaacatcggctactgccatctggagtttttgggcgacagggatggtgtgcttaaagcaaagacagagtgctttgagcatatgatgccggatgcggtcgcagtgctgaatgcagatgacgacaagctggccacagtgcagacggtaaatggaaagcctgccatatactatggcaaggaatcggctttaggcgttcataaatcagtatataccacaaatattgaaaacctgggcttcgacggcatgaaggctcattttgtcacagaaaagggtgagttcgatgcacaaatccacatcccgggtgagcacaatgtatacaatgccatggcggcagcggctgtcggattgcagcttggtctcacaatagctgagataaaatcaggaatcgagaaagcagagacaatcgcaggccgtaccaattttatcaaaacgcacggcatgacagtgatagatgactgctacaatgcaaaccctgtatctatgaaatcctctatcgaggtgctttcgcatgcaaagggcaggacaatagcagtgcttggagacatgggcgagcttggaagcgatgagaaaaagctgcaccatgaggtaggcgaagcagttggagagaatcatatccatacactttttgccgcaggagagcttgcaaaggaatatgcagccggagcagcggagaaatcatccgatgtagacatccactatttcgaggatagggagaccatgacacaggagcttctttcatatgtgaaggagggcgacaccatactggtgaaggcatcacacttcatggagtttccgaaggtggtagaggcactgagtaagtaaaattaggtaaaatcaatcgggtagaaattaattcgatatttaattattgcgaggaatggatattctccaagcctcataatattataaaagaaagagagaaaaataatggcacagaatccaatcgtaacaatcacaatggaaaacggcgatgtaatcaaggcggagctttatccggaaatcgcaccaaacacagtaaacaactttatcagcttaatcaatcacaacttctatgacggagtatgcttccaccgtgtaatcaagggcttcatgctccagggcggagatccggacggaaacggcacaggcggcccgggctatgaaatcaagggagagttcacacacaacggcttcaaaaatgacttaaagcacacagccggtgtactttcaatggcacgtaccatgatacctgactcagcaggcagccagttcttcatcatgcatcaggatgcaccacatctcgacggtgagtatgcggcattcggcaaggtaatcgatggcatggatgtggtaaacaagatcgcagaggtgcgcacagactacatggacaaaccacttgaggctcaggtcatgaagacagttacagttgagaccttcggagtggactatccggagccggagacagtttaatgataataattatcgatgaggcaagcgcaaaacttgcctctttttactatcatgacgagatgttcaagctgcagtggagaagtgtggcaggcaaggcatctatgtcagaagagctgcaagaaaaactgtatggtgcactactgggaaaattgctggatgagttgcagaagaaactgccggatgagcagcagaataatttgtgtgtgtatgaaatagaaaataattcaggatatacagaatctgcagataacaccgcgaaagctaatacgggaaatctaagaataccgaaagctcccgcagactacatctggataatatcaaaccggcagcagaagcaaatagctgactcgctcggcatagcatcagtaggagaaccgcagtgtggcacgcgctatgcagtggaaagccttgcagagcttgatattgagtatctggagcgggtgcgcagacggtataatcacatcccgtgggacatcggcgagacagacaggtgtctgatacgtgagctgaccctgtcagaccttcctgcgctctatgagctctatgacaagcccggcatgacagactttgtggagccgctttacgactatgagacagagcttgaataccagaaagcatatatagagaacatgtatggcttttacgagtatggcatgtggcttgtattttccagagaaacagggaagctgataggacgggcagggcttgagcatgatgaactgggctatatgatagcgccggaattatggaaccaaggctatgccacggaggtgtgccgcttcataatagactatgcgcgcgaaaacacagactttgaagagctttactgccggatagatgagagaaatgaggcatcggtgcgccttgccaaaaagcttggatttacaaatagcgggcatatggatgataatataaacgcttctatatatagaaaaaatataaaaaacataaaaaacaatgaaaaacattgaaaaatatgcgattaggcaataaaatataaacatagttttatgatttggaggacgaaaaaatgaagaaatatgcatacggagtagatataggtggaacaactgtaaagataggctttttcgagaccacaggaaagcttgtcgatacatgggagattcctacacgcacagagaattccggcgagctcattctgcctgatatcgcagcatccatcaaggagaataacgagaagcacggcatcgagatgggtgacatcgagggtgtaggcatgggagtgccgggacctataaaggatgacggaacagtattgaagtgtgtcaacctcggctggggcgtgttcaacgtggcacagtcactctcagtactgtgcggcggcatcaaggtaaaggccggaaacgatgccaacgtagctgcgctcggtgagatgtggcagggcggtggaaagggccatcaggatgtagtcatgatcacactcggcacaggcgtaggcggaggaatcatccgcgagggcagaatcgtagccggaataaacggagcaggcggagagataggacatatgcctatggtagatgatgagtcagagtgctgtggctgcggcaagaagggctgcttagagcagtatgcatcagcaaacggactcgtaagagtggcagagagatacattgcagcacacagggatgtggcaacaaagcttgatttaaatgcaggcttcacagcaaaggatgtatgcgatgcggcaaaggctggcgatgcagcaggcattgcagcagtagagcagtctatgaagcttctcggcaaggcaatggcagcagtagcatgcgttatggaccctgaggtgtttgttgtaggcggaggcctttcaaaggcaggcagcatcatcatcgatacagcagcaaagtactataaagagtatgctttccatgcaagccgtgagacagaaatcaagcttgccacactcggcaactcagccggcatgtatggcggagtaaagatggttatcggctaacaacataagattgcaatttttaaagaaataaaatataatggctactaaagatacactacaatcgaggtgagactattggcagattactcaacagaagaattagaaaaaatagcggacaaatttcgctcagataccagcggtataaggggaacaaaggattttacgagcccagaggagctttacgatgagctgaaaaaggaaatcaaaaagtaccatccgtcggatgatacgagccttgtggacaaagcctacagggtagcttatgatgctcataagggtcaggcgcgtaagtcaggagagccttatatcatacatccgctttgtgttgccataatactcgccgagctcgagctggataaggaaaccattgcagcaggactgctccatgatgtgctggaggacaccatcatgaccatggatgagatgcgtgcagagtttggagacgatgtcgcacatctggtggatggtgtcacgaagttgaagcacctgcacctgacagacagcaccaaggatccgaaggacaagaatgcggacaggcttgagatgcaggctgagaatctgcgtaagatgtttctcgccatggcaaaggatatcagggtcatcctcataaagctggcagacagactgcacaatatgcgtacactcaagtaccagtccaaggaggcacagcagcgtatcgccagagagacacaggatatctactgccctatcgcacagcgacttggtatcagcaagataaagatagagctcgaggacctttgtatgaagtacctctatccggatgcctactacgatctggtagagaaggtagccctcagaaagacagagcgcgatacctacatccagggtctggtaaacgatgtcaagaagtatgtttcagatgccggtatcaaggcagagatatacggcagggcaaagcatttcttcagtatatataagaagatggtcaatcaggacaagactatagaccagatatatgacctctttgccatcaggattctggtggataccataccggactgttacgcagtgcttggtatcatacatgagaagtataagcctataccgggccgtttcaaggactatattgccatgccgaagcagaacatgtaccagtcgcttcacacgacactcataggtccgagcggacagccgtttgagatacagatacgtacttatgagatgcatcgtacagctgagtacggtatcgcggcacattggaagtacaaggaaacaaacaacggcaatgccactaccaccactgtcaccgaggaggagaagctcagctggctgcgccagatactcgagtggcagcaggacatgtcggataataaggagtttatgactttattaaagagtgatttaaatttattctccgacaatgtatttgcattcacaccgtccggcgatgtaaagaacctgccaaagggctccacacctatagactttgcctacagcatacactctgcggtcggcaacaagatggtcggtgccaaggtaaacggcaagctggtgccgatagactatgtcatcaaaaacggtgaccagatagagataatcacctcacagaactccaagggaccaagccgtgactggctcaaggtcgtaaagagcacacaggccaagaacaagatcaaccagtggttcagaagtgagctcaaggaggagaatatacagcacggcaaggatctgatagcagcctatgccaaggcaaagggcatcaactttgctgagataaacaagcctgagtatcaggagaaaatacgccgcaaatacggcttccacgactggaactcatgccttgcaaccgtcggtcacggcggactcaaggagagccagatagtcaacaggatgtacgatgagtacaagaaggatcatgtggtgccggtgacagatgcagatgtgcttggcagcatcgcagaaaagcagcaggcggcagcaggcacacagcccgagcacaagtcaaagagcggtattgtggtacacggactctatgacgtggctgtgcacttctcgaagtgctgcaatcctgttccgggagatgaaatcgtgggctttgttacaagaggccgaggcatctccatccacaggacagactgcgtgaatatcatcaatctgtccaagatagaaaaggacaggctcatagaagcagagtggcaggatacagccctcatggacaacggtgctgagtatcaggcagacctaaagatattctgtcatgacaggccgggactgctcgtagatatcacaaagatatttaccgagaaggaaatcaatatcagtggtatccagtccaagaccagcaagcagggcatcgctacaatcgaggtatttttcaatatcaaaggcagggaccagataaaggttctagtggagaagctcagacagatagaaagtgtaatagacgtagagaggaccaccggctaaatcccggtggttcttgcgtgaagcataacatataacagacaaggagtacactcatatggtaaatatgaagatagaccacttcgtagtgggaccggtgcagaccaactgctactttgtcaccaatataaagacaaaggaaatgataataatagacccgggcgcgtgtgctaaacagctcgccaaaaaggtggacgagtcaggcgcaaagccagtagcaatactgctcacacacggacactttgaccatgccacggatgcaaagccgctcgcagaccgctacggcatcaagatatatatccatgaggcagacaaagccacactcgatgacccgcagcttaatgtcagctacatgatgggccagtcaaaaaccttttatgcagatgtatttttgaaggataagcaggagcttgacatcgcaggctttcacatagtagtgcttcacacaccgggacatacaccgggcggctgctgctattatttcccgtatgaggacgtgatctttacaggagactcactgttttgcggctcaatcggacgtacggatttcaagggtggcagcatgtcagacctcgtgcgcacagtgaaggaaaaaatcatgacactgcctgagcatacagaggtgtacccgggccacaacgacacaacaaccatagaaaacgagaggatgtataacccttacttatgatagtagtagtatttaataaaccggattttgaatatgatgtgcactcactgctcaaggagttcttcccacaggaggatgtgcagatgtactatagctgctcacctgatgaggtagaggggaaaaacttagcctgcacgcaccacgagatgacagatgatggcgtaaaggaatttgcggatgcctcacaggtatttaagatagactatgtgggcgatcagattacggtggagtggatgataaatagggtcaatgataagggcgatagagaaaatccggataaggaaattttaaataattccatgacaggtgatatgcagcaagccgacgaaagtgatattaaaacagccggaaaaagtatctgcacaaaaatatccgtagacagcacagaccgcaaggagactaaaaaccgcctcaagctcgccctgtattccatgatagaaaagggcacaggaaagagccttccgtggggcacactctcaggcatcagaccgaccaagatagccatgaagtgcatagaggacggaatgaacgataaggaaacctacgactatctgaaggaaacctacctcgcaagcgatgagaaaatcgacctctcaataggcatagcaaagcgtgagaaggcactgctcgacaaggtggactatgacaatggctacagcctgtacataggcataccattctgcccgagcacctgtgcatactgctcgtttacctcatatccgctcggtgtgtggaaaaaccgcgtggacgattacctcgacgcactcgagaaggagatagactacacggcacagaaattctaccacaagaagctaaattccatatatataggaggcggcacaccgaccacactaagccctgcgcagcttgacaggcttatcagaaaaatcaaatgcagctttgatttaaagaactgcctggaatttactgtggaggcgggcagaccggactccatcacgagagaaaagctcctggcactgaagaaaaacggcatcagccgtatatcggtaaatccacagactatgaagcagcagacacttgatataataggaagacaccacacggtagacgatacgatacaaagcttcaagcttgcgcgcaagctgggctttgacaacataaacatggaccttattatggggcttccggaggagacacttgatgatgtaaggcacacaatggagctcgtgaaggagctggcacctgacaacgtcaccatccactcactcgcagtaaagcgagctgcaagactcaccatcttcaaggaccgctacagtgatatgcagatggtcaacactcaggagcatatggatctctgcgcagcctactgtaagcagatggggcttgagccatactacctctacaggcagaagggcatggcaggcaatatggagaatgtgggctatgcggcaaagggcaaggccggcgtatacaacatactgatcatggaggaaaagcagaccatcgtggcctgcggagccggagcaagcaccaagcgtgtctggcccgtaccgaatccggatggcacacaccgcatcgacagatgcgagaatgtcaaggatgtagggcagtatatcgcaagaattgatgagatgatagagaggaagcagagtctattcgaggaaaaataagcagtatgacatataataatgtataattatgggtgctgtaatactatagcggttagcgaatgtgtcaaaaattataaagaaaacctaatattcattgacaaagaattaaaaatgggtaataatatattattgaataccctgattagatacagaaaaagatataaataacctaataaaacatacgtaaaacaaaacaggttaaaataattcgggggggggtacaaaggtacctcccctagaacaggtataaaggaaaataaaagataccacaaggagaatttggaaagaatgtacagaaagaaaggcagaggatggacaaagcatatagattttatgcttatagatatcgcatgcattgttatagcattttttatttcatatgtgatacgcttcggctttaataacccatatgtggacaaggactaccgtatactgggtgtagcatttcttctgatagatttctttgtggagataatggcagattcattcaagaacgtcctaaaacgcggatatctggatgaattcatatcgacctgcaagcacgcagtgcttgtatttctggtgacagcgctatttctgttcaccacacagatggctgatatatactcgcgattatcattttatatcatgtttccaatctatgtgacaataacatatgtagcaagactagcgctcaagagcttccttaagaaaaagggctttggagcatcaagaaaatcgctgtttgtcatagcacctgatgccatgcttcgtgatacactgtgcacagtggagaaaagctgtataggctatacaaagatagtagcagcttcactggatacagacatgaagggtatgactatatgtggcatacctatagttgcaaaccacgatggtatagtggactatgcgtgtgatgagtgggtggatgaggtgctcatcccgccttgtagcgaggatgaatatccagagcggatggcagatatattccttgagatgggaatagcggtacatacaggaataaccaaaaatggcacagcccagggaggctacaagcagatagaaaagataggcgactataccgtagtcacatcaagcgtgaactatgccaacaccagcgcgcttctggtaaagagaggcatggatatagtcggaggattggtgggctgcctgttcacacttatcataatgatatttgtgggtcctatgatatacatagcatcgcctggacctatatttttcgcgcaggagagagtcggcagaaacggaagaaaattcaagatgtacaaattccgcagcatgtatatggatgccgaggagcgaaagaaggagcttgcggcacagaataaagtgggtgacggaatgatgttcaagatggacttcgacccgagaatcataggcaataaggtgctgccaaacggaaagaagaaaaccggaattgggcagtttatcaggaaaacaagcctggatgaattcccacaattcttcaatatactagtgggagatatgagccttgtgggcacaagaccaccgacactcgatgagtgggagaagtatgaaccacatcacagagccagaatgtcattcagaccgggactgaccggactgtggcaggtgagtggcagaagcaatatcacggactttgaggaagttgtgaagcttgatacccagtatattggggagtggagtgttaagggggatattaaaattatttggcagactgctgtgggagtattaagaaatgatggagcaatgtaaggaaaagcttagtattgcaatgtttggacaaaaaaggattccttcaagagaaggtggagttgagatagttgttgaggaactttgcacaaggatggttgcccaagggcataatgtgacctgctacaacagaggtggtcatcatgtgagtggttcggagtatgattcaaaacgacttaaagaatataaaggaataaagcttaagacagttccaacaatagaaaagaaaggtcttgcggctgtttcatcttcattttttgcagcattatgctgtgcttttggcaaatatgatgtggtacatattcatgctgagggacctgcatttttctgttggttaccaaagctctttcacaagcgtgtgatagtcacagttcacggcatcgactggcaacgcgaaaaatggaaatctggcttcggctcaaaattcatacataaaggcgaaaagaatgccgtaaagtatgctgatgaaattattgtacttagtaaaggtgttcaggattattttgaaaaaatatatggcagaaaaactgtgtttattccaaatggcgtaagtaatcatatagaaagaaaaccacagattattaaaaataaaattggattagataaagatgaatatattttgttccttggacgattagttccggaaaaaggaatcaaatatttaatagaagcatttaaacaggttgatacagaaaaaaaattggttattgctggtggcagttcggatacaagtgaatttgaaaatgaaatgaaagaaattgctaaagaagataaacgaattttatttacaggatttgttcaagggcaagaattagaggagttgtatagcaatgcatatgtgtatgcactcccatctgacttagagggaatgccgttaagcctgttagaagcaatgagctacggcaactgctgtctggtttctgatattccggagtgtgcagaggttgtggaagataaagctctgattttcaaaaaggctgatgtaaaggatctacaatcgaagttgcaggacgcctgtgaccattctgaaaaggtggatgcacacaaaaagcaggcggctgattttatttgtagtaaatataattgggatgagattgtgcaagcaacattgaaattatataggagaaagaaataaatgagaattttaatgataaataaatttctatatcctaatggtggttcagaaacttatatatttaaattgggcgaggcgctggagcagcatggacatgaagttcagtacttcggaatggagcacgaaggccgctgtgttggcaaccggatcaatgcttatacgtccgatatggattttcacggtgggagcaagctgtcgaagctgacctacccaatcaagacgatttacagcaaggaagcaagagtacagctgagaaaagttctggacgacttcaagcccgatgtatgtcacctgaacaactttaactaccagctgacaccttccatcattttggaaatcgtcaagtggcgtaaggagactgtaagggattgtaagatcgttttcactgcacatgactaccagctggtttgtcctaaccacatgctgaacaatccgaacatccaccaaaactgtgagaagtgcctcggcggccatttcgtgaactgcatgaaaggcaagtgcatccacggctccacggcgaagtctgccatcggcatgatggaggccgagttctggaagtggaaagggacttacaagtacattgataccatgatctgctgctctgagttcatgaagagcaagatggacagcaatccgctgtttgcgacgaagaccgtggcaatgcataatttcatcgataaggtggagtggaaagagacagaaaagaaggattacgtcctctacttcggccgcttctctgaggagaagggcatcgacacactcatcaaggtctgtaaggagctgccggatgtgcagtttatcttcgctggcactgggccgctggaagagagtatcaagggtgtaagcaacatcaagaatgttggcttccagaaaggtgaggcactggaaaagctgatccgggaagcaaggttctccatctatccgtctgagtggtatgagaactgcccgttctctgtgatggaatcccagatgtacggcacaccggtgctgggtgctgatatcggtggcatcccggaattgattcaggtcggtaagactggtgagctatttaagagcggagatggcaacgagttgaagagcaagatccggaagctctgggatgataaggaactgtgcgatgagtataaagaaaactgcaagggcatcagctttgataccattgatgagtattacgagaaaattatgagagtttatcagtaatttggaggatgggtgtgagtacaaaagcggatagatatgagggaatcaatgggttaaaagcgtatgccattatcggcattgctctgatgcacgtcctttcaaacggaaaatatgaattgggaggatttgtatttgagaaacttatccccaatttcacaaacctcgtttttcttttcatgatggtcagcggttttggtatgtgctgtggctactaccagaaaatcatagaccgtaagatcagcgtggaggagttttacagcaaaagatacatcaagatttggtcgtacttcgcattgctctgcgcgctggattttgtgatttcgccgagcaagaattcgctgtatgaagtttttgcaaacttgaccttatgccagggattgttgccaaatgccaatatttcggttatcggtgtgagctggacgctggctgtcatttttgtgttttatatgctgtttccgtttttctgcttcctgattggaaataagaagagggcatggggagtggcagccgcggcattagtgttcaactacctgtgtggaagttacttcaatgccggtagaaccaatatcgtttatgatgcaatttattttattgcaggaggtctaatcttcctttaccggaaagagcttgctgaatttgcagtaaaatccaaagttatcgctggagcaattctgctgattgccacagttgcttattttgcagtaggtggcaatacgcttacaatgttgttcttctgtgtagcggctttggtctataccctcgggtgtaatcgggaggggggctggtcaatccagtcgccaaattcctcggtggaatctgcttcgagatttacctgtgccacatggtaatttatcgtgtgcttgaaaaatttcaccttgtccatctgtttggtaatggcttacttgcatatatcttcacagcggtcgcagttatttgcggcgcggttgtgttctcggtatgtgccaagtggttcttaaataaaattgaaactttgattgttaataggagttaatcatgtctgaagaaaagaaattgaatggtacggttatcgtcacttaccgttgcaacgctcgttgctccatgtgcaaccgttataaagcaccttccaaaccggaagaagaaattagtattgaaactatcaaaaaactgccgaagatgtacttcacgaacatcaccggcggagaaccgtttatccgtactgacctgaaggatatcgtgcgtgaactgtataagaagtctgatcgtatcgttatttccaccaacggtttcttcacagatcgtatcgttgacctgtgtaaagagttcccgcagatcggtatccgtatttctatcgagggcctggagcagaccaataatgagattcgtggtcttcaagacggatatgcaaaggggtatggcacactaaagattcttcgtgaaatgggcatgaaggacgttggcttcggcatgaccgttcaggacaaaaacgctcctgacctggttccgctctacaagatctccgatgagatgggcatggagttcgcaactgcctctttgcacaacagcttctacttcgttgaggctaagaacatcatccatgatcgtccgatggttgctaagaacttcgagaatctggtcaatgaactgctccgcagcaacagcccgaagaagtggtttcgtgcatactttaatcatggtctgatcaactacatctacggccagaagcgtctgctgccttgcgatatgagttttgacactttcttcatcgatccgtatggcgatgttatgccttgcaatggaaccaaggacaaggaagttatgggcaacctgaacaatcagacttgggatgaactgtggaacagcccgaaggcagagaaggttcgtgcaaaggttcgttgctgcgaccgtgactgctggatgattggcagtgtaagtcctgctatgcacaagtacatctggaagcctgcgacttgggttctggttcacaaatttaaggctctgttcaccaaacatccgtacagtatgtatgagctgaagatttgccgtgactaccgtgatgggaaagtcaccaaagaggatctggataagtgcagcacctgcgatatgaactgtgtgatcaacaatggtctgagtgaagcaagcaaagagcagctgaagcataagaccggtgaggaaattgtggatgcggatattgctcagcaaatgaaagggtaaatcagatgagaattacagtgctaactcctacttataatcggggagggagtatacaaaaattatatacctctctggataatcagtccataaaagattttgaatggctaattgtagatgatggcagcttagatgatacggcacaggttgtaaggaaagttcaaaaatcagctgattttagaatccgctatatctataaggaaaacggcgggaagcatacggcactaaatgaaggcataaaaaatatagagtcagacttgacttttattgttgattcggacgactggttaaagccaaatgcgattgaaactgtgctgcgatattatggaaagttttgggatagaaacggattgtgtggatactcatttctcagagtatttccagatggaaagatcaacggtaaagagtttgaacctaatgaatgggttgcttcgtacatagaagcaagaattaattcggatgacacgatggctgataaagccgaggtattttacacccattgcctaaaggaatttccgtttcctgagtattcaggtgaaaaattccttggtgaggacattgtttggattcgaatggcacgtaagtacaatatgattcacattaacgaggcgatatatgtcggcgattatcagtcagacggacttacgaaaaatagaagagcaaataacataaaatctcctgttggctgtatgcacagagcggaagaatttatgaagaaagatataaaccctaaatataggatcaaaggcggacttcaatacattatatatggcttgtgcgctgattatacaattacggaacttcttagaaacagcaaaaataagttgttgacttttgtttgtattgtaccaggtaaagtattaaaagcaagatggagtcgaaagctatagaatcaagaaatcttattatagatagaggagagtaaacttataatgctacgaataaatagacgaaaaatgatagggttattacttctttccgtgagtgccattgtgtatgtttttgcattagcttcagggcaagacagtatatttgaatacacactgttacttgcgtgtttaacttttgccttgctattgaacaatgattttgagttgatttctccagcagtgctttttacagcatattttctttactccatagccttaggaccaattgggttgatgaatatgggaagattctatagctatgggtatacaaaaataattttgggcggtttgctggcgtttgcgattggaaatggcatttgtttaatcgcgaaaaaaagaccagttcatgaaaaggaggataaacctaaaattcgattttcgttttcgagaattaaaacactttatttccttttggctgtttcatggtctgcagcgctatattattttataaaaaacagatcgtatttgcttggcgatgtagaaaatggaagagtggcagccatatcgggtagcggcgctttactatacacggctcaggtatcaattttactggtctgtatgctttttgacatatacatagaaacaagaaaagatctacggccactaataagcaaatttactatgatttttgtgactgtagtatcttctgccactttgattgtgtctggctttcgtgcacctgttggcacactattcatttgtatgattgtgatgtatgctggaaaaaagaaaatgcctatgggtagaatcgtcttttatggactgttgtgcattataggtgtatcggtacttggggcaattcgcacaacgatgtctggaggtgttagtagcacattgacatccttttttacttcgctctatgtggggaatattaacataaattatatgtataatacatttcccggaaaagtggattttcaatatggatatacctaccttataaactttctgatgttgttgcctgggccggatttggattttactttatggcttaaagaacaggtggggattactttttccgggggtggcttgacaccaactattattggtgagttttatatcaattttggtgaggcatttatatttattggattgttcattttaggtgtgtttagcgtttatctgaataggtacttcaagagacataaggagagttttcttgctgctttttatgtctggcagtttgcacattgtgtttccggaggtatagctaacgtcagtgtgacagtgctgttatatacaatagtgtataaatgcttgataatgcttccgtatagaagcacgaaaagttttaatagaaggagactggcagatggacagtattaagaaagaggaaatgggaaagtccgctgttaaggctgggctttggtacacgataggaaatatagctttaaagggatgcgcgtttctgacacttccggtttttacgcggcttttatctacaagtgattttggtgtatataatgcctacattgcgtacgagcagatttttactgcaatcttaggagtggggttttacggaacaataaaaaacgcaaaattggattttaaggagaactttaaaaaatatctatcctctattgtattcctgagtgttttgattttcattttcattactgctgctgctaatgttgcatatccaatatattgtaatgaacttgatttttcacggtttgtgacaaactgcttgctgtttcagagttttggcgcgtatatgctttatctatatggcgttaaacttaatgctgaatttcgttaccgatcatttttgatcatgtcgagcatcaacgtcctcggcaacacagttttatcaataattcttattttgttcgttttcccgaatgaaagatatcttggaagaatacttggctcggcgattccactcattggcatcggagtagcattgtgcttcttaatatggagaaacggaagaacactttacaataaagcatattggaaatatggactggcgataggacttcctcttcttccgcacgttatctcgcagtcgttactttcgcaagttgaccgaattatgataaaagatatggtgggcagctcggaagcgggaatatatagctatatttacacaatttgtacaattctatatatcgtaggaaattctatggagaacgcatggtcaccatgggtattttacacattagatagcggagataaaaagcgtattgaacgagctggaaaagattatgttatggtgtttgcattgttaacgatcggcttcttttgtgtgatgccagaagtgacaaagataatggcgggaagtaattattggggcggcataagtttgattatcccgttgacctttggtaactttttcgtttttatgtatggcttgcccgtaaatatagagtattaccataagaaaacagggtttatttcacttggcacgatacttgctgctggcttaaatgctgtgcttaactattttggaattatcctgtttggatatcaggtcgcagcatacacaacattcctttcttatgggatgttattcctattccattggtttattgcaaacaaatacggggtaagcgagctgtacagtttcaagtttttattaaatcgcactgcacttgtacttattttgggatttgtggttcttctgacggatgggtttatggtatttaattttatattacgatatatgttgataattctgattttaatttggttttataaacacagacaaatgctggttggagcgttgaaaaggagatgatgttttggattgcgtgatagcttgcgaatatagtgatataagtaacggagaccagctatgaaaagtcaaccataaattagcaaaaaaattctttttcatatcggtggtaaaaaagggtaactttaatagagctcccttagggtgctttttcaaaatctatcgatattggtatacagacctcttattcgaggttaaattctacttcgtcagtgagcatcttccagatgactctgacaagcttgccggcacagtgcccaagtgcattgtagtgagaccggccttcagccctcttggcatcataataagccttgaaggtcgcgttgtttctgacaacgttccaagctgcatttacaagggcatatcgtaaaacacgagagccacgtttggacatccttgttgtcttagcctgaaagttaccagactgataaacagaaggatccagacctgcaaaagcaagcagcttgtttggattggagaaacggtgaatatcacctatttcaccaagaatcattccaccattgatataaccgataccaggaatggtcatgatgacagaatcgttgaatttcatgatatccgtcatctcagcttcaatcttttctaattggctatccagtaactcgatttgttgaatggtttgagttatctgaatagatatagcgctgtcgttggcaccgacagacttctgtgcgagaactcttaattctttggcctgctctttagtaaagtgtccgtgcgagttcactttgagcagatttgccagatgagtcatatgcatggaagcaatctcttttggagaaggtgcttcttttaaaagagcatagacagcattctgatgcagaccggatttgaaaaagtattgaatctccgggaatacctgatcaacataggttgtcagttggattttcaatcgggtgcgttgcttaatggttttctgccgaaagcgccccaaggccttaagatccatcatatcgagatcaaagaaggtaataaatcttaggtcatcctgcatcataagagttttagcaataacaaatgtgtcgaccttatctgtctttgttttacgaacattgttcttacgcatttgacaggttttgatggggttcaacacacacacttggtagaactcagcaacaaggtatcgaacaaggttgtcaccgtagtgtgccgtcgactcaagaccgatgatgatgctgttcttatcgaatgattcgagcttagagaccagcagttggaagccatcagcgtcgtttgtgaatttgaacggctcaatgagtatttcaccgtccgaagaaatcgcagcggcgaaatggttgagtttggcaatatcaatgcctacaaaaattttcatgaggttgtacctccctttcataaagtctgataccatgatgtccaccatcgattatcattgtagacttgatagaaataagtactctgagtgaaaaacactccggcaacatccagctgataaacaattcagataaaggtagcggcaatacactccagttgagtagtcaagctacagggaaaaatcaaaagtccatagtatctgaattgtattgaaccacgatattaaaagaaagggaacgtgtgataattaacttcctaattatcatacaaggatttatgattaaagaaaagttattgaagctgtgcttggcacctcttcgcttattgccaataaaagaaaataggattgtttttatatgcaatagagggggtggtttttgttgcaaccccaaatatatggcgcagtacatacatgaaaactatggcagtcaatatgaaattatatttttttacaatgatgaatctgtggtaaaaagaaacaactgtgattggataacatggaaaaaattcgatggattcggctatattgatgctatggctacggctaaatatattgtatcaaatataacaattcctagatttatgccttataaacggcatcaagtgaagatgtgtacgtggcatggttccgcatttaagggaactggtgacatggagtataatttcgataagtatgatgtctttttagctgaaaatgagctgacatataaagttatcagagagatatggatgtatcggggagaaatattgcgaactggtatgccccggaatgattgcttgtttaattttactaaaaaacagataaagaatataaaagaaaaaataggagttcctgaagaacatttgttgttatatgctcccacaattagggataaaggagacgctgattgtttttcggttgatttcttgaaattaaaggcacaccttgaagacagatttggcggttcttggcaagttgcatttagatatcatcctctgcaaaagaaaagaaacttaccgagtggatgcattgatctaagtacgtatgaagatatgcaagagttactgatgtgcaccgatatacttgtaacagattattcttcatgtatgtgggatttttcattgatgggaaaaccatgctttgtctatgcatccgatatagatagatatatcaatgatgaacgtggtgccttcttgtatcctattgacatgttgccttttccgcttgcgagaaataatgatgagttagttgaacgtatcgttcaattcaatcgcaaagaatatgaagaacggcttgagcagttctttaaagaatggggtagatacaattatgatgggacagcaacggaaaaagctgttgataggcttttaaacggataatttaaagcgtgtataagttctaggtttgtgattgctaagcaagtagactattctgaaccagacagttcttaaacaacttattaacacagattatgcaagatctgtagagaatatatttacatagttcatggagtcaattcatgaggacttatatttgaggatatgtcctgtagacttatccctatagagcttacttaaaattcaatataaggagtagaaaaaataatgaaaaacatagttttaataatcgctggcggtgttggtgctcgtatgggccaagatataccgaaacagtttatcaatgtgtatgataagccagttattgtttacacattagaggcttttcaaaagcatccaagcattgatgcgattgaagttgtttgcctcgacgggtggcacgatgtcttatgggcatatgccaagcagtttggaattgccaaacttgagaacattgtttcaggtggcaagaacggtcaggattcaatccgaaacggactttatgacattgcttcaagacataatggttctgatgatatcgtattggttcatgatgcgattcgtcctatggtaagcaacgatattatctcggataatattcgagtttgcagacaatacggaaatgcaattactgttgttccgtgtactgcggcaatgttaaaaacctttgattctctttcaactgaagaacaggttccaagagataatcttaaaatcactcaaacaccacaggcgtttttccttcaagatattattgcagcacataaagaagctttggaaaagggaattacaaattcagttgcttcttgtacgatgtatattgaacttggcagaaaactatatatgtctgcgggttctgagaaaaacttgaagctcaccacagccgaggatattgagatttttaaggctcttctaaatgccaagaaggatgtgtggatgcactgatgggatacaatgatggattaaggcaagttgctgaaacattgccaataaaagcgggaaaaatacttgtaacaggtgctacaggacttattggatcatgttgtatagatgctcttttgtatgccaatgaatattgcggttgtagatttgagattttcgctttgggacgttcacaagaaaaaatctctaagcgttttaaaggcaaagtaacgcctgttgtacaggatgttgttatgcctctgacgctggatgtcgtatttgattatattattcatgcggcaagcaatgccgaccctaagatgtatgctcttcagcctgcagagacaattcttacaaatgtcattggaacaaaaaatgtgcttgaatactgtaagaaaaacatagatacacggttgctgttaacttcaactttcgaggtctatgggaaaatagatggcattgatgtgtatagcgaaaatatggtcggattagtagactttcatatgctcagaaacggctatacagaaagtaagcggtgcgccgagatgcttgtcaacagctatattgatgaatatggaattaacgctgtgatttgtagattggctagtatatatggacctaccatgttgctaaacgatagtaaagcacatgctcaatttatcagaaatgcgttgcacggtgagaatattgccttgaagagcaagggggaacaaagaagaacatattgttatgttctcgatgctgtttctgctttgtttatggtgctttccaaaggagagattggagaagcgtataatattgcaaatgaaaattcagttgcttcaattgctgatgttgcttcatgttgtgcaaagatagcgggaacaaaggtgttttttggtattccggatactgtcgaatcaaaaggattttctaaaccgcaaaactgtatacttgataataaaaagctaaagtctttggggtgggaaggaagatattctctggaagagggctttacagaaaccatagatgagttgaggaaaaacgaacggaggggacaaaaaagtttatgcttgaacaattaaaacaagatgtttgctacgccaacctcgatttggttgccagaggtgtagtcatttatacatggggcaacgtcagcggaatctctgacgacagaaagtacatggtcatcaagccatctggcgttgactacgatggaatgtcagctgaggacatggtggttgtggatattgagagtggtgaaactgtggaaggtaaatggaagccatcatctgataccaagactcatcttgcactgtataagaagtattcacagattaaaggcatagtccatacacattctaccaatgccgtggcgtttgcacaggctggcatgaaaattccagcgcttggtacaactcatgcggattatttctacggagatattccatgcacgagagagctgagcaaagaagaagtaatggaagcctacgaactgaatacaggcaaggtcattatcgagacaatagagaagatgaactatgatccgatggctataccgggaattgtggtaaagaatcacggcccgttcgcttggggctcaagccctgccaatgctgtatacaatgcggttgttatggaaaatgtagcggagatggatatcaaaacgctgttactcaattcacaggcagagatgaagcaatatgtgttggacaagcattatatgagaaaacacggcccgaatgcctattatgggcagaagtgatatccatagaaagaaagaggtctaaaacatgcgagaatattacggatttctgattttatttaatggaaccgaatgcagtaagacagtaaacgctcaataaaaccgtggttagactttaccccttcctccgtagtaaacttttaaattgaagtgaaagctcaaaacttaagtcaattaatatgaagatatgcaagagttacggagcgtgtccagaaaaaaataatacaaaggataatttcttacagccagtaagaaattatcctttcagtatattatgctagatgagttataaattttttgctaaaataatactcaacaaaaaacaaaattgtctgttgttaataactgacaatttaccaaaacgacaaatgaggagagctatatgggaaagaaaaaactattagcactgctgatggcaactgttttagccatgcaaccgactatatctgtaacggcagaaacagggcaggttacagattctgtaggagattatgagggtgaagaaacaaaagagaaatcaaaggtaacagaacttgaaaatacggacagtgcagtacctaactccccggcagtggatgaagaaatgacaaagatgacttctgcagagaaggaagaggcggatgatggagagacggtaagtttgtcagcggttacggaatcatcaaataatcagacgacttcatatgcacatagtgaggaagctacgtcaggtgctatgacactaaaagcagaatggaatgatcctgtacttggacagccgaccacattccatgtgtctgcaacaggcggctcaggaaactataaattcagaatggatgcaccgagctattctagcccaaatcaatgggcattcgaatcagtagcggatccaagtcgcggtgaatggatgaactatactggtgagtgtatgagtacagactactcttttactatgactgcctcaggtacatataattttcgtttttacttaatggataaggcaaataatatttattatttacgtgtaaatacatatatacatttatctgatcctaattatccaagtataaattctataattcagtcagcggtagatcagtgtaaaagggaaactgatggtcctgattatcaaaataaataaaaccgatactaaaaccgataataaaaatagtaataaatcagataacggagtgatagagcttccgattataccaatagattaattaataggttaccatgtatttttacattgtggaatagagtatttattaacaatagaacatgctgggaggattatgtatgtacaaaagaataattagccttattttaacacttattatgctgattacaatagttccatcaactattgtggcagcaagtgaagttcggacaatggaaggggttgaagcttcgggcaagcaatccgaatgcaaccggcctgaggtcgataaatcggaggaaaatattatctacatggtaaatccgctgtatgaggatgttatcagcattgatgatttaaagaaaaagcttgactcctcaaacgatgtgcagctatttgcggcatccacgggacagtatttttcagattatgacagtgccgtttcatatctcagaaagcagatggttagcagagagacggaaataaccttgaatttccctgcatcctggtttgattctcacaaagatgagctatattgggatttattatatgatgcaatgaagtgcgatgaaagctctaccggacaggatggggatgcgcttatatatggatttgctggctgtcgtctttcatacagtaatgcaggatatatacaatataccatgtcatatcattctgatgcagagcaggaagcaaagctgacagcggctgt

SEQ ID NO: 538 - DNA, 24617 bp, unidentified
  source 1..24617: mol_type = unassigned DNA
tgtcagataccccatcggtgcacctgcagcataaatcaagattaagccccacaaatgattgatcaggttaaactgcgtcatcagaagataaactgcgatcattcccataaaagatggaaacattccaagtaccatcgtgattttcatcattggttttctggctgtaaatgtaaatcttgacattgtatatgcagttaaaatcacaagaaatgtccctaatatacagcttcccgctgccacaaaaagtgtattaaaaaaccatctcggatagttgtaaagtgtcgtatcagtaaaaagcttctgaaaacttgcaaaactatattcttttgggaaaaaaccgttaaatgaataaatggttcccgattttgaaaacgatgccaggatcagccagagacacgggaaaaaaaacacaaatgctacagcggtgagaatcagatatgttatgcctgtatccatcattctgccgaatttccactttttactcattgaaatgtgtcctcctctctataggatggtgattttatgtatactatcagtgaaatagctgatgtgatcaggaaaatgataagactgatcgccgccccgatgcaataataattattatcaatagaaagattatataaccagttaatcagcagatcggtatcacttgccagaaaatatccatccagatacagtcctcctctcaggaaataaaaaataccaaagttattgaaatttccgataaactgtccaagtaaaaccggcatcgtggaaaacagcataaaaggcattgtcagtttttcgaactgtttccatctgcctgccccgtcgatctttgcagcttcatataaagaaacatccctgttagaaagatttccagttgcaagtaacatgatggatggaacgctgatccagcaattcacaaaaagtccgatcagccttgcgctccatttcgcatccagatcaagaaatccaatggcacttttcccacaggctgcgataagctgattaaccggtcctccataggaaaacataaatttaaatgctaaaagtgtgataaatcctggtattgcataggcgagcaccggaaacgccctccagaatgcttttccttttacacagtctttatccagtaataatgccagaccaagtccggcaaaataattcaatgctgttgatgcagctgcccatatgacattccagcctaaaatcttaaaaaatgttggtgcaaactgagagagtgacacaagtttcttaaaatttgaaattccaacccagtcaactaattccggtggtacaatatccccgccataatttgtaaatgcgatcaggatcataaatacaatcggcaaaatgttaaatacacatacccccagtaccggcagtgccagcacaagtatgtaaaatttcttatcaaggagctgtccgatttcctcccggaaagtcaaccggtgtttcccctgttccatacgtttttgcatggaacatacatctttcagatttaaccggtacagcataataaaaacaccaagcacgatccatgcaaaaattcccatcaaaagcataacaacagaattatcaccttctattccaagccatgcatcacctttttgtgttcctaatgtaaaaaatcctacgatatcacgccatcctcttatcacaaaataaaggacgatactcacttctgagatcaaaaataagataccttttataatactcccataacatatctgccctgttcccatcagcacagctgacaattttacctgccagctgctgttatggcagtacttttccatcttttttccccgctgctgtcccataataatctccattcctgcgctgcttttgcgcatcccgagtttgtgcgcaagcacaaatcttgcgtgtgaaaaatcttattttcacactacctccatttctttatgttttccgtaaaaagttttcttttgctatttcaacgtataaacagcatcgtaaatctgccggtctacttcttctaaccctgctttcagggattccagatccggatactttttctcattttctgcacggaatgcatcttttgcaagatccgtaaagaaagtctgtcccggagtccagatctgtgaaacttctttgatagaaggcatcagtataatgtttccattttccagattctgatataaaagttctgatgtaccgccggcttctttcgcagcatcttctctggccggtgcaattcccagcatttcacttctttttaccatcatatcataaccggttgcaaaatttataaatgcaagacatgcattcggatattttgtataagcactgactgcataggcattgattcctcccatcattttgctgtctgtcagtttgggattttcctcagttaaatcgccactctcaggaagttttggaagtgttgtcataatgagattttcttttgcggtgctctctgcctcttcttcccccataccttctgacttgtattctgacaccatctcatctaaaaaagatgaataaacatccggtgtcgaaatagttgcaaaataggttccatctgcaagcttactgtaggcattcgttgtgatcgtatcatcaatgcattcttcattcattgcacttgcaagctgttctaacacccacgcacctttttctgcttctcccgccgcaaaaccgatatcagatgcatcggtattgttatttccaaaaatgtatcctccataagaaaacaaaaagccactggaaaaataaacatcataaagagatttcatgtatccatacgcagatggatccgcatcatggcgttctagggaaaatgcatacatatcattccagttctgtaccatatccggtataccgtctttatccttatcccagctgttctcccagtcatccggcagaagatctgcacggtaataaagcatcggtgcctgcacatttaccggaactccacaataataaaccgatccatctttctctatcttataggcatcccatgcagtctgcggaatctgtccataacattccattgattccaccggcagtggataaatatgttttccctgtgcatattgcatgatcacatcatttgcctgatacagcacatccggtccatatccgtaaggtccatcatttgcaagatctaagtactgatccatatttgcatctacagctgtgattccctgatctttataagcttcattaaatgcctggatcagttcagcaaaatatcctttttcgattgctgtgtcattttcaagaacctggattgttacattttgttccagttctccggtaaaaatattactcagtgctgttcccgatgcagactcactggcagaagcagccttttcttcttttaccttctcaccgcagccacataactgctgggcaagtaataatactgccattgctgctacccatacttttcgtttcatgatcatacccccatttcctcttttacaactacgaacccttttgattgtaaaaaaagcggttcattgatacagttcctctcttcttttggattctttttccattccagctcattttctgcacagatgatttttttggtgtcagattttgaaaatgtgatttttttggtttgatctgtcccatttacccacaatgtaattgatacatttttccatgttctatgaacggaaagcattccattctcctctaaaacacagatggtcccatactgaagaacctcctccttttttaatgcaagcagttcttttatcttatcataaactgccatatcccaatgtgttttctcccagtcaaaacatcgtcttgaatccggatcgtaaccaccttccatacagatttccgtaccataataaatacacggcgtaccaataaatacaatttccaaagcaagtgcagcaagtaattttctcttgtcacatccaacctcggaaaagaaacggtgcgtatcatgagaatctaaaagattaagcatcataacattaacctgttccagattacgcatcaggtttgcatttaatttttcagccatcgcttttgcatcaaatttctctcttgcaaaataatccagacaggctttcgtaaaagagtaattcataatactgtcgtactgatctccctgcagataaggatatgcatcatgccagttttctccaataatgacacagtccggattgattttttttacttcctttctgaatcttctccagaagtcatgtgaaacttcatccgaaacatccagtctccatccgtcaatccctgtctctctcatccaataagctgcaatttctatcaaaaactcctgtacctgttcgtttgccgtatttaattttggcatataattgcaggatgcaaaacattcataattccctttttccacatccactttattgccattgatcaaaaaccagtcgaaataaatggaatcctgccctttttttatcacatccataaactgttccagatacatactgcagtggttaaaaacagcatccagtacaatcctgattcctttttcatgtgctttttttaccagccgtatgacatcctcctttgttccaaactgtggatctactttccgatagtctttaatgtcatatttatgattagacacggacgaaaaaaccggtgtcagataaagtgctgttaccccaagcttttgaagataatcaagtttttctatgattccttcaatatcacctcctgcaaagctttccggtgttggtttatccccccacgccatattgatatacccggtgtctttctgcatgtttccctgataaaaacggtcaataaaaatctgataaaatacagcatcccgcatccagtccaccgtctttaatacgtcattctgattgatataaggcatttgaaaaaaattataaaatccttcctcaaaacaatagttttttgtcactccatcttcactgaaataataaatctttcccgcctcttcaatctcaaacagataggcaaaacggacatcctctaacgcaagcctgatttcgtaataactatataaataatccctgtaacacacttccatcctttttttctgtcgttttaatgtaaaatcatatttctgtgcgtagattaaatacaccttcgccccgtcatcctccttagacatcctgaggcgaagcacaagttctttctcaccaaccgcaaaacaatatcttgagtccggtatatgtaaaattgcatactgattcattttaataataaacctttccaaccattttattttatgttttttattgttgacaaatgtgacatttttctttataacaaatgaaaagagcttaagcgtttcacttactgaaaacacagaagctgccaaaagggagtctcaccaatgaaacaatcagttaccattaaagacgttgctaaggaagcaggtgtttccgttgccactgtatcttacgtgatcaataaccgtacggataaacggatcagtgaaaagaccagaaaaaaagtccttcagatcatcaatctgttaggctatacaccaaaccagtcagcaaaagctctggcgacaaaccgcaatcagctgcttgccctttacctgtccgccggagactcacttttaaagaatgcagaacagtcttattttctgcatttccttatttcatattttcataaaaagaactatgatctcgtctgcctgaacgaatcttatactgaaaaattcgatcatgcagatgcaatcatctgttatgatatttcttccgagctgtttcatcagatcggtgatagtaattttattcctctggttgcctatgattgtatgatccatgatccgctgtttttccagatcaattccaactaccggaatattctggagcaggccgatatttatttttccaaaaaaccatacacactcgtattgttagataccaaaaactgtgaaaaaaaggatttcctttccacacttcacgctgatatacgatatgtacgggattttttagaagtttccgcaataaaagaggaaaaccttgttgtagtcgaccatgtactttaccagcttttaaattcttcccacaacacactgtatgtaccgtccatccgtacagaaaaagctgatgcactgcttacctgtctggaatatgcactgcagaggattccaatccggcagcatgatattttaatctgacatcctgccatcggattttattcacatgacactgtcagaatctgtgtggacggatcataagtaaaagtataagaacctgccgtatttgcaacaagattaccgccttcttttccggtcacgcaggataagctttccgtatcatcttctgcaatgttcgtatagcggatatattctgttccaacgctctttgtgtctcctaccgtaaccatggaagtaaacataaactcatcgccctcttcaagatcaactgtcaggctgtaaatcccatctctttccacaaactctgtctcatctgtatatacatcttcccagtttgtgattttagcacctttaatgtaataatcgatctgtttttccgctccgtccgactcattttctccattgtaagtccagtcaatcgtatcatacatgttgatattgaacgcttctttattatcttcactataatctgctgcagactcttcataaatatcttcacccggatatgttgttaaggtaaaggtataatttccagacacaagacacttaatgttagctctctttgtacccgcatctccaaggcttcctgaattttgaaaataatcttttccatcttttgaaaaggcagtaaggtaaccacagcctctctggtcattccagtcagagttaattgcaaactggaattcgtcacccgcctccagatctaatgtaatggtataaacgttagcatccggatcgacctcttttgttaatgtctgtgcatcaccaataaccgctccccagtttgattccaacaacaccggacttgttccacttcccacaattgcaaacttcctcgtatcctcctgataggaaacaaatcctgcgaaaatatctgtatctgccgtaatcgctgtcgtaaaatcaaacttatggctcatctgtggtgttgcaaaccagcctgcaaacgtgtaaccttctttttccggaacatattcctctgcacatgctccatcttccacctcttttgtctctaataccgtctttccatcggcatcataaaatgtcactacatgcgctgtctgctctgcttcaggcttctgctctgtcataactgtctggctgtcctgtgccacagtatctttttcccctccttttgactgacatccggtcagcccggaaactcccattgttgtcactaacgctgctgccataaaatacatgaatccttttcttttcatccttctccatttcctttctgatttatttctgcaattattccccagctatttcttttttgcttaagcgtttaaccaacatagtaaaaaaaagcgtatcctgtgcccattcttcaaacttagctgttttcccatgttcatcaggaacgtactttttcttttattataatataacgcaatttcccgggtttgcgcttgcttaaacgcttaacttaattttaaaataacacttcacttaaaacatgtcaagcatttgtctctaaaaaatagcacaaaaagcagctgcaaaatctatcacatttttgcagctgcttttcgtatttgtttaactgtaagattctggtgttaaaaggtggttcataacttagcggatgtcaaattgcacgaagtttggactcgttttgtgactttgggagaaaattagaaaatcttagtatgcctgtcaattcacagtgatgttctgccatggatggcagaacaaggcttcacgagccatggatgtcatcgtgccataactggcgcgtgttgaacgccgttcacgtcactctgggaaaacttgattcaggcatacttagtttttcttattttcggacgacggaacaaaacctgctccgccatctcctttaagatctgtgctgatttctgaagctgtttctgttcatcctcatctaaagaaatcggaacctgtctctcaattccgttttttccaacgatcgccggcatacttaaaacaacatcctccacaccatacattccatggatcataccggaaaccggaagaatggatttctcgtcgcgcacgattgcttcgcagatcctctttacagacattgctattccataataggtcgcatttttctttgcaatgatctcataggcactgttgcgcacatttgctgcaatgcgttccatcgaatcgtcatgattgaaatgtccgcgcatctcgcagaatgtatttaacgggattcccgatacatttgcactgctccatgcagcgatctcactgtcaccgtgctctccgatgataaatgcatgcacgctccggctgtccacaccaagatgctctcccaactcatattttaaacgtgccgtgtcaagcaccgtaccggaaccgatcacacggttttccggcataccgctcagcttatgtgcggtgtatgtaagaatgtcgaccggatttgaaacgataagcaggattccctggtaatctctttttgcaatctccgggataatactcttaaaaatgccgacgtttttctgaaccagatccagcctcgtctcgcccggcttctggtttgcaccggccgtcacaacaatgatcgccgcatccataatatcgtcataaccacccgcataaattttcatcggtcttgcaaatgggattccatgggaaatatccattgcctccccttctgctttctctgtatttgcatcaatcaaaaccatctcagaaaacaaaccactctgcatcagtccaaacgccgatgttgctcctacaaatccgcatccgatcactgccacttttctgttatttaattctacctgtttcatgatatttctcctttcctgcgtatgaaaaatcttatttttcacactgctgtccttgtctctggtgttatattaatttatttcgggcagattgtatgttgtaattacaacatttatttgagaaaatatatcatgactgtgttatcagaaaattgaaaatcactatttgccctggcattcttctataaagatgatattggggggcgaatagtgcattcacagcataacgactggcaaattgcacaaagtcgagactacttttgtgactatgggagaaaattagtaaatcttagtttgcctgtcaatgcatagtgttttgctgccatggacggcagcaaaagtcttaatgccccatggaaggggcatttaagacgtacacgtcactccgagaacatttaaagcaggcggacttagattttcttattttcgtacaacggaacaaaacaggcacggctttgtgcaatttgtcaatcaacaatcttgtatgcactatttgacctcaacatcatcatatcatattacagcatcaaaaaaggatgcctcccatttccggaaaacatccttaactatctatataatatccataactttatccaaacccattacgattcttcattctccccatatacctgctggaaaaaatccaccagttttgccagtgaataaatcaataccgtcgtctcctgtgtattcagctctcctttgatatgatcgatcatccggtgatgaaactcttcatgatgcagataagctgcctttcccttttcggtcaggcacacccagacaacacgcttatcctgcttactgcgctccctgacaacatatcctttatcggtcagaccgtccatcgcctttgtcagcgttccggtcgttacgttcatcagctttgctaccgtactcatgctctttggctctgatataccaatcgcctctattacatgaaaatcattataggtaagatccttaaattcatctgtgatcagagattttccctcaatctccataatgtctttaaataattttaccaataactcatttaatgtttcatctgccgtcattcaaatatactcctattcatggcagtactgattgctgtccacatctatgtaaactgcagtcaattcctttactgttgcctttaccataccaaaaccgtcgcgccccatgtcaatccggctccaaatcctgccaaaactatttttttaccttcacatatcataccatgtttattgatattatcaagtaaaatcggcacgctcgccgcagaaatattgccgcactcttccagattggtaggaaatttttccattggctgatgcagtctttttgcaacagattcgataatgcgcagattcgcctgatgcagtacaaacaggtcaatatcttcgacttccagtcccgcttttttcactgcctcttctatcacctttggcaccgttttgactgcaaatttatatacttcctgaccattcatcgacacataggaaagtttcgtatcgttgaccgcaaacggattattgaccggacggttatcacagcggaggacttccccccgcgcaccgtcggaaccctgtaccatgcttagaatgccgcttttgtttgctgcacccggctgctttgctttacaatttgtttcggaatccacctcaacgaccgccgcccctgcaccgtccccaaacaatacacaggtgcttctgtcattccagtccatgatctttgaaagagtttccgctccaatgaccagtgcctttttgtatacaccattttccagatacatctgaaccgtatttaacgcaaacaaaaatccggagcaggcagcgtttaaatcaaatgcaactgcattttttgctccaagcgcactctgcacttcacaggataagttcggcagaaacttatccgccgtaaccgttgctgcaatgataagatcaagttcttccgcagccatcctcgcatcttttaacgcttcctttgccgcagcgacagcaagtcctgtcgttgtctcctccaccgcaagatgtcttgcaccgattccggtacggcttctgatccattcgtcagaggtatccatcaatttacttaaatcatcgtttgtcacccgaagttttggaaccgcacttccggttcccctgattttgattttcatactttttcctcattccggagtttattttatttccatctgccctctgtaaaataatccagtaacctttttatcagaacgcacggaatctcgcatagcgctcctcggcaagctgctctcctgtcttgccattctgacgctctaaaaattctttcatatggcctttcatatatcttgagattgactcacatgctttttcgtctgccgtgccatactccgggattacctgctccacaatatttaacgcatacagatcatgcgccgtgatcttcatgacctcgctggcttcttttgcacgttttccatctttccagaggatcgatgcaaatccttccggcgaaagtaccgaatacgttgcattttcaagcatccagacttcattgccgaccgacagtgcaagcgcaccgccgcttccgccttctccgatcatcagacagaggatcggaactttgatggctgacatctcatagagatttcttgcgattgcttcaccctgtccgcgttcttccgcttcttttccgcagaatgcaccggatgtgttcacaaatgtgatgatcggacggttgaatttttctgcctgtttcatcagacgcagtgcttttctgtaaccttccggtgacggcattccgtaattgtgacgcatgcagtcttttaaatcttttcctttatgaataccgatcacagtgaccggctggccgtcaaggtaggcaacaccgcccacaatcgcaggatcatccgcgaactgtctgtctccgtgaaattccatgaagtcgtcaaaaatattgtcgatataatccaccgatgcaagccggtctgcacgtcttgccgcacgcactttttcccatgcggaaagaggctgtgcctttgtggcgcgctctttcatgacctctgtcggctcgtaacagtcatcgctgcgcagcggatcaaagtttgcatatccttccgttttctgatgtatctttaaaatgcggtaaagtgtcatttttaaatctttacgctccacgatcgcatccacaaaaccatgctctaactggaactgtgccctctggaatccctccggcagtttctctccgatcgtctgctcgatgacacgcggccctgcaaatccaatcagtgcccccggctctgcaaggataatatctcctaacatcgcaaaacttgccgtcacacctccggtcgtaggatcggttaacaccggcacatataaaagtcctgcctcggaatgtttctttaaagcagctgctgtctttgccatttgcatcagggaaacgattccctcctgcattcttgcaccaccggaacaacagaataaaataaccggaagagaaagttctgtcgcacgctccaccgcaagtgcgattttttctcccacaacatgccccatactgctcatcataaaccgggcatcacacacgccgatcaccgtctcaagtccatagatcctgcattttccgactgtgactgcctcatgcagtcctgtcttttcctgtgcggctttgatcttctccggatatcccggaaaatcaagcggattttttgactccaattcctcaaaccacggctcaaaggtatccttatccgcaaccatgcggatcctgtttttggtacggacgcggaaataattgccgcactcataacagacatatttatttttttccgcggttttcttattgatctctctgccacaagccggacagacgatcgttgccggcggctctgtattaactgtctctgcctctttttttgctgcctctaccgttttctgtggttcttctaccgtctctgttacttcttttttcttcttcaaaaaaaatgctgccatactttcccctttttgcctgtttacagttatttatcaaacctgcgctgttccagactctcttaacttcaactgatcgcaaatgtcagctccgcgatacatgcaatgtcatcccccaccttcgctgtggcacggccgacaccgatcgggcctttttgctttatgatctctgtttccaatatcaacacatctcccggcactactttccgtttgaattttgcagaattgattcccgcaaaatatgcagtttttccgcggttttcttccaccgagagaattgcaaccgctccggtctgtgccagtgcttcaatgatcagtacgcccggcatgaccggctcatttggaaaatgtccgccaaagaatggctcattgtagctgacacatttttttgcaacggcacgcatgccggattctaattcttccaccgtgtcgatcagcaaaaacggctgacgatgcggaatgatctccatgatctgtttcgttgttaaaacggacataattgcctccctgttttccaaaataaaatttgcccactggtgagcagaggcatttcctcccaattattcactgtattttttcagcaggatacttgcattgtgtccgccgaaaccaagtgagttgctcagtgcatacggcacatccatctgtaccgcctctttacagtaatcaagatccagttcttcatccggtgtcgtgtaaccaacggtcgcatgtacaaaactgtcctgaatttctttgacacaggttacaaattcaatggcaccggcggcaccgagcagatgtccaaccatagattttgtggaattgaccttcatatcatatgcgtgatcgccaaaagcaagtttgatcgcacgcgtctcaaacaggtcgttgtgatgcgtggatgttccatgtgcattgatgtaggtaacttcttccggacggatgcctgcatcttccaccgcattcgtcatggcgcgggctgcaccggcaccatcctcagcaggggaggtaatgtgatatgcatcagatgaagttccgtatccggctacctccgcataaatttttgccccacgcgcttttgcatgctctaattcctctaacacaacgatcgctgcaccttctcccatcacaaaaccgctgcggtttttatcaaatggaatggaacattttgtcgggtcactctcggaggaaagtgccgtcagtgaagtgaatccggcgattccaagcgggcagatcgcaccttccgttccaccggcaaccatcacatctgcctctccgtactggatgctgcggaatgcctcaccgatactgtttgttccggttgcgcatgccgttaccacgttgatgctctttccttttaaaccgaatgcgatcgagacatttccggctgccatattggaaatgacaagcggtacgaacagcggatttactttggacggtcctttttccaacagtcttttatgctcacgctcaattcccccaagacttccgattccgtttccgacagatacaccgacacggtaaggatcttctttttccatgtcaagcgctgcatccgtgatcgcctcttttgccgctgccactgcatactggcagaataattccatacgtcttgccgctttcgcatccatatactgttttgcatcgaaatctttgacttccgctgcaagatggcatttgtatccttccgtatcaaatttcgtgatctccccgaaaccgatttttccttcttttatggactgccagaactcctctacactaagtccgatcggagtgatcgcgcccattcctgttaccactactcgtctgctcataacttttcctttccattttcaagccccaaattcaggcttttcctttttgatccgacacaataccatgcggtcaaaatgtttttactgcttatatgctcataccgccgtccacggaaattacctgtcctgtgatgtaggatgctttctccgaggctaaaaatgtcactacctccgcaatatcatccacttttccgactctgccgagcgggatctgcgttttcactgcttcctttgccttgtctgtcatctgcgctgtcatttccgtatcaatgaatcccggcgcaaccgcattgcaggtaatcccacgggaagaaagttcccttgccacacttttggtcagtccgatcacgcccgccttgctcgcgctgtaatttgcctgtcctgcatttccaagaataccggatacggatgatagattgatgatcgttccggaacgctgctttaacagatagcgtgaaaaatgacggatcgtgttaaaagttcccttgaggtttgtcgcaatgaccgcgtcaaatgcttcctcgctcattttcatcaaaagatcatcccgtgtgataccggcattgttgaccagaatatccagatgaccgtatgtctccatgatgtcttttgccattttttcacaggcactataatcagatacattgcagccgtaaactgccgctttgccgccatccgctgtgatttctgccgcaacagcatttgcacgctctttagaaccgttgtaattgatgatgacaaatgcaccttcttttgcaaggctttttgcgattgcagctccgatgccgcggcttgcaccggtgaccagtgctgttttattagttaacataacttctccttttttctgatagctgccaaacttttttcacatcaaaatatgtggcatatcttatttatttttgctctcagcaacaaatttctcaaagtcttcatatttatcaatattgactgcagctacatcacggttgatcttgcgcatgaatcctgtcaaggttttccccggtccgatctctacaaatttgtctgctccgtctgcgatcagacgctcaatcgtctgctgccagcggacagatgaggacacctgtttttccagtaatggtttgatctcctcttcttttgtcacatagtctgctgtcacgtttgcgacatacgggattgccggtgtatggactgttacatgttttaattcctcgccaagtttttctccggcaccctttaacattgctgagtggaacggtccgctgacctttaacggaacaacacgttttgctccggcttctttgcagagctctccggctgccgctacggctttttcttctccggtaatgacgatctgtcccgggcagttatagtttgcgatcgatacaatgccctctgtttttttacaggcttcctcaatctgcgcggtatccagtgccaggactgctgccatggctccgccctccggcactgcctcctgcatgtagatccctcttttgcgcaccagtgcaaatgcatcttttctgctcagtgctccgcaggcaatcaatgctccatattctcccaggcttaagcctgcagtcacatctgctttatagccttttacctccaatgcacgcaggatcgcagcctcggcggtcagcatacagatctgtgtatactccgtgatattgatcttgtcgttctcctcaaagcataacgcagcgatatcaagtcctgacgcctcggatgcctcctcaaatacttctctgcattccgggatggcatcgtaaaaatcctttgccattcctatgtactgtgctccctgtccaggaaacataaaaaccgtctttcccatgttaatctccattcttgcgcttatttttgcactatcttccaagcagtgactccgcctgtgtcacaacgtcctcgatgatctctttacagctttcttctttttttaccatgccggcgctctgtcctgccatcaggcttccgttgaccacgtcaccgtcaatgactgccttgcgcagggacccaagtgtaaggtgctctaactcttcaaatgaagcgccctctttttccatttttaaatattcgcggctcatctggttgcgaagaacccggatcggatgtccggtactcatgccggtcacttctgagtcaatgtcttttgccttgatgacacgctccttgtaattcggatgtacgatggattcttttgccaccacaaatctggttcccatctgtactccttcggcaccgagcataaatgccgctgccatgcctctgccgtctgcgattcctcctgcggcaataaccggtatctgtactgcatctgccacctgcggaacgagtgtcatggtcgtctgcgcaccgatatgtccgccagactccattccttctgcaatgactgcgtccgctccgccacgttccatcattcttgccattgcaacactcgcaacgaccggaatcacaacaacgcctgcctgtttccatgcatccatgaattttccgggatttccggcacctgtggtcacaaccttaacgccctcttcaatgacgatctgtgcaacctcggctgcatttggatttaacagcatgacgttcacgccaaacggtttgtcagtcagcttctttgcctccctgatctgctctctgaccacctcaggcggtgcacttgccgctccaatgatacctaaacctccggcatttgaaactgccgctgcaagatgatattccgcaacccatgccataccaccctgaatgaccggatatttcgttcccagcagtttacttacccttgtttccatacttaagccacaccttttccttttaagtactcaacaacatcattgacagttacgatagaaggtaaatcctcagatgggatctccacgccaaactcttcctcaagagccatgacaagttcaaataaatctaaggaatctgctcctaaatcatctttgaaattagactctgccttgatttcagactcattcacatttaactgctctgcaataatcgggatcattttctctaacatattttttctccttttctgcgcatgccttattatttttccagcgccctgcccttatttttattgtgggctgattttattttcttattttcttattcatgtaatcatttgcctttcaaatagtttgatagtcaaataattagcttttcaaagtatatgactgttggaaatatttgtcaaggtaatttggtaaagttttgcaaaatggtacttaggtattaagggacagtgtaaggcgcagttttccgggtgccgctggcaggtttggttccgttgtgcgaaaataagaaaagctaagtatgcctgtttgagttggtttcggagtgacgtgtacgtcctgaatgtgccttccctggcacatcaggacttgtgctgccgtccatggcagcacaacactgtgagtgaacaggcatactaagattttctaattttcttccaaagtctcaaatctgccggcggcacccggaaaactgcattctacatgccctcgataccgaaaaaagggaaatctatgctctgtaggttacgactgtttcctcattatttttttgttctgatcttgattgtgatttttctttacttatgttttaatgggattaatcggatttttaattttaactacaggagatttctcatgcattttgttcaggcgaagaggcttttatcaaaggataacggaatgaatatttaccgtggatgttcccacggatgcatttactgcgacagccggagcaggtgctatggttttacacatgcatttgaagatattgaggtaaaggaaaatgccccggaattgttagaaaaggctttgcgatcgaagcgtcagaaatgtatgatcggaaccggtgccatgtgcgatccttatcttcatttggaggagcgccttttgctgaccaggcggtgtttagagctgatcgaccggtatgaatttggtgttgcggtacagacaaagtcagcccggattttaagagattttgacctgttaacgtccatcaatgaaaaggcaaaagccatcgtgcagatcacactcaccacttacgatgaagatttatgtaaaaagatagagccagatgtttccaccaccaaagagcgcatcaacgtcctgatgaaatgtaaagaagccggtattcccaccgtagtgtggctcacaccgatcctgccgtttatcaatgacactgctgataacataaaaaatctgctggatgcctgcgtggacgccggcgtaaagggaattatattctttggcattggcgtgactctccgagatggcgaccgggaatatttctaccatgccctcgataaagattttccggggatgaaggaaaaatatatccgcacttacggtaatgcctacaacctgccaagcccgaatgaaaaaatgctcattccaatgatcgtggaacaatgccaaaaggctggcatcctttgttcgccggatgaatgttttgcttatctgcatcattttccggaaaaatacgttcagcggtcgttatttgagtgaaaattgatcatgaatttttgtcgattgggtatatacagaaaaaatctgctgtttatacccaaaaatacgggaattttgagtgatttttcactgataatgggcatagcagatccgtttttattatatatacccaaaacgcaggaaaatcaaggggttttgtgggtatactgctgcagtttctttgccatatgcccaatctgcgatatttcaatatcttatgatgtcagatgcactttgccagtcatcatgttgtgaaaaactattgaaccccaatattataatggaggatctatgaacatgaatataaattctttatcacaaaaatactctgtacgaaaactcgacgaaaatgatgtagatatcatctatgatatgagctgcaaaaacgatatcttttatcaatatcatccgccctttgtcacaagggaaagtattttagatgatatgggagccttaccaccgggaaagggctatgatgataaattctatgtcggttttttcgaaaatgattcactggttggactcatggatttaatccttgattatcccgaaaaagaaatttccttcattggattatttatgacagacacacgctatcagaacagaggtgtcggttccgggatcatcagcgacgtgatcctttgtctgaaatcatctggatataaagaaatccggcttggcgttgacaagggaaacccacagagctattcgttctggacaaaaaacaaattcactccaatccgtgaagatacctatattttaatgggtcttcggatatgacctgaaaagaacggctgcaacagattttattgtttaaagaactgaaatttccattaaaagaaatcaaaaaagtgtaaaagaatttttttctccttttacactttttttcgtctatgattttatttttaaagttttacgcttcgatcacaagctcttcttttgtgacctctcctttttcgatatggaaggaattgagcaccagctcctccgggttcatcagggagaggatcaggtaattcatcttcggatcatacgctaagcggatatcttcctgtgaagggcgtgacggcgattccgggtgcgagtgaaaattgccgagaagtactccttttttctggcggatatctttgatcgccgcaagctgctctgccggatccatggaaaaatgttccctgctctcgtctacgttgcgaagcagatacacgtctgtcaccacacgtttgtcaccttccacatagccgccaagcagtccgcatgcctcgttcgggagtcctttttttgcatgatccacgattttattgtaatcttcctgttttaaaatcagcatatgcgcctcctaagttaaataccgtctgtgcagacaacctgctcgtagtcgatcagttctgtgattgtcggatgttttccacatactgcgcagccatcagtattagacggcagtttaactttgtggaactcctgattgattgcatcgtaggttaaaagataaccggttaaaagttttcctacaccgagaatgtacttgattgcttccattgcctgtaaacttccgatcacaccgcccatggcaccgatgacacctgcctgtttacaggtcggtactgcatcctttggtggcgggtttttgaatacacagcggtagcatggtccttctcccggaacataggtcataagctgtcccttaaaacggatgattcctgcatgggaaaatggtttttttgccatgacacaggcatcattgattaaaaactttgccgggaaattgtccgttccgtcaatgataaagtcataatctgcaatcagatccatgatgttttcgcttgtcacaaactggcggtaagtttttaccgttacatccgggttcatcgcattgatcgtctcttttgcggattttacttttgcttttccgatgtcggctgtgccgtggatgatctgacgctgtaaattggaaagatcgacctcatctgcatctacgataccgatggttcccacgcctgctgcaccaagatacattgctgcaggtgcgccaagtccgccggctccgatgatcagcacttttgcatttaaaagttttttctgtccctttgcgccgacttcttttaatatgatatgtcttgaataacgctcaatctgctcatctgttaacgccatagctgcctcctcccatgaaatataaaaattctacgttgtcgccatcttttaataccgttgattccacctgctcagatggaacgaattcctcattgatggaaacggtcacatactccggggtttccacctgctctaactcgaacagttctgttaactttaagtcatcttttacttcttttttgtttcctgctactgtgatctgcatgtttctcctcttttccgcggaaccttttttgtctgcccgctattttaaattttcatcgatccacgcctcaatatcagcttttcctgctgcaccggctctctctgctttgacctcgccctgtacaaacaaccgcagtgccggtacacccatgacgtcatatttttcagcaagctccatgtcatagttgacatttactttatatacagaaagtgtgtcttcgcgttcgtcctcgatatccccaagcaccggtgataactgcttgcacggaatacaactgtccgaataaaaatctaccagaaccggcagcggacttttcaggactttttcttcaaaattgtctttattgattcgctgtgccatgattcctcctatccctctaccttgcggacgatcaggttataagttccatcttcattgtccaccagttttaagatctgatgtccctcttccttgacactgcgcggtacgttctgtaccggctcaccatcgttcatgcggatggcaatgacttcgccatcatctaattcctccagcgctacctttgtttttacgaaagtgagcgggcatactttatcggtaatatctactgtttcgtcgattgcaattcctgcgatttccatttcttccctcctgtttcttcttattatatatgctgcatttttgattgctccagattgttttctgtatgcatgcttttgctgcatctatttgtttacatgcttatttgttcttgcatgcatatttttttgtgacatatctatttgtttttatatacaattttttcctgcatacatgttttttctgcccgaaatccttactttccctcgtaggcttctttgatcttcttacggaactcttcctcgccgacgcgctgtaacgtcaggcggaaacgctcgcccgggtttgcatgatctctgaaaaaggcgatcgctgcatcggtgacacggaacagtgtctctttgtcatgtacgattgggagaagctgctcccctttgtagatctgatttccgaacaatccaccgaaggaaaccagatatccgctgtttccttcccacgcatccgtcggacaggacttcacgcagcggccgcagtagttacactgattgcggttgatcgtcactttgtttccttcacatttgattgcaccctgacggcacgccttttcgcagacaccgcagccgatacatttatcctcaacccaggaaacttccatgccgcctttgattccgatatcattttcctctgcctttaagcagttattctggcatccggtcacaccaaacttgaacttgtgaggaagttcacgtccaaaataatgttcatctaactcctgtgccagtgaataggtatcaatacatccgcttggacagatctccgaaccctgacaagctgtaacggtacggactctcggtccgcagacacccggtttcacgccgccttttgcaagctctgcttttacttcctcgatatcctcaaaattgacaaacggtatctcgattccctgtctggatgtcatatgtacatagcctttgccgtacttttccgcaacctctgccacggtcttaatattttctgcagtcagattacctccgaccacctggattctgagtgagaaaaatcctttctgtttctgcctcatgaatccgcctttttttaatgctgcataatcaactcccgccatctttacactccttatcttttctgatttttcaatatcctggtattctactgtgcttttctattgtaacactttaaagtgcccgttttaaagtattactgtaacactttggtatattttttcgttttttaagaaaggctctcgatcgcctgcttaaaatcccagatcagatcatcaatatcctcgattccgacgctgatgcgcaccagatcatcaaatacaccgcccgctttcttttcttcctccgtgctgtgtacactgatggtcgattccggatggatgacaagtgttttggtatcgccgatattagataccttaagcggatattttaatgcattgataaatgcaaatgcccgctccttactgccaagccttaaggtaaagatgccgccgtaatgaccgtcaaactggctctttgcaatctcatgccagttgctcgtctctaaccctgcataatttaccgtaatgtctttatagttttcttcaatataagccgcaagctgcattgcattgtcgcagatacgctccatgcggagtcctaacgtttcaagcccaatgctgtttaaaaatgcattttgcggcgagagacaggctccagtgttgcggaacagtccgtttctcaattttgcagtgtaggcaaacggtccgaattttacaaaatcacgcatacccggatatttttcggtatcccacttaaatgttccgccgtctgtgataactccgctgatcgagttgctgtttccattgatgtatttcgaagtggaattgactacaatgtctgcgcccagtgaaagcggttttaccagatatgcggtggctgctgtgttgtcgataatgagcggtacgccattctcatgtgccagctttgccagtgctttgatatctgtcacatccagtctcggatttccaagtgtctctgcaaaatagagtcttgtgtgtgcgttggtcgctttgcagaatgcatcgagatcgttgttttcgacataatgagtcgtgattccgaatgcttcaagatcccggaagagatcaatgcttccaccatagaggctcgcactcgatacgatctcatctcccgcctgtaagatgtttgcaaatgcattaaacatcgctgccattccggatgcgcatgcaacgctcgatttaccgccctctaacacggtcatccttttctcaaatgcttccaccgtcggattattgatcctcgtataggaaaatcccggagcctgattatgaaatatcttttccagacgttccgccgattcctgttcaaatgcactcgactggtaaattggtgttaatgttgctcctgtctgcggttccccccgaaaagcaccgtgcagcaaagatgtattaaatttcacggtatcgctcctttcatttcctacttgtcatataggaatattatgttttaactgagtatagcaataaagataataaattgcaagaagttttttccactttttt

SEQ ID NO: 539 - DNA, 28014 bp, unidentified
  source 1..28014: mol_type = unassigned DNA
gtcctcagcgcaagggcgacctgcgccgtgctcgtgctggcgcacagaacatcgttcccaacagcaccggcgctgctaaggctatcggcctggtcatccccgagctgaacggcaagctgatcggctctgctcagcgtgtgcccgttcccaccggttctaccaccatcctggttgccgtcgtcaagggcaaggatgtcaccaaggagtccatcaatgctgctatgaaggctgctacttctgagtccttcggctacaacgaggatcagatcgtttcttccgatgtcatcggcatgcgttacggctctctgttcgatgctacccagaccatggtcgctaagatcgacgacgacacctatcaggttcaggtcgtgtcttggtacgacaacgagaactcctacacctctcagatggtccgtaccattaagtacttcgctgagaactgctaatcacagctctacgctcaaaagtgcttgagatgccgtgctgaatgacggctggtaccggctttgctggtacgaacatgctgtgattggtacgacaacaggataacgagttcaacacccttccttttgcgggtttccgtgagaggaagggtgtttttttgctgcaaaaaagcaatggaacgagttcctttctaaaatgaataggttgcaacaaaaagacggaataaagtacggaaatcttagccatgatgcaggcaatgatacagctgcaaagtattgtaccccagaggaaaaaatggtaaaatatttttagtgtcaataaatacatttacgaaattgatattgatgattctggaaataaaatgtcaatgaattgcggcgtaaatctgtcaaaaacctgggcgtagatgcgtccgggctttttctgatgtaaaggaaaccgggccggagtttggcacggtatggggatgagatccctaaatggggaaagcgacaggaaagggaaaatgaaagagaaattgaggcttgctgtttttggccacaaaaggtggtcgagagagggcggcgtggagatcgtggtaaaagagctgtgcacacggatggcgcagcagggctgtcaggtgacatgctacaacagatcgggacatcatgtgagcagtgcggaatatgacgatgctggtaaaacggagtacgagggaatccgtcagaagtctgttccgactattcagcggagaggggctagagatataatacgcggctgtcataatagggacaagggtacggcagagaatgaaaggctccgcaacccgaagttcatattttcttacccgaagaatgaacgactgatctttctgagcggcagaaatgccgcgcaggaagaaatctcgaccatgagggtggggtgacagccagcggacaggcaagcgagcctatccgctctttgtgttggccgagatattgatgaagaaattgagtgggattgtgggaaagatttatgagtaaaaaacttgcgattgcgatgttcggacagaagcgattatcgagagaaggcggagtagaaatcgttgtcaaagagctctgcacccgaatggcacagaatggctgtgacgtgacctgttacaacagagcaggccatcatgtgagtggtgcagaatatgacgatgctggtaaaacggagtacgagggaatccgtcagaagtctgttccgaccattgaacggcgtggacttgctgcagtcagctcctccgcatttgcggcactttatagtgcatttggaagatacgatgtggtgcacatccacgccgaaggcccggcgttctttgcatggctgccgaagatgtttgggaaaagagttgttgttaccgtccatggggagtgtgaaataatatgggcaaccagagaaaaacctgatttcatgcgggtttacgcggcttgaccttttcacctcaacctgtttctgcctgtcatggtgcgttacggccagtgtgacttcaggtgctaatggcttctggttgcgctctatacttaacccaccacagcgaaagctgatagagcagaaaacaaaataaggaggtacgaaggcgagcctgcgtatagattgctactgcaatctgtatacaggcttgttgtcgtgcaataaaggatgcaaagtgaatagtgaaagaacgagcatgacaatttgaggataagaactactgggattgtgcataaggcaaagataaaagcatgaaatagcggttggagagaagtaatggaaggaaaaatcagacttgcggttttcggacagaaacgtctttcgcgtgaaggcgggatagagattgtcgtaaaagaattatgcaccaggatggcacagaatggttgtgaggtgacttgctacaatagagcaggtcatcatgtgagcggtgcagagtatgacaaaacaattgaatatgatggtatccgtcaaaaggttgttccgaccattgagaaaaagggacttgcagcggtaagctcttcctttttcgcagcactttgtagtgcatttggaagatatgatgtggtgcatatccatgcggaaggtcctgcttttttctgttggataccaaaactttttggcaagcgtgtaatcagcactattcacggtttggactgggcccgcgaaaaatggaaatttggcgttggatcaaaatttatccggcagggtgaaaaaaatgctgtgaaatatgcggacgagatcattgttctaagcaaagacgtgcagaagtatttcttggagacctacggaagggagacacattttatccctaatggtgtcaatcggccagaggttcgggaagcaaagctgatcacggatcattttggactggaaaaggattcctacatactgttcctcggtcgtctggtgccagaaaaggggattcgatatctggttgaggccttcaagaatgtcaagacggataaaaaactggtcatcgcaggcggctccagcgatacggattcctttatggagaaagtgaaagacctagcgaagggtgacgatcggattctctttaccgggtttgtacagggagcaatgctagatgaactatacagcaatgcttacatttacacgctgccgtctgatctggagggaatgccattaagtctgctggaggcaatgagctacggcaattgctgtctggtatccgacattccagagtgcgcagaggttgtggaagataaggcattgattttcaaaaagtcggatgtagaggacttgcgagaaaaactgcaagaggcctgtgaccatcctgaaatggttatgaaaatgaaaaagcaggcagctgactttatctgcgagaaatataactgggatgaagttgtaaaggaaacgatgaaattgtacaggagaaaataatagatgagagtattgataataaataaatttctatatccaaacggtggatcagaaacctacatatttaagctgggtgaggcgctggagcagcacggacatgaggttcagtacttcggtatggagcatgaaggccgctgcgtgggcaaccgggtcaatgcttatacatctgatatggacttccacggcggcagcaaactgagcaagctgacctaccccatcaaaactatctacagcaaggaagcacgggtgcagctgagaaaagttctggacgacttcaagccggatgtctgtcacctgaacaatattaactaccagctgacaccttccatcattctggaaatcgtgaagtggcgcaaggaaaccggaagagattgcaagatcatcttcacggcacatgactaccaactggtctgcccgaaccacatgctgaacaatccgaacacccaccagaactgtgagaagtgcctcggcggtcatttcgtgaattgcatgaaaggcaagtgcatccacggctccacggcgaagtcagccatcggcatgatggaggctgagttctggaagtggaagggcacctacaagtacattgacaccatgatctgctgctcggagttcatgaagagcaagatggacagtaatccgctgtttgcgaccaagaccgtggcaatgcacaacttcatcgacaaggtggagtggaaagaaacggagaaaaaggattacgtcctctactttggccgcttctctgaggagaagggcatcggcacactcatcaaggtctgtaaggaactgccggatgtgcagttcattttcgccggtactggcccgctggaagagacagtaaatggtattaagaacatcaaaaacgtcggcttccagaaaggcgaggcactggagaagctgatccgtgaggcacggttctccatttacccttctgagtggtatgagaactgcccgttctctgtgatggaatcccagatgtacggcacgccggtgctgggagcagacatcggtggtatcccggaactgattcaagttggcaagaccggcgagctgtttgagagcggtaacgggaaagatttgaaagaaaagatagaaaagctctggggtgataagaagctgtgtgtggagtacagtgcgaactgtaaggacattagcttcgataccattgatgagtattacgagaaaattatgaaggtgtaccagtaagagaggagggcaggccgatggtttatatgctgtttgataacccagcggataaacagaatatgacatttctgaacggctatgaaacagccaagattcggcagatttatcctccacagaaatgtaattccaccaaagaaatgctggcagcttgcaaggatatgatcaagcagtcgggggagggtgacactatcatctgttggtacgacttcatggcagttttgtgctggtggttgtgtaaagtacagttcaaaaatagaaagattattgcgctaaatattctgctcaaagataaagcaactgcgaaaaacaagctggcaaagtttttatacaagccgatgctgaaatcaaaaaaggttcaggcgacggtgacttctaagaagtacggtgagcatttgaacgaaatgctcggaatccataggaggtacacgctgctacatgacacctatcatggtggttacagcattgaatatgaaggcgaagtagtgccgaatagtgtattctgcggcggacggaacggtcgcgactgggagtttctgattagaattgcacaggctatgccagaaattacattcaactgtgttatgccgagggataggtttgaagagtacaaagataacttcggcaaaaatatggtggtgaagtcggatattcctgaacaggaattccttgagttcatgtgtcagtcacagttggtagttacgccgttggatacggaggcaccggctggactgattgctttttaccaggcagccgccaatgggaagatggcaattacgtcggatacggtaactacacaggagtatttcgccgatggcagaggtgctttgtgtggaagggatattgaagactggaaaaatacaatccagtacttcttgaagcatagagaagaagctgattctagcgcagagaagttcaagcgtttccttgagaatgaatgctcagaggaaaaatatgcaaagacattgtgggggatgcttgcgggatgaaagagagatatgagggaatagatggcttgaaggcctatgccatattgggaattgcactgatgcacattctggcaaatggaaaatatgaagcaagtggatttgtatttgaccagcttataccatcctttacgaaccttgtgttcctttttatgatggtcagcggttttggcatgtgctgcggctactaccagaaattcaaggaacagaaaatcggtgtgggagagttctacaccaaaaggtacagcaagatctggccatatttcgcattgctctgtgtggtggacttcgtaatatcacctagtaaaagtgcgttgtatgaggtctttgcaaacctgacactctgccagggacttttgccgaatatgaatatatcggttatcggtgtgagttggacgctggcagtcatttttgtattttatctgctgttcccattcttttgtttcctgcttgagaataagaagcgtgcatggtcggcatttgtctgtgctgcaatctataactttgtgtgcagtatatatttctttgatgaaaaccacattgcagatagggtgacagtgaattttaatgaacggtcgaatattctgtacagtgcagtctatttcatcgcgggcggcctgatcttcctctatcgaaaagagttggctgagttcgcatcgaagcacaaggttatcgccggagcgattctgctgattgcctcggctgcttattttgcattaggcagttctacgctcacgatgctgttcttctgtgtggcagcactggtctataccctcggatgtaagcgggggggggtactggtcaatccagtcgccaagttcctcggtggtatcagcttcgagatttatctgtgccacatggtaatttatcgtgtgcttgagaagctacaccttgttcatctatttgaaaatgatctgctggcatatatcttcacagctgttgcagtcatctgtggttcgattgtgttttcggtatgtgccaagtggttcttaaataaagtcgaaacattcttaaaagagagagttaggagagttaatcatgtctgaagaaaagaagttaaatggtacggtcatcgtcacttaccgctgcaatgctcgttgctccatgtgcaaccgttataaagcaccttccaagccggaagaggaaatcagcattgaaaccatcaagaaactgccgaagatgtatttcacaaatatcactggcggtgagccgttcatccgcactgacctgaaagatatcgtgcgcgaactgtacaagaagtctgatcgtatcgttatctctaccaacggcttctttactgaccgcatcgttgacctgtgcaaagagtttccgcagatcggtattcgtatctctatcgaaggtctggagcagaccaacaacgagattcgtggtctgcagaacggctaccagcgtggttacggcacactgaagaagctgcgtgagatgggcatgaaggacgttggcttcggtatgactgttcaggacaagaatgctcctgacctggttccgctgtacaagatttccgatgagatgggcatggagtttgcaactgcttctctgcataacagcttctacttcgttgaggcgaagaatatcatccacgatcgtccgatggttgcaaagaacttcgagaatctggtcaatgaactgctccgcagcaacagcccgaaaaagtggttccgtgcatactttaatcacggtctgatcaactacatctacggtcagaagcgtctgctgccttgcgacatgagcttcgataccttcttcatcgatccgtatggcgatgttatgccttgcaacggcaccaaggacaaagaggttatgggtaacctgaacaatcagacctgggatgagctgtggaacagcccggaggctgagaaggttcgtgcaaaggttcgttgctgcgaccgtgactgctggatgatcggcagcgtaagtcctgcgatgcacaagtacatctggaagccggctacctgggttctggttcacaagttcaaggctctgttcaccaaacatccgtacagcatgtatgagctgaagatttgccgtgactaccgtgatggaaaagttaccaaggaagatctggataagtgcagcacctgcgacatgaactgtgtgatcaacaacggtctgagtgaagcttctaaggagcagctgaagcataagaccggcgaggaaattgtggatgccgatatcgcacagcagatggagacgaagtaatgggtgaaaagacagcggtaagaacaagagaaaaatgggtcgatgatgtaaaagtcattgcctgtatattggttgtgctgggtcatttcttccaaagcatgacgaaggcgaatattctgcctgaaaatgatttgtaccagtggtttaacacaacaatttactacttccatgtaccgctgttctttatttgtagcggatacctatatcagaagtacagcaatgtaaatagcgtgagtagttggtgcaagaatgtgtcgaaaaaggcattggcactcggcgtaccctatgccacttttacaactgctacatgggtgctaaaaaagttattttcaagcagtgttaacgatcagattggaggtttgagtgatacattatttcttcacccgacttcaccgtactggtatttgtatgcactcttttttatttttcttgtcacaccgacttttagcagcgcaagagcggcagcagtaggaataataatttctttgtttgcaaaacttttgattttaaccggtattgggtatgaaatttacgcagtttcgacatttctgtcaaacgaaatctggtttgtactcggcatgagcatttgtgtgtttaacgtacagccaaagggcaaaaaagtattaggaatgatatgtggattgctttttataattctgagtattttggtgtatacagcggaaatcagcggtagtgtggtctctttcgcaatgggattattggcttgtgtggctgttatcatgatggcggcgggttttgaggaaaagttcggtagaggcatggaattcattgcaaagtacacaatgccgattttcttgatgcacacgttgtttgctgcaccattgagatcactcctgatgaagattggcatcgaaagtgctgtgattcatgtgatgctgggacttggcatcagctttgcaggtccaattatagctgcttggattatgaagaaaacgaagtggttagagttctttctgtatccgaataaatttattagaaaggtatcataagaatgggacttaaagggacaatcaaagaatgccttggattgattcgagcaaaaatctttggtgtaactgcgggacagcgtgtgtatattggcaagcattgcagtttaaaaggaaaacaccatattacttttgaagattccgtaacggtacgcccttatacccaaatctggtcgggggggggtacggtaagaattggaaaaggctccgaaattggtgaacgctgccggatatctattgccaattctctggaaatcggagaaaaagtactcctttcgcccaatgtgtatataacagattgcgaccatgagtaccgtaatgtagatattccgattattgatcaaggaattgtacaaaagggacagaaagtgtctatcggagatggttcatacattggaattaacgctgtgattgtaggtaacgtaaagataggtaagcattgcgcgattggagccaattcagtggttactaaagatgtgctggactattgcgtagcagttgggagtccagcaaaagttattaagaagatgggatattcataaataaatggtggatgttcctacttccttatcaaactctgctgctgtttattctgtagaagggtagaataagctggagatattacgcaatggtgaatatctttgaaaataaggagaagaagcatatgattattacaaaaacaccattccgcatgtccttttttggcggcggaacagatatggaaagtttttttagggaaaacggtggagctgttttatctaccacatttgacaagtattgctatgtaaatgtacgccatttaccaaggttttttgactattcaacggaattgtcctattcaaagacggaacgagtgacaaacattgatgacattcagcaccctgcaatccgcaatgctatgaaaatgctagacatgcacgagattcgtcttacatatgaagcagaccttccagcacgttctggcctaggaacatcaagttctttcgcagttggaatgctgaatgccttctatgctttaaagggtaagtatgctgacaagaaaagactagcagatgaagcgatttatctggagcgtaatctctgtcaggaagctggtggatggcaggatcaaatcgctgcttctttcggtggatttaaccgaattaactttaatgcggatggatatgaagtcctgccggttattatttcaccggagagaaagaagcaacttaatcagaatttgatgatgtttttcactgggtttacccgtttctcttctgatgtgcagaaagcaaatgcagcaggaaaacaagataagactgctcagttgaaagagatgcttgctctggttgatgatgcagagcgtgttctgacagacaagaatgcagatctggatgatttcggtagaatgctggatcacacttggaaacttaagcgtcaaactggatcggctgtttctacaaatagtattgatgaactttatgcaaaaggcgtggcggctggtgcattgggcggaaaattgctgggtgctggtggtggcggattccttgtattctatgttcagcctgaacgtcaggatgcggtgcgttgggcgatgcgtgacctgatgcatattccgtttgcatttgaggatggtggtacgagggtgattcattatacaccggaaacctacgaaccaaagaactaattttgagtgaggaatgaagagatgaaagtagtaataatggcaggaggcaagggaacgcgtatttcttcagttgccagtgatatcccgaagcctatgattaaaattgaagggaaaccagtactggaacatgagctggagtgtctgcgtgaccaagggtttactgacattattattacggtgagtcatcttggtaatattattatggactattttggggatggatctggtacatcccctgtgacgggaaaaccgtttggcgtacatattgagtactattttgaaaaagaaccgttaggcaacgcaggtgccttgttcaaaattaaagataatctgacatctgattttctacttttaaatgcagatgcagtgtttgatgttgattttaatcgttttgttggcttccatcaggaacatggtggaatggttacactttttacccacccgaatagccatccatatgatagcgggttaatcgttgcagataaaaatggagaggtaaaaaagtggcttgcaaaagaagacgagcggccgcagtattatagaaaccgagtgaatgcaggattgcatgttatcagcccgaaagtgctggaactggttgatattgatgcggattcaataggcaagatcggtgcaaacggtaaaccggtaaaagttgatttggatcggcagttattaaaaccgttagccgggacaggaaagatgttctgttatgacagcccagaatatgtgaaagatatgggtaccccggaacggtattactccgtatgcgcggattataaagaaggaagagtatccgggaaaaatctaaaaaataagcaaaaagcagtatttcttgatagagatggaactattaataaatatgttggttttcttcgaaatatagatgattttgaactgatagatggtgtggctgaggcagttcgtaaaatcaatgaatctggctatcttgcagttgttgtaacgaatcagccggtaattgctcgcggtgaagtgtcttttgaagagctggaagaaattcacaataagatggagacacttcttggaaaagaaggagcatatttggatgccatttactattgccctcatcatcctcataagggatacgaaggggagagaccagagctaaaaattgattgtacttgtcgcaaaccgaagcctggtatgctgttgaaggcggcagaagatttcaatatcgatctttcacagtcgtggatggttggtgatggagaaaacgatatcaaagccggttataatgcaggatgcagaacagcgttgattggtcgtgaatcttatggtcagacagtgacaataccgacattaaaagagtttgtagaacagtgtctgaaataaaagaaagggtatcgaaatgagtgagttggaaaaaagattgatgaagcatattgatttattagtggaacgttacccttcacttgaatcagaaaagaacagtattatctctgcatatctgcttttggaagagtgctatgtaaatggtggaaagctgcttgtggcaggtaatggaggttcggctgcagatgcagagcatattgttggtgaactaatgaaaggctttaaaatgccgagaaagcccagagctgattttgcggaaaagcttatggcagaaaatcaggaattaggaactgttcttgcggaaaatttacaaggtgcacttcccgcgattgcgttggatggacacccagcattatctactgcatatatgaacgactgcgagccgttgctttgttttgcacagcaggttaatggttacggtaaagcaggggatgtgtttcttggcatttctacaagtggaaacagtaaaaatgttttgtatgcggcaacgactgcccatgccaaaggtatgaaggtcattggtttgactggtgcaaagagcagcaaattggaactgatgagtgacgtttgtatcaaagtaccgcagacagaaacatatatgattcaggaacttcatcttccagtgtatcactgcttgtgcttgatgctggaagatagattctttgggtaagaaaagtgataggaggtaaaataggctaatgtataaaattagattgataagctgttattttggagaactaaagtcggaattttacctctggctaaatagttgtggatataataaaacaattgatttcctgtttgtaacggatcaggaaatcatagcagatatttgtccgccaaatgtaaaaatattgcatacaacactaaaatgcattaaagatgtagcagatagaatttttaattttgatgttgaattgggcacgccgtataaattatgcgattacaaagttgcgtacggattgatttttcaggaagaattaaggcaatatgatttttggggatactgtgattcggatatggtgttgggaaatatccggaagtatatcacagatgaaattttagaaggatacgataaaattctaccgttgggacacctgagcatttataggaatacagatgaaatcaataggcgatttatggaatgtccggatatcatggattatcatgaagtcttttcttcgcctagaatttttcaatttgatgaaacgcctggaatatatgcaatgtataaaaaaagaagttggagaatgctggaatatattccttttttagatatagtatcaggatacgatcagcgattaacaaagtatgtgtacgcaaaacgcatgtatggagttcaagttcagaatcatacgcagcaaattttttgttttgcgagaggcgaaattatagaaaaatatcgaaataagaaaaatgcactgtgcgagcacaggtatatttacattcatagttcaaagagacattatcagtgtccatacaatgagattcccaagcaatatgtttttatgcctgataaaatttgtgaaacagataatgtagacgatatagaaagcctttccgattatagtataaaaacgaattgtacaatagaaaaaatgttacttcatatgctaacaatgaggggcaaagtgaacaataaaatcagatcgctggtcaggggaggaaaataagaatgaacgttttacatatgcagttatccggtggatttggtggaattgctacgttgagccgggaaattagtaagtattcgcaggatcaaaatgtttttgtctttttgtttgaaggcggctgtgtggcggatgaaatgaaagcagagggaatacctgtctatgtccttaatgcttcgcataaatcagatagaaaggcaaagcaagagtaccttgatatttgtagaaaacataacatcgatgttatagtgtcacatacaggatgttttatggagtttcgaattctcctattcttaaagaaaaaaattccgacagcaaaaattttcatgtatgagcactgtgacatggtaggcgcaatgggtgttggctggaagggcattgtcaatcgaatgctttacagaaagtgcttttctatggcacaaggcggaattgcaatctcaaaatatgttaaaggaacagcattgcaattaactccaggggaggacagcaagattgaagttgtctataacggagtcgatttggacaaatttcagtatatcaaacgcgaaagaaaggattatttaagaatcatatacgttggacgaattgtcccagaaaagggctgcgatcttttaattcaagcgatttcggatttaccccaaaatgttaaagttaaagtgtttttcgtgggtgaaggaactgatatgctagaatgcaaaagaatggccgctgagttaggagtccaagacaaaatctcatttgaaggaaaaagtaatcgagtaagagattatctgtatgcagcagatgtatttgtccatccagcaaggtgtcccgaaggatttggaattacacttgttgaagcaatggcgacgggattgccttgcattgcgtttgaaaaaggcgcaattccagaattgattacaagtggaagagagggctttcttgaaaaagatgtagatgctgggaaacttgctgaaatgatttctcagatgtatgaaaagttgtgtgatggaagtatagaagcaatgagcagaaatgcagtggaaaaagcgcggatatttgacattaaagttacagcacataagttgcacgagttatatgagatggaggagagaatataatgaaagtattgcagattttgaattactctgcaccctatagaggaaattttattgattcgttggatatgattgaaaataatgatattgcagaggtcgaaaacttctatttatttgctgatgaaacaaaaacaaagtcagcctcatggattgatagtatcaataaagataataagcatgtgttttacttaggagaaggcttttctaacaatgtgaagcggataagaaaagttgtaaaggattgcaatattgatgttgttcatatgcacttttggggaataagaatgcatacagcaatccttacttctttgtggaatatgggggggggaaggccggtattaataagacattttcataaccattccgattataatgagcatccactgaggaagatatatggaaatattttttatcgtagtgcgacaatgattggatgctctgaatctgtgacaaattcaataaaaagagatttccccaagattgatgtcagatgtgttaataatgcaatcagttttagtagattagatgagtatgaagtaataggactagatcagggaatatcggtaatgatgtttggagccgattttgagaggaaaggtgtagatataacatataaggcaatcaatgatttagttaacaaagggtatcaaattaatttgtacattgtttgttctattaatgaggatatatgcaaggataaattgaaaaaggttgcaggaacaaatatgctaccgaagtgggtgcattttttgccgccgcggcaggatattgcaacgtattatcgtgcagtggacatttttgtatcaccatccagagaagaaggacttgcctatgcgatacccgaggccgcctattgcgggtgcaacgtggtagcaacgaaaattggtggtcaattatattacgaaaagataccgggagtgatttttattccggccgaagatccagaggcattaagtaatgcgattctttctgtcgtaaagaaggaaaagaatcgagcacatgtcgaagactttctcgtaaaggaatttggtttaaaaaaatgggccaatgatgtgactgagatttaccttgaaaaaatgaaggagcgaagatgagcaaagttgcagttataatcataaactataatacatatcaaaaaacaaaaaagtgtatagatattctgcgcgaaaaaacaacggtggattatcatatctatttgttggacaatggttcaaaaaatgagtccctgcatgaactaaagagatattacgaagaagctgaagatgttacactaattgcatctgaggaaaatcttggttatgcacgagggaataacaagttgctacaacgagcgatgcaagatgaaagtcagtttgcagtcattatgaataacgacatattcttgatgaataatgcaattgacctgatgatagaggatttacaaaatgacaaagacatctcatttgtaggaccgcacatggtcggtacaaaaggagaaatacaacttacagcaaaacataagagcccagataggtggcagtatttgtgtcgcgaaacattgattgggcggatttttaagaaaaatcaagcagagtggttgaagtggcaggaacaacaagagacaaaacaagatgtttattggctatcgggtgcaatatttgcggcgcgtatgaaggactttgaaaaaatacatttttttgacccgtttacttttttgtattacgaggaatatattatcgcagaaaaatcgcaaaatgcacagttgaggttacagtacgaacctgatgcaaaggttttgcatcaacatggcggttcaacaaagcctggggtaaatcttttgacgcggacagaaaactttaaaagtgaattgtattttatgaggaaatatagacactggaaaaaatcgtaccaggtgttagttttcgtgattcgagtattggaaacctatatattttggagaaaagatccatcttgttggaaggcttggaaaagctatgtgaaatttggcgtgcaggaactaagaaaggagccataacaagatgagaataagaaaaattgattttatggagctcctttttctattgttggttttgacgggagaacactttttttatctggtgaatttgccaatcacagagatggatttggctgttattattgcggttgtaatgttttttgtgtatttactgtactataaaggcgttggattaccaaatacagataagccaacaaaaatacttctgactgcaattgctttgatggtagtatgttctgcagtccgttcgcagcagagttatggacagagcatccttatgggactgcgtccgcaaagatattaccttattttgctggcctacttcccgataaaaaatgtgatattgagccgcaaagggggatttaaatgggtgataaatgttatgctgggagttggaattgctgcggcaacgatttacagcattcaatatttagtctttccgtttaagtttctgatagtggactatgactatcggtttggccaagtgcggctacgctttaatgaagtgggaacactttttagcatgttttatgcgtattataagataatcaaacgtccttgttggaaatggggatttatatttgcgattcatctgttttattatattgctgtaatcaaaggaagatcggggattattgttctggcattggttctgacgattctgttgattcttttcaataggcaaaaatggaaagcggctgtttctatttttgcggtcgctgttgtgttgctttatgcaccgatccccatagttgatcaatatttagagggatttcgggaaggaatcgattcttatcaaagtcaaactgatgttcgatacaaaggacagcagttttatatacaaagtgttacagaagatatccctagtatgatatttggtaaaggatatgtgaacattcaaagttcatcggctgtgagaatcagtagggcaaaagatttttatattgttgataatggttattttggattagcgtatttttatggcttttttggggtcgcctgtaatattctaatgtgtttatatatttccatcagtacatataagttgcaaaggaaattggattttggaatcgagtgtggggttggtattggtatatacttgattgcagtatccatactcgtaccgtacatgttatattattacacttattgtttgttggcggtagaattggcactgattgacaaaatgaagcagctcgaaagaggaatgtgatatgacacagcttttgatttatttagtaatcggtggactttctttggcgggtataagatacagaaagacacgatcggtggaagcatggtttgaaaagcaaaatacagatcagctgcgaggaatgtgtgcgttgctgataatcgcccaccatatagctactcagaagttcgctgatggattttttcatcagttgggttacatctccgtgatttcaggatacctattggttggatacttttttttgatatcagggtatggattggagtatggggagacatatgcggcaaagcataagaaacactctttgctgcggcgtgtcgttacaatttgcattccatatataacgattagtttgctatattggatctacggtcaatatatggcggaacagattgctttttttgatattgtggcatcaaccctagaaggggatccgattgttaagtattcttggtattctgccgcaattattatcgtatatgttttctttgaaatttcaaaaatgaattcttcaaggaaatgtaatctatatgtgatgacactgctgttggtgggatatataatgtttggggtgtttagaaactactctgtatattggtataatgctgttcttattgtattggtaggcattttggttgcaagatataaagagcagatttattgttggattaaacattatgataaaaccagtgtgattgtaagccttatagccttgggagctggtacggtcttacagataaagtatggaaacagtgtaggagaagttgctaaggtgttgatccagcaggttacgctaatagcagctgtctatctgatgatgatggtggattacttctttagcctgaacagtatatttttgaagtgggttgcagcgttctcctatgaaatatacttgacacacgggtttgtaatgagtgtggtaaagcactttttggcagttgataccgctgggattgcttatgcaggaacagtaattgctataacaattttactttcctttgctgaacatttactaaataagaaagtgattcgggcattgaatcgtttgatattagcccaatgaggattttatatgaagatattatttatttcggctttttttccttatgagaatgtgagccatgcaggcggtaagacagtatattattacctaaattcgtttgctaaggatgatgaagtaactttattgacatttgttacaaaacaagactttaacaaattggatcatacatatccgtatcgtctagtaccggcaaagtacggatatacggtaaaagacaaagtgttgaggtttataatgagtaaggctacgaaatattggccgctccagaagtattgtggattctataatacatacgatgaatttctattaaaaaagaaattggctgaacttgcgagagaaaaatataagccggatatcattattttagaatggacacagtgtgtactgacaagagagttggttcacaactatttccctgacagcaaaattgtggcatctgaacatgacctgagtgtagttggttttcaacgtaaggtagaagctgcagaaaaaggcttcacggctaaaaagttagaagatttaaagaggttggaattgggagcgcttgctcaatgcgatatgacattttttcacagcagagaagatttaaaacgtgcaaaaaatatgatgccgcagtgtaaagataagttttcttcgattgttccatactatgatgactacagtacagttaaatggaaaccaacgacaaagaatattgtgttttttggcgcattgaatcgtgttgaaaacgtaaaaagcgcactttggttctatgaaaatgtattttgtaaattaaaagatacgtcgtggaaccttgttttgctcggatcacatccagacgaaaaactggttttcctaagtcaacaagacgaaagagtaatagttacaggatttgtaaaggatataagaccctggttgcaaaattgtgcatgcatgattgcacctctggttatgggagctggaataaaggttaaggtcttagaagcacttagtgcgggtgtaccgcttcttacaaatgaaataggaatggaaggaatcaatgctgaaaatgaaaaagaatattttcattgccagacagcagaagattatattcgtgtattagatgccttctttgatagtgcagataagctgaccaccatgtcgattgcagagaagaaatttgtaaaaagtaattttgataaagagatatcatatgaaaggtatcgagattctctcttacatatagcagggaaaaaataaaataatgaaagaaaaatcgttgaaattaaatatggcattaaatgctgtaaaaagtctgatgggaatcgtttttccgctgatttcgtttccttatgttgcaaaaacattaagtgtgacagacttgggtcagtacaatttcgcaagttcagttatcggatattttgcactcttcgcacaacttggaatatctagctatgctgttagagaaggagcgggaataagagacaatcaagaaaaactaaagaaattctgtggagaaatcctgtcaatcaacatgctcgtcactgcgattgtatatgttgttttctttatgtgtctgcttacggtgcctaaattccatggatacacggcgctgttgcttacatttagcgttcaaattatttttacaacgatcggtacggaatggatttttggaatttatgaggactatcttttcttaacaattcgtagcatagtagttcagatgttgtctattgtgcttttattcgtttttgtgagaaaacaaggtgacgttattccatatgcagtcgttacagttacggcaaatgttggtgcgaatgttgttaactgtgtctgcgctcaaaaaaagattcgatttggtttaagaaagtcactaaatctaagacatcatctgaagccaattctgattattttttcgacagcattagcgtgcacaatatatgtgaattcggacgttacagtgttgggattcatctgctccgattataatgtcggtctgtatagcgtttctactaaaatatataccgttttaaagacggtggcaacatccactttaatggtagctattccgaggctttcttattatattgctaacaatatgcagagtgaatataataaacagctaaaaacaatattacaaactgttattgttttgattgctccggtaacggttggcgttattatgcttagaagagaagtgatattgcttttggcagatgagtcgtacatgggagcaatagaatcacttgtaattttgtgcgcagcattaccggtctgtgtgttggcaacctttgttggacagtgcatattgatgccatttaaggatgaaaaaatcatttttaaggctacaatgattagtgcagcagttaatctaattctaaatcttatactaattcctttttttgcgcaaaatgcggctgcctttacgacattgcttgcggaaggaactgcgctaataattcaggcttattatgcacgaaaatatgtgaaattgtcaggaattttcaagacaatccgaaatacggctttaggtagtatagcaattgtgatttgttgtgttttgttgagtggagttcacttgtttgctgtgcgaattttagcggacattgttatatcagcaataacatatttggtgattttgatgctgctaaaagaggaaggaatagtgtttttattacgctggacaaggcaaagaaagagtgaagaaaaatgacgggatcgaaccggatcgaagaagtggatatatcaaaaggaataggaatggttctggttattacgggacatttgtgtgtaagtgcctcgttgcggaattttatttattcattccacatgccgttgttctttatcttgtctggtattgtttataatattgctagaacgagagctcgtaaagctatccagattaaaaagatcttgactaaatacattgagtggtctggaatatacttggtgtttgactatatcgtgagatatagtgttgaaggaacgcgaacgaaacatgagttgtggaatgaagttgtatatacaatttcattttatggtgtatccgtattatggtttttgagcgcacttactattggcttggcttttgttttgctcattggccaaaaaagcgagaaattttatttgctgtgtgggggggcgcttatttcatcggagcagtttgttcaaagttggtgttgctctctgaatttaaaggcgtaattgtttttgcagcggttgtaagaggcattgtagctttttcttggatttctcttggtattggtcttcagaaagtattcttaaaaatagttcatgaggatagaaaatcagtggttaaactagccttgatgtggggtgtgatttttattgtatcaaatgaggcgaagccgatagagtattctggtcttgaattgggaacaccgattatatcttttgtattaggtattatgggcagtatagccacactataccttgcaaagcttctaagcaaaatcgaaattctgaagcattttctaattgtttttggtcgaaattcgatttttataatggcaacacatcaatatttgcatatcaataaatttgtagaaatatgtgttggatttttaataaaaacgcaaacgataaggatggtttgcgaagtaatttttctttgcgcgatagaatatatactttgtgattgcatacaaagactccgcagaatacaaggcactttgtgccagccccctggtactaaaatgtaaatacaaaatgaacgaaatttgacccaaaagccgaatactgtcgaattattgcctgtgcttggcaaaataaaaccgtgtggatttccacacggtagctgctcggataatcacacaccgctacgaggtgagcagcaggcaacgatctatgattggcagagatgtgaagaatgaaaactatggtagaatcaatttgatagaaaaagtgagaaataacaatgaaaacaacattacttatcatggctgctggtatcggtagccgcttcggaacaggaatcaagcagttggagccggtggatgatgctggacatatcatcatggattactcaatccatgatgcgatagaggctggtttcaaccatgtagtatttatcatccgtaaggatatcgagaaagaattcaaagaggtcatcggtgaccgtatttcctctatttgtgctgctcataatgtaactgtggactatgctttccaggatattaacgatatcccgggaactctgccggaaggccggacaaagccgtgggggactggacaggccgtccttgcagcgaaaaatgtgattgatactccgttcattgtgatcaatgcagatgattactatggcaaagaaggtttcaaagccgtacatgaatatctggtgaatggtggaaagtcctgcatggcaggctttgtgctgaagaacacgctgtctgataatggcggtgtgacccgtggcatctgcaagatggatgatcagaacaatttgactgaggttgtggaaaccaagaacattgtaaagaccgcaactggagcagaagcagacggcgtggctgtggatgtaaattctctggtttctatgaacatgtggggattgactccggagtttctggatgtactggaggaaggcttcaaagagttctttgagaaagaagtgccgggcaatccgctgaaagcagagtatctgatccctatcttcatcggcgaactgctggagcagggaaagatgtcagtgaaggttctgaaaaccaatgatacatggtatggtatgacctaccatgaagatgtcgcagcagtaaagggcggtttcaaggagatgctggagaacggcgtgtataaggctgatttgttcagtgatctataaacgacgatgaaagaaactattgatttattcgggaagatcctcacaaacaccctgactgcgctatatgagccgtttggcttttcgcttcttctttcctttttggccatgtttttctatctgtatgcgtatgagcctaccgcagcaggcaaaggatggaagaacgccatagtgacttggtatcagaaatttaaagagagcgtgttctttcggaagatgttcttactggttttcgtgacatcgatgatcttgttccgaacgctgctgaatcggaacctgtggctaaatcctttgtcaaatgtcatgggtggctggggcatctgggagaccgtgaacggcgagcagaaacttacaactgagtgcattgagaacgtgatcatgatggtgccgttcaccagcatggttatatggacatttcaagagaaagtgggcagtagctggaagaagatactgtggtatagcggaaagatagcgttcattttttcgataagcattgaggtgctacagctgtttttaaggctcggtacattccaactgtctgatttgttctataatacagtcggtggaatgattggcggtttaatgtactacagaattacgaaggcaaaaaagcatctgtaaaagaatagaattatgtggaatattgggagcgttagctcccgatgttgctcggataatcacacacctcttcgtggtgagcagcaggcaacgatctatgatcggcagagatgtgataacgaataaatgtagaaaaacaaataggtgctatcattatggacgatattttgaaacttgcaaaggattattcgaaagaacgtcatttagaccttctgccgcgttgtaataataatattttggacaaacttgattatatatatgatgaaaactgggaaaatcaaggcgtaccttatccatacgaaatattaacgtatctgtttgatagctattatgttttacctgagagaccggatttggcagcgttgttttgttggcaggcaattaatcattcgtattacgttcagcaattaagcgataacaatgttggtttttgtcaggacacaaagggtattgaacttattcgtgatgcgattttaggtgactggaataataaatataaagcaattttagagcctttcttgaaaagaatgccagataaaacatttcactatgtagcatcgtatatgcttaaagggtatgcaatggaaaagaaaggcatagcagaaaaatatagggctagttcgtataaaacgttaaaacgaaaaattccatcgctattagatattttggataatgcgtatggaaagtcatactgtaagatttccaatccgacgcttgttaataatgaagtagatctcggaattaccaatgcaaacaaaggaaagagtcgagccataacacatagttttggaacaaaattaaaagcactcatgctaggagaagaagttgagattacattctgtgatgtgcagggaacaaagaaaacatacaaattcacagaagtagaaaggatgtcgttcgttctttttggtattctctatgcttctcgttgcaataatttccatggtaatgttgcggctcgaatgaacagcatcaatgcaaacaaagatacatttaaaatgtatacggatatgtttttgacagagtatattattttggcaatccatctgaatagccaaggtgctttatcggatgtggtactgaataaggttaagaaaaatgccaatttgatgatatgatagatattgctcgtagactcgcagagtgatatactttagttattataattggaaagaggtttgtatcctatgcccagaacaaaaggtagcaagaataagcccaaaactgtgactgctgatttcgcaacgcagattgcagaaaagcagtccgcaaaggaagctctcacagcggaaatcgcatccatcaccgcaaacattgacactttgaaggctgatctgaaagtgaagaaggctgctttgaagaaagtcgaaaaagaagtggaaatgctggaagcaaaaaaggcaaaggcagatgccaaagctgcagaagatgcgaaaaaggcagaagcggaatccgttctgaaaaagctgcttgcccaaggcatgagtgccgatgaaattctcgcaaaactgaaataacaggaaaaaacccgtgatggacaggcataacgcactgttcatcacgggttttagggttataagaacataagtttatccagcggccacatcaaactgaaaatgtgccggaaggttgaactgtttgataaacgcatggtgctgggcgtgatagtgccttagatcatatcccagatgatgcagctcaagaagtttcaccatcactaggttgagatgaattcgtttcgctacggaaatttgcgccgcgtccaacccacgctttgtcatttgatagacttcatcactgtccagcatcaggtgggatgtgaaagcgttatgctcgtaaagaaggatgtgcttgtccttaatggtcagaaacttgtccagggtatgcaagtccatgagcagctgatgctccagataatgtcccagcgcatagccgcacaccatctgcttagtctgtttgtccagctggcgattgataagaatcaatggcttatcaaaatagagcgaaagtaaacccaacatatctttaatgcgggatgtttcactgatgtccaggctgcaactgcgcgcgatttgtttgatgttgcgagttccggcattttggacaagttcgttggcggcttggtgaataaacgcagaatccataatgtgatctccttccggggatggcatagtgaatggaacggtggtttacaggttcattattcgttccttttctcgtttttgttctcggtacttaaaataggctttgtgcatttcatacatgatgccgtccatatcctgcggggtcaactctccgctggcaaatagctcagtaagctcaaatgcgagatgctgggcttctattttgccctttttcccgtaggcttcggcggcacgttcgataaataaagactgatccggctgtaaataggtcaaaggtacatggaatatatcagccatcttttcgagcatttcaacactgcgagggtagcggccatcacgctcccatccgatgatcgttcgtttgttgatacccagacattgtgccaattcgtcctgtgttaaagaatgtttctttcgtagatcgcgaactttctctccaaatttcatgtttgcaacctttctatggcgtagttatcgtgctgtaacaatgtgcaacgggatttgtaaatattcaatctggaagatgcaacgaattttcacattttcctcttgacacggcgacacgacttgcttataatatatgctatattctatcatcttttggattattataccgtaaaaatcgtaaatatgcaagccgaaaaaggtgaaaaaagagcggaagttcaaaaggtgaaattgaataaaaaaagaaacttaaaccaacacaaaggaggccgtgagaagatgagcaacggagaacatgaaatccgcaccccaaaggggctgcggattgggaatcgcagtgtcgttgatggaaagaatatgcttcagatcaagcgtggtgactgtgaagattatatttctgctgaatctctggtggagtgtattcacggccttcccgtgaagagtatcgaatttttcacagcagagaaccatcggaaagaagcctgaagcagagtgcttcatcggacactgaaagcgcagaggcggaatcttaggcggcacctggttagccgaccagctccatcagacgttcttttgggtctacaatataatatctgtttgttagagcgataccgtagcaatatgtgatataggccggaacagaatgagcgaatgcagcgcagtagtgcgcctgtaagtagttcatcctgttccggcttttttatttttcaaaattttttgaaaaactgtattccaaaatggctttgtggattcctattagtatagggacttcaaacaaatagaaagcagcaagaggaatcttagattcccgttcaaaaaaaacgggtgaatctgagacgatttttgctgcttttttcagttcacccgaagccgaaaggcagaaaggtggacaaaatgcttacattgaaaaaggtcaaggaactggtaggagcaccttcccatgcaaagcgcactccttctcccaagatgctttacgaggaaggtatcgtgctgcttcgcagggaatttgatcagggcagtcatttaacggtctacaacagcggttatgttttgttttctgcagggaagcgaaacaccgtgttccataatcattataaccactcacagaagcacaaatcattcaagaatcactatctgtgcaaaaagcacaaatggaggtacacatggaaaaggacaaaaaagtaactgctttatactgccgactgt

SEQ ID NO: 540 - DNA, 12598 bp, unidentified
  source 1..12598: mol_type = unassigned DNA
ttacttattgcctccttttttgatttcaccaaggtagaacgcctttgccagactcatcatctgggtaacagggcgctttgccgggcagacgaaagagcagctgccgcagttgaagcagtagtctgcatgcagcttgctcagctcctgcacatcgcgtgcagcgtatgcctgattgacctccacaggctccagacccatggggcagtactccacgcagcggccgcagcggatgcagggattcaccggtgcaggctctgcagcggccttgctcaggaagatcaggccggaggtggtcttggtggtggggtagctcaggttctccacagcggggcccatcatggcaccgccggcaaccactttgcccagctcgcccttgacacccgcaaaatcgatgatgtcctgataggcagtgcccacggggacaacgatgttctggggctttgcgcaggcgtcgccgtccacggtgatggtgcgctcgaccaccggcataccggtagccagatacttgccaagggtggaaacgctggtcacgttcatgacgatggccccggcatctgcgggcagaccgccgtggggcacttcgcggcccagacacttttcaataaggatcagctctgcgccggtgccgtagacactgggcaggggcttgacctcgatggtgctgtcgccattggtctttttgcacagcaggtcgatgcactcgggcttgttgttctcaatgccgatgacgcacttcgggatgccggtgtactgcaacacggccttgatgccgcggatgatatcatcgctgcagttcagcatctcctgcgtatcgctggtcagccacacttcacactcggaagcgttgatcagcagggtatccacctgctgcttgggctgcagctttacgtcggtcgggaagcctgcgccgcccagaccgaccagaccgcactcacgcacagccttgaggaagctggccttatcggtcacttccggtgccttgacagccgggtccacggtctgtttgccatcggtcttgatgacgacagagtcgcacatgcggccattggacagacggaagggctccactgcggcaaccgtgccggagacactggagtggatgtttgcagagacgaagccgccagcctcgccgatctttgtaccaacgaacacctcgtcgccctttttgaccagagcttttgcgggagcgccgatgtgctggctcatgaggatgcgtacctgcgcgggcagaggcatcgggatcggtttgcttgcagcagttgccttgtcatgcggcgtatgcgcgccaagcgccgcacgtttcagcttgttcaacatggaattcaaatcccccattctgcttgaattgccgcccccacgcccatgcaggcgcactggtacagggacagcagctgcttaacatgtttattgtatcattttggcgtgggaagtcaacgacaatggcacaaaaatgatgtgttttcctgaactttcttttcattttttcgtggttatatacaactaaccaccgtatttttcttcctgtatccggtgtttgcctttgcagacgaaatatggtatactattattaacattcacttgcggaacgtcccccgctccgcgcaagacttttccaaggaggcttcaaaccatgaaagttctcaaagtgctgctcgcattgctcaccacgctggccgttgccctgaccgccgccctgctgcttgttcaggataaaaacgcgccccgctatatccagatctacgaaaacgagcagtaacacccgtcttgcacaaaaagcatcccccagcctgagcggcacgccgcccgggctgggggatttgtgttttgcggggcaaaagggcagcaaaaagccccggcacgcggaggggttctccgtgtgccggggtgctgcgccgaagcacttttttcttaaaaggtgttatgccgcgtggttggcataaaggatcacaacgtattccttgccgccgatcttgcccattgccacgccgacgtcaacattgtcgcccagctgctcgatcgttccgatcttcacggctctgttgggtccatcgttcgtcgtataagggttgatggccttcaccatccactgcagctgaatgtactccataagcgctccgctactcttgaactgaacattcggagctgcattgaggatatacgcatcttttgtggtatcaatgccgaccgccttcacgacatcttcggctgtcaggatcgtttttgcatcctcgcccttgtgcgcgtcctgcccggcaaccttgtctgcttcctgcaccagctttgccgccaatgcatccagctccttgctgtgggttgcggtactgccggccacggtcatctgatctattgccagcttcagcagttcatccttcagcgaagcgctgctgccgcagcccaccatcgtcagcgccagaaccgccgccaatgcagcggctgccagtttcttgaacaatttcatggttttgttcctcctttatgctcctatcagcctacgagcatcctgctcttagagcctcggctgtcagttcaccaacacgacaatataatctttgccattgatcttacccatggcaagacccaaattgctcaatttctccagctcgccgctgccgatttgcttaccattcgtcatcagcatctctgcgatcagcactgctttctgtttatttgcggtgttgctgaccagcttatagttttcagcagccgacacaatgtaagtttcctgtgcagcatcgatccccgcagcctttacgaccttttcatcggtgagcagatccagaaccgttttgcctttattatcaggctttgcagcagccttgtctgcctctgccaccagctttgccgccagcgcatccagctcttttgagtatgtgatctcatcgccctgcattgcaatgaaatctgcgaggacatttttgatctgatccgtgaggctgttgcgtccgccacagcctaccatggtcagcgccagaacagctgccagcatagccgctgccagttttttgaagagtttcattttttgttcctcctttgtcagaaaggtatctcacagcccagaccgaacctctccggcctgttttctccattttaccatccccctatagggtctcgtcaattcgtagaaaaaacaaaaaacaagtccgctttttggcacaggtgcgcatggttttttgagccgtgccgtgttttgctgccttaaatggtgctgtgcggtgcggccgcccgcgaaaagaccctgcgacgagtaaaaccccgccggtatttctccggcggggtcgcataaaatattgctctcagtaatccttttcgcagcccagcaggtatttcatgtgctcaaaggtgcggtcgtgcccaaggtcgcgcaccattttcagcagctcttccagcagggcacgggtctccgggtggagcaggtagtgggtcttgctgcgctcgtagtattccaacggggaagcatcggtgtacttgtcgcccagatagatctggcttgcggccacgcggtcgcacaccatttcgcacacatagcgcaggggcatcttcatgccggcaaggcccaccttccgggtgctgtagtcgatccagtattccagatggtgcttgttgcggcccttgtggtgcagccacgcggaggaatagccccgcgccagacgttccgcttcgttggggctgtggtcaccctgataatagatgcagcccggaatgaactcggtagggctgtacttgctcaggtcgtgggcaaggccctgctcatagagcccgcaggcaaagcagtatttcatcaccagcagcttgtgccgggtgatggtctcaaaatggcccttgatgttcatgctgttatttcctccactgcaccgtgatacgtccctctttcagcccgcgcagatcattgctttcggaaaaatcctcccggtccatggtcaggttggggttgtagtaggggtcgtgcaggatgttcgccttgccgtgcacggcatacagccgctgctgctcggcggcaaagcgccgggccttcactgggtctttttcgtcgccgccgcggctcttgctctcgtaatgggtcagctgagcatagggtgtccacgcaatgcggcagcctgcatcccgcacccgcaggcagaaatccacatcgttgaaggccaccgcaaaggcttcgtccagaccgcccacttcgtcccacacgctggtctttaccagcaggcaggcaccggtgacggcggaaaagtcctgcaccgttgcagcgcggaacatgtagccgctgccgcccgccttgcggtatttgtggctgtggcccgcgtagccgccaaggccggtcacaacgcccgcatgctgcaacgtctcgtccgggtaaagcagctctgcgccgcagatggccgcgccgccggggtgagcacactgccgcaaaagctccgtgagccaatccgcattgcgcacctccacgtcgttgttcagcagcagcagataatccccgctggcgtactgtcggccaaagttgttgatgccggaaaagttgaagcccttctgcgggtagttgaccacctgcaggccgtcgtagcgctgccgggcttccttataataggtaaaggtggccgggtcggtggagttgttctcgatgacgataacctcaaagttctcccagctggttttggtccagatgctgtgcaggcacttttccagatcgtcggtgtggtccttattggggatgaggatgcttaccttcgggtcgcccacgatatcccacttcacccggtaggtactggggaacaggccatcctccacggtgccggtgcgtccggtgcgggccagatggtcggccagcgcctttttggctgctgccgccacatagggcttggcatcggtgccgccggaggtggagcctgcgtgcacccgccagtagtacagcacctgcggtacatgggccgcgccgccagtcttttccacaaggcgcaggaacaggtcgtggtcctgactgccgtcgcactccggccgctccccgccgatctcatcccacagcgccttttggaacaccgccaagtggcagatgtagttgcagcacagcaggtagtccggggcgtaatccggcttgaagtgggccaccatgggccgctggatgctcttggaaaagagtgcttcatcgctgtagaggaagccgtccggctcgccctgcgcccgcagctgcagaatggctttgcccatggtgtacagggcgtggggcgcaaggatatcatcgtggtcggcaagggccagatattcccctgtggcaagctctgccgcagcattggtgttggccgcaatgcctttgttttcgatctttttgtatacgatacgttgatattttgtctgatattcctccacgatgcgcttcacatcggcatgttctgcatcggaagcatccgcaaggcagagctgaccgttgggggccgtctggttcacaaaggaatccagaaattcccgcaggtattttcccggtgtattatacagcggggtcaggatgctgatggtgggcaggccgcagtctgccgccgttttgccggccatttcggcccgctgggcttccagcacctttttggcgggcagatagcgggcacgcttgccaaagcagcggcgcttgacaaagcccgcgccccgtttgagcatggtgggcaggccctcgtccctcgtcagctgcaccgcatagcctgccagttctctggcacgtttcagtcgtacattcatatcaggcctcgccgcgctgcgttgccttgtaggccgcgcagaccgttgccgtatcgccattcattttcaggtggccgtggctcagccatgccaccttgctgcacatgcgctcgatctgctcaatggagtgagacaccagaatgaccgtggtgccgcccgccatcagctcctgcatccgcttttcgcacttctgctggaacaggaaatcgcccaccgaaagcacctcgtccgcaatgaggatatcgggcttggtgatggtggcaatggcaaagccgatgcgggccaccatgccggaggagtagttcttgagcggcacatccagaaagttctgcagctcgctgaactccacgatctcatcaaacttttcgtccagatacttgggcgagaagcccagcaccgtgccgttcaggtagatgttctcgcgggcagtcaggtccatatcaaagcccgcgcccagctcgatgagcggggcgatggagccgcggaccgtcaccttgcccttgctgggcttgtacacgcccgcaatggtcttgagcagggtggacttgcccgagccgttcaggcccacaaggccatagaaatcgccgggcatgatgtccagactcacgtccttcagggcgtagaattcatcgtactgcaggcggccctgcaccatggcaaggaagtattccttcaggctctcatgcttttccttggagaggttgaagcacatggaaacattgtccactttgatgatcggttccattgttcttcctccttaaatatgcagcacaaagcggtcctgcgttttgcggaacacccacacgcccaccagcatggagagcacggcgcagcagccgcacaccgcgaacatgttgaaatccagcgggatgccccacatcacggtacggcggaagcctgtgatgtaccagtacatggggttcagcttgatgatctgctgcatgttgaacccgccaatggaaaaggtcatctgggtggggtcgtagaagatggcggaaaaatacagcaatgcggtgatgaacacgctccagatgtgcatgatatcccggaagaacacggtagccgctgccagaagcaggcccacgcccagactgaagaagaacagcgtcaccagcgggtagaccgcctcgatgagggtcaggtggaagggtgcaccggtaaagatcatgaccagcagcagcgccacaaagctgaacacgcagttcaccatggcaaagcagcacttttccagcgggaagatatacttggggatatacacctttttgagcaggggcgcagcgcccagcacactgctcatgccggtggaggtggcctcgttgaagaagttgaacagcagctggccgcacatcaggaacacggcaaagttgtcgatgccgctgccgcgcatgtccatcagactgctgaacacggcccagtacacaaggcacatgagcagcgggttcagaacgctccacaccacgcccagcacgctgcggcggtatttgagcttgaagtcacggctgaccagattccacagcaggtagcggtagcaccagaagccgttccacattgctttgaattttgccacaggcgatcaccacttttcaaaatattcaaacttctgtgcagcaaagggctcgtgcagcttgtcctttgcgctggtcttgtgctcgcagccgcagtccggccactgcacgttcacggtggggtcatcgtaggggatgccgccctcgctggtggggtcgtacacatcggtgcacttgtagcagaactctgccacatcgctcagcaccagaaaaccgtgtgcgaagccctccgggatatagaacatcttcttgttctcctcggaaagggtcacgcccacccacttaccgaaggtggcgctgtgggggcggcaatccacggccacatcaaacacctcgcccttggtcacgcgcaccagcttgccctgcgtgtgctccttctggaagtgcaggccgcgcagcacgccgcgggtggagcggctctggttgtcctgcacgaattccttatcgatgccggcttcggcaaactgatccttctgataggtctccataaaataaccgcggtcgtcgccgaacacctgcggctcaatgaccacaacaccgggaatctcggtctgagtaaacgtaaacttgcccatattttgtacctctctttttgtgaagcatgtttgttttatctggaaaagtctgttcgacgcaggcttttgcgcttatttgccgcggcgggtctgtccctgttccgtgcgcgttctgcggcgtttcttccgccaagtgatgaaccgcaccaccagaaaagtcaccagcgctgccgctgcggtggaccccagcgagatgcccagcagccagaatgcatggctttggggctttaccgccttggccgcttccaactcctgaccggtgctgttctccagcagttcaggcaggccggaaatttccgcatccacacgcacgctggtgctctcctgcttttcgccgccgtggacggtgtacacagcgtacacctccgggtcggagccaaggacatagctttccggcagttccagcgtcacctccacatcgtcggcagtcaggccgttggccagcagcagccgcacgccggggtcggagacggtcacggtgccaaggctcccgccgccgcccaccacgctcagcggtgctgtgatgccctgcgcgggcaggtcggtgtagccggtaaaggtgctgaacgcataatccagcagggtgcgcatatcgttgtatttatcagtgctcagctcgctctgcatggtcacgcagatgagccggacgccgttctgctccgccagacaggcgtagctgtagcgggccgtgttggtatagccgagcttggaacccagaatggacgagatgtagtaccggctggagccaatgcgcattttgtcctgctgggaaaagtagcgggtcacgggctggatgttggtggggtccatggtgtacatctcattgcgggtgaacacctgctcaaagcccggctgctccagtgcccagcgcaggatctgcgccatatcgtagcagctggtgtagtggtcctcgtcgctgatgccgtgagggtttgcaaagtgggtgtgcgcaaggcccagctcttctacccgcgcattcatctttgccacgccgtccgcgatggtgccctctcccacatattcggccaacaggttcgcgccgtcgttggcactggccatctgggtggcgtacagtgcatcggtcaggggcacttcttcgccctcgcgcagggcaatgtgactggaatcggtgcccgccagcgagtaaacatcctcgtgggtcacggtgagctttatatcatcccagttcccctgcgccttttcgcaggcaaggcccagcgtcatcaccttggtgatggatgccgggtgcagctcttcgttcatattctgctgtgccagcacaaggccggtgtctgcatcgatgatgcagtaagcgcgggtggaaccaagggcagggccagccgccgctgcccccggcacgaacacgcagatcataagcagcacaacgcacagcgccgctgtcagttttttcatctggtttttctccattgagcgtttttctgcccgtcgtactgcaccggcaaagcatcagataatagtataccacactttaccccggctgaaaagccattcagacgttgttttgcagcagaacgggctgcagctgccgcccggtcagcgcagcgtccagtgcagcgggcagacgggcaaagtccgctttcaggctgttgggcttgtgggtggggtcatcctgcccgtagggcacaaaataatagtgcttgcgctggtagagccgggccatgttctcccacgatgcgcccaggccgtcgtttgtggaaacgcccaccagaaccgggcaccccacccgcagcaggctctttgccgccagcgtcaccggcgtatcggaaagccccgccgcaagccgtgccagcgtggccccggtgcagggcgcgatcaccagtgcactgaccagctttttagggccaagcggctccacggcctgcaatgtgtccagcactgcatggctggtaagggcttccagccgttcctgccaaaactgcccggtgccaaagcgggtatcctgctttgcggcaaagctcataatgggcagcagctcccagccctgttctgtcagctgctgcgctgccgcaagcgccgcttccagtgtgcagaagctgccgcacaccgcaaatgcaatgcgtccttttttctgcgtgctcatgtgtgttcctcccgctcccgcaaaatggtcagcacggtgcgtgccaccgcttccccagccgtgtccggtgcacaggcggcgggcaggctgagcgcatggatggccttgcagcccagccgctgcgccgcagcaaagtcggtgccgccgggctttgatgccagatctacgatcaggctgccgggccgcagagccgccagcaccggctcggtcagcaccggggccgggatggtgttcaccaccgtatcaaaggccggagccagcgcggccagccgggcaagctctgcaccccgcagaccaaggctctcggccagcgcacgctgttcggcgcgccgggcacaaacagtcacatttacccccagtgccgccagccgcgcccccagcgcctgccccaccgggccaaagcccagcagcagaaggtttgtgccccacagggtacgggtgcgctcggccagcaggatgccaatgcagccctccgccgtagggatggcattgtacaccgtcagctccggtcgggcaaagtaatccaccagctccacgccagcttcctgtgcgatggtctttgcctgaactgagagcctgccgcccagtgccaccgcgccgggttttgcagcccgcagcagctctgccagcggggtgcgggccgcatccagcggcagaggcagtaggatataatctgccagtgcaacctgttcggctccgcccaccgcataacctgcccgttccagcacccggcctgccgccgcctgccgggcatcggtgcccaccaccgcaaacagctttttcgcttccatgccgcatccccctttgcctgctcgtgggccatcctatgcaggagaaatatttgttgtgaaaaaactcctccagctttcgccggaggagttttttatcatgattatagaatgcgccgccctgacatccggcacatcttttattttacgaactttgccacagcacgggctacgatgccgcccagaatgccggagacaaggaactcggccacgccctgcacgccgaccagcagcaccacgaacatgaaggggttcgcagcacccttgacggacacgaggttctgcacgtagtcacagccgtagaaggccagcacgatccagcccatgaagaacaccgtgttcaggaacggggcgctcatggcgctgacgatgtagctccatgtgccgggcttgtcaaagcgcttcaggctgctgaagatcaggccgcagcacaggcccatcagcacgcgcatacccacgcacaggataaaggtgttcacagggcttacctgaaacagcgcacccgtcatagcggaagcaccggtgatggcatcgtagaagctcactgcgccgaacacaccgcccagcaatgcgcccacagcggggcccatggtgatggcacccactgcaatgggaagggtcaggaagctcatgtacagcgggcccacaggcacactgcccagacccaccatcttcatgaccagctcaatggcaaccagcagcgccacacgggtaagagttttcgtatttttcatattcagttttcctcctgctgccgttccgccctatacgtcggatacggcgcaaacctgcccgctctatgcgggttttaaagtaaatattcaaaccatttggagcgcgtttttgtcagggcgtgttccaatgggaaaagctttttcagtggtcgcacgggaagcggatgcccgcattgcggcgggccaccgtgagcacacggctcaccgcgatggtggtatcctgcatccggccgcacagctcctgatctccgctctccagcgcacgggcaaaggcttcaaactctgccgcctgccggggcctgccgccattcaggttatagtgctcttccttgccctcgttagggtggaaggtgatgccgccgcagcagttggcggtggacttctgcaggatatagcccttcgtgccctgaatgatgtaccgggccggggccgcgcagtccttggcggcgatgctcacggccttgaagccgctgtaatccatggtcaggatgccgctggtgtcgatgccgcgctccatgttggcggtatacttggcctgattcggctccccgaacaggcccacgatgtaacttacattatatacgccaagatccatcagggcaccgccggcacaggccgggtcaaaggcaggctgtacatcgcctgcacagaaggcatcgtaccggctggaatactggctgaaattgcactgtaccagcttcacggtgccaatgcggggcagcagctcccggatctttgcgtagttttcaaggtactgggtggtgatggcttcaaacaggaacacctttttgtgccgtgccagatttaccagttcttcagtctgggccgccgtgggtgccagcggcttttccacaataacatgtttgcctgcttccagcgccacgcgggcatagcgcacatgctgcaggttcggcactgcaatgtacaccacatccacccactgcaacagttccagaaaattggtggtgtgctgcggcacgccgtactggccgcaaaggctctgagccagctcggcactgcgctcggtgctgcagatggcctgcaccgtaaaaggcgtgtgctctgcaagccatggcaaaaattcccgcacgatcttgcccgtgccaagaatgcctaatttcat

SEQ ID NO: 541 - DNA, 9573 bp, unidentified
  source 1..9573: mol_type = unassigned DNA
atgaaagagtgttgggtcaccgagccgctccactttgagatgcgcgagactgagatccctgaaccgaaggacaacgaagtccagatcaagatgatggctgctggtgtctgcggcagcgacatccatatttataagggcgagaaccccaactcccgctacccgctgatccccggccacgagaatgttggtctggtcaccaaggttggcgcagactgcaaaaacatcaaggtgggcgaccacgtcgtgattgactacgtgattcgctgcggcgagtgctaccagtgcaagcatggccgcggcaatgtctgcgagcacgttctggtgcgcggcagcggcaccaacggcggctggcgtgaatactggtgcgtcgaagagccttacgtctacaagatcgacgacagcattccctggaaagatgccgctctgatcgagccgctgaccatcggcgagcacagcaccagccgtgcaggcgtgtgcgaggacgatgtggtgttcattctgggcaccggcaccatcggcaccatcattgcacaggcctgcaagctcaagggtgctaaaaccgtcatctgctgcgacatcagcgacagtagtctggagcgcagcaagcagttcggtgccgattacaccgtgaacagcaaaacgcaggacatcgttgccgaagtgcagaagatcaccaacggccacggctgcaccgtcgcattcgactccgcctgcttccccggcagcctgaccatgatcatgcagcccggcatcgtgtgcaacgcaggccgtgtggtccccatgggcttctgcaccgtgcccgaaaagatcactcagcagatgatcaatggccgtgagctgaccatctgcggcacccgcatgagcctgaaccagtgggtccccactgcacagaagatggccgagggcaagtaccacatggaaggtcttgcaaccaccttcgtcaagttcagcgagatcgaaaaggtcttcgacaacatcgttcatccggacccggccgtcaagaagaccgttatcctgttcgacggcgcagaggactgaccctctggccctgatataaacacgtacattataaaatagaaggagatcattattatggctgctcttactaagtttgatattgccggcaagcatgcgatcgttaccggcggcgcacagggtctgtcccgcggcatggccgaaggtctgctggaggcaggctgcaaggtcgtcatcatcgatgtccagaaggaaaaagtggaaaaggtctgcgaggagtaccgcgccaagggtctggaagcctactctgtcatcggcaatctggctgaccgtgaggacctgaaccgcgccttcgacgaagcactgcagattttggacggtcgtctggacgttctggtccccgctgcaggcatccagcgccgctatctgcccgaggagttccccgcagagcagtgggatctggtcatgaagatcaatctggaccacgtctggttcatgatccagcgttctctgcaggtcatgctcaagcagcccactggcggcaagatcatcaccatcggctccatggcttcctacttcggctgcaccactgtgcctgcctacaccgcaaccaagggcgctgttgctcagctgaccaagagcgttgctgttgactgcgccggccgcggcatcaacatcaactgcatctgcccgggctacatggacaccgagatgtgcgccaacatgacgcaggagcgcaaggacgagtgcaccaagcgcatccccgctggccgctggggcctgcccgaggatatgaagggtcccgtcgtcttcctggcttccgctgcatccgactacctgaacggtgccctgatccccgttgacggcggctatctggtcaagtaatcaacacataaaaagggaggaaccctgtcatggcccctaccatacgcgatattaaagtgatctgcaccgcccccgagggcatcaatctggtggtggtgaaggtggagaccagcgagccgggcctgtacggtctgggctgcgccaccttcgcttaccgccacctgaccgtgcagcatctcattgagacctatctgcgtccgctgctgatcggcaaggatgtgcgcaacatctccgacctgtggcagctgatgcaccagaacgcctactggcgctgcggccccatcgtcaacaatgccatctccggtgtggatatggccctgtgggacatcaagggcaaaatggccaacatgcctgtgtacgacctgttcggcggcaaaatgcgcgccggtgttccggtgtaccgccatgtggacggtgccaatgtggacgagatctgcgagaacatcgagaagtatcgttccatcggtgtcaagcacatccgctgccagtgcggcggctacggcggcggcggctttggccctgctccggagtgggcagccaagggcgcagagccgggcgtgtatctggacagcaagaagtatatgcgcgacaccctgaagctgttcgacggcatccgtgccaaggaaggcttcgacattgatctggtgcacgatgtgcacgagcgcatccaccccaccgaggctgtcacctttgtcaaggagatggagccttacaagctgttcttcatggaggacgttgtgcctctggagcaggtggaatggctggataagatcaagcagaccagcgtgaccccgctgagccagggcgagctgttcaacaaccctgccgagtacaagaagctggtgcagaaccgcagcatcgactacatgcgcgtgcatctgagccaggtgggcggcatcaccccggcccgcaagctgcagatgttctgcgagcagtatggtgtgcgcatctgctggcacggccccggcgacatgagcccgctggcccatgcagccaacatccacatcgatctggccgctcagaatctgggcctgcaggagtggagcggcatcgaaccgcccaacttcgtcatccagaagctgaaggataaccacggcgctctgctggaagtgttccccggtatgcccgagtacggcaacgacggctttgtttacgccaacgacaagcccggtctcggcgtagacctgaatgagaaggaggccgcaaagtatccctgtgagaatactgtgaccacctggacccagacccgcaaccgcgacggcagcctgcagactccgtaatttgcaataatctttgacactgtacgatccctgacggagaaacacggctggaatcgtacagtgttttttgttctcaaaggagcattgctatgaagatcacaaaacttcagacatggctggtgcgtccccgctgggcttttattgagatcagcaccgatgcaggcatttccggctggggcgagccggtgctggaaggccgcgccgccaccgtatgcgagtgcatccatgagatggagccgtacctcattggtgccgaccccatgaagatcgaagacctgtggactgtgctgttccgcggcggcttctaccgcggcggcggcatcctgatgagcgccatctccggcatcgatcaggccctgtgggatatcaagggcaaatactgcaatgtgccggtctggcagctgatgggcggcagctgccgcgataagatgcgggtgtacagctgggtgggcggcgaccgcccagccgatgtgggccgcgctgcgctggaaaagaaacagcagggcttcaccgccatcaagatgaacggcaccgacgagctgcagtttctggacagctacgccaagatcgatgccctgctggagcgcgtagccagcgtgcgtgagagctgcggcaaggattttggcattgccattgattttcacggccgggtgcacaagcccatggcaaagatcgtggccaaaaagctggaagagttcgaccccatgttcattgaggaacccgttctctgcgataacatggagtatttccccgagattgcggcggcctgcaacatccccattgctaccggtgaacgcctgttcaccaagtacgatttcaagcatctgctggccattggcggcgtggacatcgtgcagccggacctttcccatgccggtggcctgaccgagtgcaagaagatcgccgccatggccgaagcccacgatgtggcccttgctccccactgcccgcttggcccggtggcccttgccagctgcctgaatctggatgccacctgctacaacgcggccattcaggagcaaagcatcggcatccactacaacgagggccgcagcgtgctggactatgcgctgaaccccgaggatttcaagttcgtgaacggctttgtcagcctgccccagaagcccggccttggcgtagaggtgaacaaggctctggtggaggaagagggccaaaccccgcatagctggaagaacccggtttggaggcatgaggacgggagcgtggcagaatggtaaacatgatgaaagcactggtgttcaccgcaccgcatacctttgaataccaggatgttccccgccctgaaccggcaccggacgaggtgctggtggaggtaaaggcctgcgccatctgtggcagcgatgtgcacggcagcagcggtgagaacgggcggcgcatcccgccgctggtcatgggccacgaagccagcggcaccattgcgcagctgggcgaagccgtgcagagctgggccgtgggcgaccgcgtcacctttgattccaccgaatactgcggctgctgctggttctgcacccacgggatgcacaacctctgcgcacagcgccgcatcgtaggcgttgcctgcaccgagtaccgcaaaaatggtgccatggcccagtacatcgccgtaaaggcccgcactttgtatgccctgccgcccaccgtcagctttgaacagggctgccttgtggaaccgtttgccgtgggaatgcacgccgtgctgcgcagcggccttgccgccgggcagaccgctgccgtgatcggtgacggcaccattggcctgatgaccctgattgccgcaaaaagtcagggcgcacaggtctgcataagcggccaccacgcccggcccatgcagctggccgcacagctgggtgcactggactgcgctcagctgccgcagctcaccgcagagcgcggtgccgatgtggtgtacgatgccgtcggttcccaaagctcctttacacaggccatggagctggtgcgcaagggcggacgcatcatggtcattggcaaccacgcccggaccatcgacttcccgctgcagcgctgcatcaccgagcagatcgatgtgcagttcagctattcctccgccggggagtacccggtctgcctgcaggccattgccgagggccgcgccggcctgaccggcctgtggcagagctttccgctggccgagggtgcgcaggtgttcgaccgccttgtgcaccgggacgaaagcctgaccaaagccgtcctgatcccgtgagcagttgtctgcatacaagtttttttctgccagttttcgctgattttgatttacttttgcaacatcctatgatatagttagaaaaagttgtaatacaaagaggtgttccactatggccgataagggcagcgtcaccggaaagattgcccactatatccgcaaaaatatccgcaacggcaactggaccgtgggcgagaagattcccagtgaaaaccagctgtgcgaagagctgggggtcagccgtgtgtccgtgcgcagcgccctgcagcagttcattgcgctgggcattctggaaagcgtgcacggcaagggcaccttcctgatctcggacgatctttcggccttctattccaatgtggaggaaccggctcccaccatcgatgctaccgagaccatgaagcagatcttggagttccgcagcatcgtggaaccggcagtctgcgcacaggtggcccagaccgcctcgccggagctgattgccaaactggagggccacctcaaggccatgaaggcctctgtgggcaagtgcgaagagttcatcaacgcggacgtggcgttccatatggagatcatcaacgcctgcggcaacgattacaccattgccattatgaacgagaccttccagcgccgtgctagtctgggtaagatgctcattctttccaacggttactacggcggcatctactaccacggcattctgttggacgctttccgcaagcatgacgccaagcgtgcccgggtcatgatggaagagcatctgcagcacggcctgtacgatctggaatccgataatctggggcaggagaaaaacgacctctgagccgctttttcctgtctgatacgcaaaaaagatcccgttcacccagaagtggacgggatcttttattgcttatggggctttactgcagccgatcaggctttgacgaaggcagctgcttactttacagccagatatttgcccagttcgcggcccagcgtcaggcacataccaatgctcacaccggggatcggggtgatatactcgggaccaaagcgcataccgcaggtgttgccggaagcgtacaggccctcgatgggctgataatcctcgttcagcacctgctggtcattggtggtcacaaagccgccggtggtcaccagtgcaaagcccagactcggggtggtgacatgggcgtagaagggagcctttgcaactgcattcaggaagtgcgggtccttggcaaagtcgctgtcgcagccctcggcgcaaaccttattgtattgctccacagtagcggaaagggctgcaggctccacaccgatgtactcagccagctgttcgatggtgccggcgccggcaacagccgtgacatagcggagttgttgaagggtcacggcagtttcctttcggcgtgttttttctatcctaccgcagagccgccaaaaacgcaacgtattttcttctttgaaataccaaacgaacattgccggcatatccaagatacgttttacccgccctgcaatttcccttataatagcaccgcagtcttgaaacagctgcaacattcccatatcacaaaggaggctttccggtatgggacaacggcaaagtgagatcatcaaaaatcacatggaagtttactggcacgactatgcgtcggccagcaagggcgttcccattaccgaggcggggcttgtggaaaaagcctccgtcattggacgcaccgggctgatgctgctggaatgcggcaccggcgcatggcgtgtccgaagctccatgaacaccctttcgcgggagctgggagtcacaacaacagcggacatcggcctgttgtccattgagttcacctgctttgacggtgaccagtgttatacccagtcactctgtctgacaaatacgggcgtgaatacctcccgactgaaccgactggagcatttcgtcaacgacttcgaccgggaaggaaaatttatgaccggcgaagaactgcacagccacctcgatgagatcgagcgcatccacggcttgtattcgcccatcgcactaggctttgcagctgcactggcctgcggctgcttcacctttctgctgggcggcggcattgtggaaatgctgtgtgccttctgcggtgcaggcatcggcaactttgtacggtgcaagctgacaaagcaccatttcaccctgtttctgggcattacggcgtcggtctgttcagcaagcctcgtgtatgccatcctgctgaagctggcagaggtgctgtttgccgtatcggcgcagcacgaggcggggtatatctgctccatgctcttcatcattccgggctttccgttcattaccagcggcatcgaccttgccaagctggatatgcgctccgggctggaacgtctggcctacgccgtcctcatcattctggtggcaaccatgacggcttggatcatggcactgctgctgcatttgcagccggtgcagttccctgccctgagcctgacactcccggaagagatcgtgttccggctgctggcaagttttggcggtgtgttcggcttttcgctcatgttcaacagtccccggaacctggcagtctgcgccgcccttatcggtgcggtaacgaacacgttccgcctggagctggtgagccttgcgggctttccgcccgctgttgcagcgtttctgggcgcactgctgtccggactgctggcctcctgcctgaagagcgccgccggttatccccgcatctccgtcaccgtgccgtccatcgttatcatggtaccgggactgtatttctaccgtgccatctataatctgggcatcctgtctctgatgaactctgccacatggtttgcagatgccattctcatcatcgtagcactgccgttagggctgatcttcgcccgtgttgtcactgacaagactttccgttattgcacctgatgtgcagcatttccattctcccatataaggcaaaacgcagcgaatcttttaacggttcgctgcgttttgttttgctgtgatgcacttataaagggagttcgtttacagggcgtttactcgccgtaaacgatcttggtagcagtttccacatggcgttccagccggtcggaaaagtgttccagcggcagaaaaacgccaagttcatcgtagcgggtttcaccgtccttgagcgtatcctgtccatagtagaccactgaacggggcagtgcgtgctgcagcttcatctggatatcccagacggtggagtaggcctccgcttccgttaccttctgcttcacggtgtccggcagttcgtagatcagcagcagccccaaatgctggttgtagtggtactccaccacatccatcgatccttcgtcgtagccgtgatacttgcagtagccgctggcaaggtacatttttaccttttcctgcttctggaacacccggatgaaccggtcgtatactttgctgctcacggcaaatttgttgttcggcaaaagaacgccgacatcatccgtcaggatcaccgggttcggctgaccatcggcgttgaatttgaacgggatcagggcagcgttccgtagcagatcaaacatactgtgctggcagatcgccatcaaaaaggcagacagatccttgttctcgtaggcattgaacagtgctgcggcaaactgctgtgcactcacggccggcgcatccagtacgtctgccatgtccagcgagtcgttgaaggtatccatcaggcgtcggcaggcttctggatttttcaggatctccccgaacagtgcctctgccttttcttctcttggaaatatcgttgccatcaaaaagaccctctttctgtttatttccagctacctattatagattcataatgccccgctgtgaaatactgctttcatattgctgctatatacagaacactttttacacattttccaagtgcccggataatggacactgcaatcatgaaattgcacgagggaaatcgaaaaatatataagttggtttgaacgaaggcagttcctatgtctgaagtcaaaaaggtcgtgctggcatattccggcggtctggacacatcgattatcatcccgtggctgaaagagcactataacaactgcgaagtcattgccgtgtgcggcaatgtggggcagaagggtgagctggaaggcttggaagagcgtgccaaggcaagcggcgcattgtctactttttacggaccggttcagccttttggctaa

SEQ ID NO: 542 - DNA, 10060 bp, unidentified
  source 1..10060: mol_type = unassigned DNA
aaagagatggctcagcagttaagagttctcgcacagaagtctgtcggtgccagcgacagttctctatctatccaggtaactcacacaattcaacaaatagagttactcgatagccaattagaaagagttgaagctgaaatgacggaaatcatgaaattcaatgattctgtcattatgaccattcctggtatcggatatatcaatggaggaatgatacttggcgaaatcggtgacatccaccgtttctccagccccaacaagctgcttgcatatgccggtttggatccttctgtctatcagtctggaaactttcaggctaagaagaccagaatgtcaaaacgtggatctaaagtcctcagatatgcacttgttaatgcagctcacaatgttgtaaaaaacaacaccaccttcaaggcttactatgacgccaagatggctgaaggccgaacccactataatgcccttgggcactgtgccggcaagcttgtcagaattatctggaaaatgatgactgacaacctggaatttaacctcgattaagaggtctggatacccacatcatagatttgtttaaaagcgcccaccagggagccttattaaggttacccatttttaccacgaaaaggatttattaatttccagctaatttaagcttgacttttcatagctggtctcgttgacaaatatgatggagtatctatatcttttatgttgattttacacttgcaataaatttttactcattctcatgcaaactattattaatcttggtattcagtaattccataagctctttcagcataaattccattaactttccaacattcttggttgccatccttatttcacaatattgtttaggagtacctcccggaatatcatccttgaacgtaacatagtcttctccatctttagtaaaatactcgcattttgaatgggctattgaatttctaatatgacgatagtaatttatattttcttctccacaatatgtagatgtattataagtaacatatttctttgcttcattgttaaaggctacgttaatacaacattctttacctaacaattctttaggcacaacaagaagtgcatacataaacatttgtaacattgctggatttcctattccagatgcatccaaaatagtattaatattttttttatttgattcagagcatgaccatttcatttccctataataattgctacccagaaatttgttattttcaagctcgaccaatagcgaaacatttgcaattatttgacaaaagatactttcatttttttctaaatttattttcatagtatagcctctgttgtgttcaagcatatccgtactgacgagattaacacttagaactccagtcctgatcacattttgcttggttttcttagtccaaaacttactaataattagcaaataattattacttttttcgtttgtaatgctaacccatgtaataggggcaaaattgtatgttccatcatcattatttgtaccaaaataaaatcaggttgcacacacattgaaaaatgagtgccttccgattttcgttttattgtcttcatttgtttcatctccgcctattcaatcctatctattcgacttattcaagttttttcaactgttatacatattagtatttaataatccatatgtgctctgcagaacttctgtattatatttagtacttggctatcataataagttgcaccaccatgagcgtcattgccttccagttcataataatccgcttgatgtccagcagctaccaaagtatcatacagcactctgctattctctactgaaactattgggtctaattcgctatgcaaaagcaacactgctggcaaatttatttcttttgttatatacatttcacaagaagctttcttagccagttcctcattcccctcaattttatccacaccaagtaacgccgctgaaggtcgcacttgcatccatggtggcaatggagcttttgaacaaataagtatatctgttgatgcactttccaaaattacaccagaaattttcgtgattttttcacataatccatgttcgctaaataatgtggtcatcatagcaatatgtccaccagaggaatttcccataagaaaaatccgctctgcatcaatatgaaaattctcagcaatagtcggaataaatttaagtgcattgcaaacatcatctacctgtgcagggaataaagcaatgtctgattcacgatactgcattacagctacaacatatccacatttagctaatgttgcatattgcggaatatcgttatacatctcttgtttatgccatgctgaacccggaataaataaaataagcggatacttttcttccttcttcatctcacgcttatatggaaagataatttgtaaataccttttacaattaccataatcatgatattcccaatcttgcgaatataaccactgtacttcattacttccagtaaatactttaatatgttctttcattagttccattcctaagctaagatttattaacctattgtcacctacaaataccgagttgttaaactctttctaatctccatcttcctgcctctcggacaagaatcatccctcgctctaagagctcggtcaattcaaatttaccttctaaaataatgtatctaaatgtatttcatcccaaacatcaattaacttatgtccttttatttcggcagattgaagtaattcctccattgaatcaaatgagctttcctgcctgtttatccatattgatactttgtttttcgatttatcggtagaaataaaaattgcttcattttgataagccgcctccaattcacgcccttgtgaaatcaaccatataagtgctgataccgacttcttatgaaacaactcatcagctatcatgtcatgcaattccatgttcataacctccacatactgcatttatttctgtcccgaaaacacaaacatatccaatgtaaaaatataataatcctgtcatgctctaacgccacaaaacccaaagctgcaataaccacctgcttgcatagttttttaataacatatcttataatgctgataatgattaaaacaacaaacaaaatagtacaaaaaatggcaaggataccagcacatattgttttatttatttagtcaataaatacatcctattaatctgtccgtattcttcataatatatttctacatagtcacttatcgaatatctcgccccaaggatatcctcccattcttcattagtattgttccaaagaatcattccgtcatctaatagattaccactaatctttttaatcccatattcctcaatctgttcatcagaaatgaatgggtttaactttacgagaagttttccgttctttttcaggatacgcttgatttcttctaaaacactgattgcatcgtccggatacaggttatcaataatattagataaaatggcagaatccatagactcatcctgtattccctttaatgcctcaattcctccgcataaaaactgaaaattcccgttttcaatcattttacttttctctatagcactctttatcgcttgcgatgacaaatctatcccaatatgtgtatcggtaccatacttattacacaaaaacagtgctgtgccacttccacatccaaaatcaagcaccgataaagcgttatctgtcaaccatgctaatcctttatcaaactccacatttccggattcttttttcttaggaagtacagattcttgttttgaaaaaatgtcgtcccacaattcaatgcatttgtcatatttattcattagtttctcctacacatgcctaaaagccggcgtaaagcggacattcgcaatccgctttcgctacttgctcatgaacgcagtcgctttgcgaactgtcagtgggagcttttaactcccactgacataagcatcccccttacccccgcttagtgctctacacacttgaagcggggaattgcttattctgcgttcaattatttcttttgcacgatgtaaaataggcaattccctgtttgcaatgagctttcctaagcttgtattcgctctatcctcatactccctgaccgcttcctcatatgacaatttcaatgttgatagatgaaatctttctatctcatcctgcgttaaattcttttctccaaacgattctattttacataaaaaataattattaatattatgtctgtgaatcagattgtaataatcacttactaccccaattttgcaaaccacttctacctgtacgcctaactcttctttgagttccctccgaatggcagttatcaaatcttcaccatcctcgacaccaccgccggcagtttcgattgttattgcttttccaaaatcatcatcccgctcagctcttacaaaatagaattgtccactttcatcataaacgattgctctggcaatatttctatcatgatcaacatactcaaattgccattgggtatcctgcaaatttatatttaattctgtattcatcatgcatttctccatgtcatcgtcttatattttctgtccattcatatccaatataacacttatgggcagagaaaatccttctaaaattctatttttgtgaattttctctgcccatgtgctcatacactgcctgccttggactgatttttcacagtcttacagtgtttttctctgcctaacagacactataatgtcatccatggactgatatgccttataacatcaatcaatttttctgcccaagaggttaatttcacagcttttaggcagatactcgccatatatctgcagattgaacgcagaataagcagtcccccgcttcaagtgtgtagtgcactaagcgagggtaaggggatgcttatgtcagtgggagcttttaactcccactgacagttcgcaaagcgactgcgttcatgagcaagtagcgaaagcggattgcgaatgtccgctttactaccttatgtgccatcagcggcaacagcctactccaccagcaccggattctcacacacaacccaaggaagtccgtacttgttaagggcatccatgaatggatccgggtcgaactcctcaaccgtgaacacacccggcttattccatatgccctttacaaccatcatcgcaccaatcatagccggaacgcctgttgtgtaggagattgcctgtgaaccaacctcgcggtaacactcctgatggtcgcatacattgtagatgtagagcgtcttttccttgccatccttgattcctgtatagatgcagccgatattggtcttgccgaccgttcttggtccaagtgaagcagggtcaggaagaagtgcctttaaaaactggattggaacgatttccttgccatcaaagttaatcggtgttgtcgatagcattccgacattctcaaggcacttcatatgtgtgagatagctctgtccgaaggtcatgaagaaacggattctctttacacccggaatgttagcggcaagtgactcaatctcctcatggtgaaggaggtacatgtccttcattcctacctcagggaaatcgtactctctcttaatctccataggcttagtctcaatccactttccgttctcccagtatgagcccggtgcggatacctcgcgaagattaatctcaggattgaagttggttgcgaacggataaccatggtcgccgccgttgcagtccaatatatctattgtgtggatttcgtcaaaataatgcttgagggcataagctgtgaacacgctcgtaacacccgggtcaaaaccgcttcctaaaagtcccgtgattcctgcctccttgaaacgctctctgtacgcccactgccaggaatagtcaaaataagccgtgaagccaagtctcttgcagcgctcctcgtacacctttctccactccgggtcatccgtgttctcacactcataatttgctgtatcaatgtaggaaaccttggttgcaaggcaggcatccataattgtcaaatcctgatacggaagtgctacattgagtactgcatccggcttgtagctgttgataagggcgattatctcgtcaacatggtccgcatcaagctgtgccgttgttatctttgtactcgtctttgtctctaactccttctttaacgcatcacacttacttttggttctgctcgctatacacagctccgtgaacacctcactaagctgacagcacttatgaattgccactgaagcaactccaccacatccaattaccaataaacgactcatcttttttcctcctcttctaacaattcctcaacatatttcggaagcataaacgctccggtgtgcagattacaggtatagtattccgtaggtatctgcagctttttccactcctccggcttaaaatcagccagtgggtgatattttttcgacgcaaagccaaaaagccagtagcccgaagggctggtcggtatatgcgcctgatataccctgcttatcgggaaggtgttgaacaccttcttgtgcatccgcctgcatgcctgctcgtcctcatcatagaaagggcttccatgctgatagacaagtattccgtcatccttgagtgccttgtaacagttgccgtaaaactcccttgtaaagaagccctccgacgcaccgaacgggtctgtggcatcatttataataaggtcatacacatccgactgggagcgtaaaaaacgcagcgcatcggtgttgtagacgtgcactctctcatcgtccagcccctttgccgtctctggaaagaactccttgcatgcctcaatgaacatggcgtcctgctcaacgatatctatgcattttactgtatcgtagttgataagctctttggcaactcctccgtcacctccaccgataataagcaccttctcgacatgcgggtgcaccgacatcggcacatgcaccaccatctcattgtaaataaaacaatcctgctcggaaaaaataacacttccgtcaagtgtaagaaacttcccgaactcaggcgaagcaaagacatctattctctgatattcgctctcagccgaatagagctgtctctccacgcggatatcaaaacgcacatgcggcgaatgattttccgaaaaccaaatttccataaccgatacactcctgataattattactgataactattgcttataactatgccgcataacttatatttagcggaataataaaaatatgcattttttagttataaaaccccaaaaaaatttatacgttcacaaatcactgtaaactatttatattcacaaaacaaacttcctgcaatatatgttttacaaatatctgctttttccataacatcctaaaacaccagcacattaagatacttaacctccgggtcctccataccctgcatggagcagcccttctctattgaatagagtatgtaatcaataatgtcctccgttatctcctcacccggcgcaacgataggtattcccggcggatatgccatcacaaattcgcctgaaattcttcctgccgcctcccttatcggaaccttttccttattcgcatagaaagcctcctgcggcgaagcaagcacccttggtagaagcatctccctgtcgacctcgaagcgcttctcctccttcttgtagaggcggcttatgtcggcaagcgcccccatgagacgctcgatatcctgtattctgtcacctattgagatgtacgccagtatatttcctatatcgccgaactcaatctgtatatcgtactcatcgcggagaatgtcatagacctcgattccgtcaagccctatatctctggtgaacacgcacagcttcgtcacgtcaaaatcatacaccgagctgccgtttatcagctcctttccgtaggcgtaatatccgcctatggagttaatttcctccctcgcatactcagcccactccatcaccttctggaatgactgccttccgcggagtgcaagatttctcctcgatatgtcaaggcttgccatcagaagatacgatgcgctcgtggtctgcgtgagatttataatcgttctcacatagtctgcattcattccgttgttggtgagaagaattgaactctgtgtgagcgaaccgcccgacttgtgcatggacacagccgccatatcagcccccgccgcaatgcccgatatcggaagattatttccaaagtacagatgtgttccgtgagcctcgtcagcaagcaccttaagcccataggaatgtgccagctcacagattcccttgatatccgaacagattccatagtaggtcggattgttaaccaacacggcaacagcacgcgggtgtgcaagtatcgcctcctcaacctgctccttggtgataccgagcattatacctattctggtatttacctcggcatttatatacaccggaattgcgccgcagagtatcatcacattgattacactcttatggacgtttcgcggcacgataatctcatcgcccgccttgcacacggacagcaccatgttctgaaccgccgaggtagtccctccgaccatgaaaaaggcatgctcagcgccaaatgcatcggcggcaagctcctcagcctccttaatcaccgacaccggatgacacagattatcaagcggcttcatggagttgacatctatcccgacgcacctctcgccaagcaggtcaaccagctccggattacctcttcctctcttatgccccggaacatcgaacggaacaattcttgcttttctaaacctctcaagcgcctcataaagcggcgcagaggcttgtctctttaaatccatggcaacctccgcacatacatttttagttagtcatgtcctgaccgcgcctgattttagacattttcacacaaaaaacaggcgtgaatattcacgcctgtgcaaaaaatcattatccctatatgataaaaactatctcagagtttatcctggcagagtaccgttaccgctcttattgactgtttcacaagatgatgtgcatacgcatgatattcagtaaatcaacttataaaattcgggcttctaacccaatcaataatgtgtgccctagtcacacttcggcaaccgacccgcctgtccgcatggcttaaccagaccggatatatgtctctcatcacataaaaatatgagccacatcatgtattcatccgctgaatacatgtcctaaatccgtccggtggtctgcatctgttatttatccaaatactatctgaactataatatatcagtgaaaaaatgtcaataaatttttcactctatcttataaagtaacaataataccttcaaatcccgtataacaaataatcctccatgagaaattagtataattttaaatttcctctataaagaattataacactgctgttcaactttttctaccggctgataaattcgatagtttctatgatacattacgcatttttatgacgatttcgccgaaccacggcactcttgaatacttccataagtgcaggtgacagctccgggcaatcttcatcaaattcgataggatatttcttcgcttcctctacttcctttaactgttccaaggtgggttcctgacccttagtaactgctaatctctttatcataataaagcctcctctctgcctcagtcgccagtctcgccgatattatgcgaatgatctcgcctctctccgtaaatacaacaaacaatatatctccaactctccctattgcaatatatctatcctcatcactgctatggtgaactacccattgtctaaagccaatgggcttcctgcttcgcagacctcgtaacctactatctccacaggcgttaattcgggcagtccctgccctatattgttatttttatgctatttgtcttaatccttcttccagtatattttttgctgcgttgatatccctgtcatgatttgttccacagacaggacatgtccattcccttactgatagattttttgtctctgtattttggtatccacagacggaacacagctgactactggcatagaatctatctattttgacatatttcctgccattccactttgccttatattctaactgtcttgtcagctcataccatga

SEQ ID NO: 543 - DNA, 54638 bp, unidentified
  source 1..54638: mol_type = unassigned DNA
tcaattaaggtgccaatatcgattgccagagcaaaaaaggacattgaaaaggaaattgatttaagggagtacctgccatcagggctgtcgattgtaggggagacgacgacggtttccgtccgttgtgatattgagaagaatggacagcgtgtgctgggacttacatcttcggatattgccgtgagaaatctgccgaaaaattatacaatgaattttgagccggaaaacggaaagtattccgtagaattgttaggcgaagatgcgacgctggcggatgtaaatgtaggagatttaggagcttatgtggatttgaacggattatcggatggctcgcatacgcttgaattaaaatatagtctgccgaccggcgtgcaggtgaaaaataaaatcaagattaaagtcaaactaaaacgtcaggaaggtgaggtgacagatgcaccaagcacaccaactccgacagtggagtagaaactaaaaaaatcccggtggactgccaaggagcagctgccgggatttttttgatattttttacaatgggatatttccgtgttttttatgaattacatcaatcgagcgtttatctgcaagcattaagatgtcggcataaacacgttctcttgttgcctccggtttaatgatttcatccacataaccgtgcatggaagcaatacttggattcatgaatttttcattgtattcatcaatcttttcgctgcggaaagctgctttttctgcagggttcatattcttcatctgtttaccatacaaaatatcagcggcaccatcggcacccataacagcaatctcagcggttggccatgcataaacaaaatcagcacgcaggtgtttactgctcattgcgatgtaagcaccaccgtaagctttacgaaggataacattaattttaattgttgtggcctcagagtaggcatatagtaattttgctccgtggcggatgattcctttatattcctggtctttaccaggtaaaaatcccggcacatccgttaatgtaagaatcggaatattaaaagcatcacagtagcggatgaatcgtgctgctttatcagaagagtcacagtcaaggacgcctgccataaattttggctggtcagcaatgataccgatgacaactcctttaatgcgtccgaatccaacgactacatttcttgcaaattcttcctgaacttcgataaaggagtctgtatctacaattccgttaatgacatcgtggatgtcgtaactgtgattgctttcttttggaatgatatttgctaaatccttattaaaagtaacattttcgttgtatttaggaagtgccggacggtttgtgtgcaggtagccatcctcatagcacggaggaataattgaaatcaattccttcacgcggcggaaacattccttttcgtttggcatatgaaaatgagcgacaccgcttttggatgcgtgcacattggcaccacctaattcttttgctgtaatatcttcatttgttacgcttttgataacttttggtccggtaacaaacatctggctgatttcatcaatgacaaagataaaatcggtaatacccggtgagtaaaccgcaccaccggcacagttaccggcaataatcgaaatctgcggaatgtatccggatgccaatgtattatagtagaaaatctcaccatatccggctaaggcatttacaccttcctgaatacgggctccgccggaatcgttgatgccgataaccggacagcggctctcgattgccattttaattgcattagcaattttgaaaccgtgctgtttaccaagagtaccgccgataacggtgaaatcctcagagtaaatcacgactttttgtccgccgatggtaccgtaaccggtgattacgccatcataaggaaattgtccctttttaatgttaaaagcatcttctaagttcgtaatgttcgagccaatttcacgaaatgaatcttcatctagcagcatgcaaatacgctctaaagcgtgaagtttgccaagtttgtgctgcttctccatattgtaagttgacattgttcattctccattctttcttaaaatatcacttgatactacgaaacctatcatataccataaaaagaaaaaatgtcaatcctatgttggctttttttgtagaatagttgacgaaatacgtatttgggtgctataatcaaatgattgaaaaaataaaaaggatggactagagaatgattcaattttttaataatttcctaaagtacaagtatcttatgggacagcttgtgaagaaaaatatcaagctccgttaccgtcgttcttatttaggaatgttatggacactgattgagccgctgcttacaatgattgtattgtcggttgtgtttggcagcttgttaggaagaaacagtaccgatgctgcatttgcaggcgtgccattcccgatttatgtcttgaccggacgtttgctgtattcgttcttttcatcagcaaccaacagtgcgatgcgttccattcgtacaaacggcgctatgattaagaaagtgtacgtaccaaaatacatttatccgttctccggcattttggcaaacttcattatatttttgatttcgcttgttgtactggttggtgtaatggtatttttcttagcaaccggtcagtaccatgcaccgattaacggttatatggttatgacggtgattccgctcttaaatttgtttatcctatcaacgggagtcggcatgatattatcgactttatgtgtattcttccgtgatatcgagtatttgtggagcgttatgttaatgctcatcatgtattgcagtgcgattttctatttcgcaagcaacatgagtggtgacacacaaaaactggtaaaattgaatccattatttggcgtgattgacaatttccgccgcgccttttttggacagccttttgatatgagattattgctgtatacatccgtttttgcggttggaacattggttattggtatgattgtattttatcggaaacaggattcctttatcctgaatatttaaggtgtaaggcaaattggaggttattatggcgaagaagtcattagcaatgaaaatagagaatgtgagtatgaagttcaatctcagttctgaaaaagttgataacatcaaagaatatgttattaaaatgataaaaaaggaattgatgtttcaggagttttgggcactcagagatatcagctttgaagttcagaaaggtgaccgtgttggtattatgggattgaatggtgccgggaaaagtactcttttaaaagtaatttccggtgtgttaaaagccacacagggaacggttacaacaaatggcaagattgcaccgcttcttgaactgggagccggatttgacagacagtataccggtgctgagaacatttatctgtatggtgcgatgcttggttacagtaaagagtttttggaagcacgttacgacgaaattgtagagttctcggaacttggcagttttatcgatgtgccggtaaagaattattcttccggtatgcgtgccagactcggtttttccgtggcaacaattgttgagccggatattttgattctggatgaggtacttagtgttggagatgcgaaattccgtaaaaaatgtgaaaatcgtattcagagcatgtttgataaaggtgttaccgtcattttcgtatcacattcgaccagtcaggtcttaagaatgtgcaacaagggcattcttttggaacagggccgtctgattgcacagggggacgtcgaggacgtagtaagtgtgtacgaagcaaagatgagtgagaacgaataggaggaaaagaaaatgaaaaaagtgattacttatggaacttttgacttacttcatgtaggccacattaatttacttcgccgcgcgaaagcattgggggattatctgattgttgttgtttcctcagatgaatttaacgccggcaagggcaaaaaagcgtatcattcttttgaagaccgcaaaaaaattcttgaagcaatccgttatgtggatgaagtgctgccagaatatacatgggaacagaagattgatgatatagtaaataataatgtcgatgtttttgttatgggagatgactggaagggcaagtttgatttcctcaaagactactgcgaggttgtttacctgccgcgtaccgaaggaatttccacaacaaaaattaaaaatgatttgaatatgaaagactgagaaaatgattaaaaaaacaggctatgtgctgtttgctttctttttctatctgttccgcctattacccataaatcggcagaaagtattttttgtcgcaacgcatgatgacagcaaagagggaaatatcggcattgtggcagatgctataaaaaatcagtttccatccatgaaaatggtgtatctgacaaaaaaagacggcatacgaagaccattttcgtttttctttggaaaagcgtttcatatggcaacggcaacggtgatttttctcgataatgagttcatgccgatggcgtatatgaaatttaataaaaatgtgaaagtggtgcagttgtggcatggaaccggtacgattaagaaattcggcttggattcggataccggggaagtaaaaagactagcaaaaaaagcaaatgaaaatattacgcacttgattgtcagttccgaatgtacggcaaaatggtataaaagtgcgtttggtgtagacgatgaaaaaattttcccgattggactgccgcgcaccgatttgatgttagatgaatctaagaggcagaagatgcaagagcgtttttttgggcagtatcctgatttgaggggaaagaaaattacgttatacgcacctaccttccgagattcacaggttgaaaatccggaaatttgtttggattttgattcccttaatcaatgtatgggagagaatgaggtgcttcttatccgtctgcatccgcacgtggcagagcattgtcctgtcggtatatgggatatgtatccggataaaataagaaatgtttccgattatccgggagtggctacgctgttatctgtggcagaccaattgattacggattattcatctattatttatgagtactgccttttggaaagaaaaatgattttttatgcgtatgactatgaagtatttcagaaagatggtagaaatttttacgaggactatgagaaatttgtgccgggaatgattgtatatacgcagccggagctggaaaaaaactggcatacggcttacgaggatgactcacaacgagagcagttttgcaggcgcattttcaagtatcaggataaaaatgctgtaaatcgacttttatgtttgatttttgacaagaaataagatataatgttgtgagcgtattattaggctaatttgagaacggagggctacgagtgaaaacattattagagagaaagattagtttagtagtaattattttgcagtttttagtttccttgttagtttgtatttattttggaacaacagggcttgtaccggttaagtacatggttgcgattgcagtcgttatggttgtattgcttgtctatcaggtgatgagccagctgacaaactccagttatatatttggacgtgtgttagccgttctgttttgtgccgtgttccttgttggtgcgaactatgtgagagagagtatggcagcattccagaatgtcggtggtgcaaccaaaaaggttgatgttatttctttctacgtcatgaaggacgatgcagcaaagacattagcagatgctaaaaattactcttttggtattctaagacagcaggaccgtgagaatacggacaaagcggttcaggatgcaagtaagaaactgaacaagacattgaacacggttgagtatgatgatccgttgactatggtagatgccttgtacgcaaaagaagtgcaggcaattatcatgaataaaagttttgtagatacggttaagagccagtataagacattttctacggacaccagagagctggatgcaagcaagattgagtcagaagtagaagaattggttgataccgatgtaacaacaaaaccatttaatgtttatatcagtggtattgatgtatatggtaagattggacagacaagccgaagtgatgtaaatattattgcgacggttaatccagttacaaagaaagtattactgacatctacacctcgtgattactatgtaccgctgtacagtaagggcggtaaatcgtattccggaggtattccggataaactgacccatgccggtatttatggtgttgactgctcgattaatacactggaaaaattgtataacattgacattgattactacgtgcgtgtcaatttcaccagtctgaaaaagattgttgatttgcttggcggtgtagaagtgtattcggattatgacttcatttctgactggggtccacacggtgccggtacacattataagttcaaaaaaggttataacaaagtaaatggtaagaaagcattggcattctgccgtgagcgacaccatttcgcaaatggtgactaccagcgtggacgtgaccatcagcatatgattgaggcaattttgaacaaggtgatgtcaccttccgtactgccaaatttctcaagtttgttgaaagaatcgaagtccatgttccagacaagtatgtcaaaggacaagattgtatcgctctgcaatatgcagttgaatgatatggcaaaatggaagattgcttatgcgaatgccgagggtaccggagctaagaagacgaccttctcaattcgctcaacggcactgtatgtttgtgagccaaactacaattccgtgaagaagattacaaagagaatgaaaaaagtaatgaaggaaacgaaagaaagcgagagctcggcttccgataagaatgacgttattaagtaagacattacatgagataaaacggccgctttttagcggtcgtttgtcgtgaataagtggggaataaaattgattacgaaattacaggatttgtttattcttctccttaatccatggattccgattgtgggaagaataaaagacaaggtaaggtaccggctgattacgctgtgctttgtaattgaccttgttttgttttgtatcgtccgctacggacttcataaggaaagctatttttataatacggtttgtggtatttttgttatgtttgccattgccatattatcgcttgaccggacattggttcatattcactggagacgttctctttggattgcttggtttggtatgtgcatttcctttaccgtttcggatattctagtgccgaaaaaaatgtgtggactgggtctgattttagcttttgtctttaccgctgtattttttgtgtggcagaatcatacgagaaaagatttgttgtggcagtgcttcaagaatgccataaaatggtcgtttgccgttatgtcggtgatttcctttttgttccgtcctctgtatgagggaggcaggtatgccggcatttttacaaatccgaatacgtttggattgtatttgtatattattatcgctgtatttttgtcggatttggactggtgtgtggagaccggccggtcttgccggaaaaacattgtaacgtatgtttcgcttgccttatgctttttctatctggaaaaaagtcaggcgagaacttcactgattgcggttgcagcaattgtgctgctttggattgtactgcggttttatttggccaaaaagacaaaaaattaccggacctttttaggaaacttaggctgtatggcagtattcaccgtagtgctgtatcctctgtttttaatctgccttttgcatctgccaaacattgttggacatccgattgtgtttgaaggaaaacctttgtattatacaagtgaatttcaggggaataaagaaaaagcggatgagccggacgatgttgtggtgccacagtataaagatgtggaggagacacaaaacaagaaaaatacgattgcaccacgcaatatgtgggaacgcatttggtataacatcaagtattcaaagggcttgaatgccattacgaatggaagaattgatatttatcttgcctattgggataaaatgaattttaaaggacatgccagcacctcaatggtagtggatggggaaaagaaaaaccattcgcataacaactggattcagtttggttacacctatggacttctcagtatgtttttctatggtgtgattacgttattaggggtagcgttttctttgaaattttacctgacacagagaagaaaaaatgcaacatatgcttttttgataccggcaatctgtatcggatttgttattgctacactgacggaatgtttgtttctgccgtttgaagtatttccggcatttgcgtactggtttgcatttggtgatttatttgtgaaaaaagtaccaaaaaataaatttttacaggaattagaggacgaggcatgatataattttgacatgtaaacgtcttagtataaaaaaatgattgaaagataggagaaaaacatgaaggaaaataataaaatatggttgcgttatatcatatgttttgggctgattgccattctatgctacttgtttccatataccggagatgactgggcatggggaagtaaaatcggtatcgacagattaaacaactggtttgaaaattacaacggacgatatgtgggaaatcttatcgttttggcaatgacgcgctcaaatcttttaaaggcagttattatgtcattttgcttaacaggaattgtagcactttgcgagtatatatttaaaagaaaatgggttttttatgtaagttgtgttgcacttgttttgatacctaaattgatttttcgtcaggccgttgtatggacggcaggttatgcaaactacgtaacctcaatgtttttcacattgttatttatagcgtatgtttatcctatttttcaggagacaatgccacgaagaaaagtttggcattgtctgccgctctttgtgttagcggtaataaatgcattaattgtagagcatttgacaatttataatgtggttttggcttgtggtgtgcttgtgtatacaatttgtgttcatcgcaaggtggttgcttctcatgtggcgtatttaatcggaagtgtggcaggggcagcttatatgttttcaaattcggcatatcatacgatcgcaaataatcaggatcagtatcgtcaaatggcagagggaggagtaatcagtcgtgcatttgacaattatgtcaatgaaattgcaaagcatctttgcctgaataattgttggatgaatttagcaatcgttattgtatgtgccatgatttataaaaagatctattctgacgtaaataaaaacagaagtgtgttagtagcaaaaatttgtctggtagttatggcaggatttacgacatggtctttgttgtcgtcctttggcatcagtacatttgcaaaacagaaccggttattatattttgaagcggcttttgtggcagcttacatgattgccctcattatttattgtattcttattggcagtcaaaaaaaatgtttatggaaagttttgttttggaatgcgggaattgtttgtgttgccgcgccgttgcttgttgtaaatccgattggtgagagatgcttttttgccacgtatatactgtttttgatgctccttttggaactgcttatccttttagacggagaagagaaagaaagccggatttttacaaagacattttgtaagacatgcgcagttgtgtccattttcggattaggcttttatcttaatattttttcctcaatctatcaggtggataaagaacgattggctagaattgagagacaggtagaggcaggtaaaacgtccgtggaaattcggcacttgccatacgaatcttatttatggacagccactcctgaatgggagccatggattgagcgttacaaactgttttatggtttgcctgaggatttggaaataaaagcagtatgggaatacagtaagaaaaaataacaagattacggaggaatgttttatggaaagaaaaaaaatttcagttgtcgtgtccgtatataatgaggaattgtctttgaaccaattttataagacaacagtaagtgttttggacaagtgtgtttgggactatgaacttattttcgtaaatgatggcagccaagatggcagtattgaattgttaaaaggttttgcaaaggaaaatgccaaagttaaggtggtcgatttttcgcgtaattttggacatgaggcagcgatgattgccggtattgatcatgcacaaggggatggagttgtgtgcatggacgcagatttgcagcatccgccggcatgtattccggacataattgctaagtttgaggatggttatgaagtgatttcgatgattcgaacgaagaatgcagatgccggaattattaagcgaattacgtcaggtgccttttataaagttttgaatcttatgtcgccggttaaatttgaaaataattcttctgacttttttgctatcagcaaaaatgtagcaggcgttctgcgaaaggactatagagaaaaaatccgctatttgagaggatatgtgcagagtgttggattccgaaaaacaacattggagttcgaggcacagaagagagaggcaggggaaagtaagtacagcattcgaaaattgctgcatttttccattaatgcactgtgcagcttttcggatttgccattgaaactgggaatgtattcaggtgtatttgtggctctgtgtggttttatattgatgattttcactattataaacaaaattgtcaatggagcaccggcggggtattctacaatcattgtagttttatgttttatgtttgcggttgttcttatggtaattggaattataggagaatatatcgccgttttgtttgcggaaattaaggatcgaccgatatatattgtcagagatatttatcaggaagagaaagagactcatggaggagagaaagagtgaaagtttcggtaattgttgctgcttataatgcagagaaatatgtaacagagacgatggaaagtctcgccaatcaaagtatcgacgattatgaaattattgtagtcaatgatggttccaaagaccacacgattgacattttgagggattatgaaagccgttatgacaacataacagttgtggacaaagagaatggtggaccttcttcggcgagaaaccgcggactggatttggcaaaaggagagtatgtatacttctttgatgcagatgatgtcttagagttagacgccttagaggcactgtatgagcgtgcaaaagaaaaaagggcagatttagttattgctaagtatgatatttttaatcgttttcagacttttgcagtcaatggaatcaatgatttggtgcagatggaaaaaatagacaaatatgagccacagattctgtggacgttttcgctgtgtaataaattatttaaacgctcaattattgagcagtatgaactgcgtcttccaccgatttcctattcggaggatggggcatttttgatgcgttatgtataccgtacgaaccgaattaccggacttgaccgtgtgattttccattaccgcagaatgtttgatggtgaggcggagtcgattacggcttcgatttcttcttggaaaatcaaagactacattgaggcacaccggctgattttggagtcggcaaaagaaagtattttaattgatttcccacagtacaaagatattgaggaagtaaaagagaataatgacgatattcacaaatatttaaatgaaatcagccgaaaagaagtgcagattctgttggatcagttttatgcgaaatactggacactgccaaaggagacaattacgcatctggtttcagaaatgaatgataaaatttcaacattggatatgcgtgatatttcgatgttaaaagattctcacccggaatttgcacttgataatctggcggtagacaaagaggatttgctttctcatgcgtggtttaccattgccctttatggggagaaagaacaggaagaaaaatttttgttaagtattcagagtctgacactgcaaaatctgattgccattcggattataatgccgcttttctggaaagagacagtggaaaaagccggatttttacaggataatatggagttttttgatgtaaaaacaagagatgaactgtattatcaggcattggaacaggcacagacgccatacattacttttgcggatgccaaagtcagttatgcgaataatgcatttaagtatgtgattaagaactttatcaaatcaccggcagattttatgtcagaattgatatatcaccgcaattttggagatatgcaggcggtacttttcagcacggtggcattgaattccgtaaagacaggctatgaaaataacccatacatgggtatggattacacacttgccaataaattttttaagacggaatttttgaaaaatcaaaccctagataagtcaaaaagtctgctgtcacatctgacacagtggtaccatagaggatattttacgtttatgaatgaccgtattgtattctatgaggatttggaagcaacatatgtggattatgttggaacgaaggaaaccattccgatgatgaaggaatatttggtagatagaaaagcagatttgaacagcccggagattgttccggatttaaatgagattatgccgaagatgcttcgtttcccgtctgaaaacatcggtcagattttgttccgtaagatggtaaatttcctgcgacgctatccggtaaaagagcaggtgctgttttttacggtgcgaaaagacggtgaactagagggcaatgcaaaagcattatatccgtatgtcaaaggaaagaaagtgatttgtgccaagcgtctgccacataatccttttacgaaactttatatgtactataaaaatattacaagccgtgttattgtaacggatgactataaccgttatctgcgtcacttccagctgcgtcagagccagcgtgttgtacagttgtggcatgcctgcggtgcgtttaagaaattcggacagcggggaaccaacatgtcgattgctgcggatcatgcttatcatgtgcagtacaatatggtgacggtaagcagtgacagaataagaagtatttatgcggatgcctttgatatcgatgtgcacaaggtaaaggcgttgggatgtccgagaacggatgcattttatgatgaaaagctgatggatgagacaaagcagaaagtatatgccgcacatccggaattcaaagaccgctatgttattgtatatgcaccgacatttcgtgatataggggatgacagaacgcagtttaaaccggatttggattttgataaattatcaaaagacttactgccaaatcagatatttgtaatctgcccgcatccggtcatgaaaaataaaattgtagagaagtcttatgacaatatcgaagttatcagagatttctccacaaatgatatgatgttggtatcggatttgctggtaacggattattcttctgttatttttgaatatgcgcttttgcgaaagccaatagcattttactgttatgatttactcaattataatcggggcttttatctgaattatccggatgatttgccgggggatgtttatgagacgcagcaggcacttacagcgtatctaaagtcaccggaaaaagatacattgacagaaaaatatgaccagttcattgaaaaatatatgggagcgtgtgacggacacagcagtgagcggattgccgctatgattaatcagtatatggaggaagcgaaacatgaatgagacagaaattacatttttgagcagccgcggacgtgggctgagtaatgaccttgcgcttttgaaagattatcttgcgaaacaatccggagaggatgtaaagctccgctattatttgaataatgaaagacataaaaatccactggcagcacatggttaccgccgtgcgaaaaaggattttatggagggtatgacaaatgttgtctgtgtggatgcttctctatcaactaaaattaataacttagcaccggaaggcagtcggattttactgggtgttccgtatgattaccagtttaagaatatgtttttaatggagtcaaaaggaaaagaatttaatttaaatacctttgcaagatttacgcacatcattccgggctctccatttacggcagatttgttaaaacgggcgtaccgtttagaagataaagaaataatcgagggtgtttccctgccgtttgcctatgatataggggatgctaaaagaagagagaatgtctcggaactgatttattattactttccgcatgcaagagacaaaaagattctttctgttattgtatatggtgatgaagagatgaaaaggaaggattgggaaactattgatgtaaagcaatggatgaaagagcttggggaagaatggtttgtttttacaaacagtgaaattttgatggaaaatgcattttctatgggaaatcaatacaaaaaaagctttggctatgtaaaccggattctcccggttccggatttgttgtatgctacagacgttttggtgacaaataacggacgtttggcttctgcattttcaattttagaaaagcctttatatgtttgccactacaacaaaaattattttgaaaaatatgtaagtttaaaatatccggaaatgtattttgaaaatgccgggaggttgtgtgagacagcatatcaggtggatgtgtgcaatagagcacaggcggattttaacgcaagtatgtcatatggtattgagaaaaatgtatatgatcaaacgttgaaatgcttgttagattgaatgagaaagagaggaaaaagatgaatcgaattgcaaaatgggataatgcaaaatttgtgttaataatattggttgttatttgccatttttacgaaaattatttaggaagttctaaattggtaaattccttgttcttttccgtttatacgtttcacatgccggctttttttctgatttccggtatgttttccaagaaaactgtgaaggaaggaaaaattgtaaaagtagtaccatatctgctggtttatttgtttatgaaaatgtttggttattttgtgtccggtattatgaatggaggaacatttatatcggttgatttcttcagggaacctggtgccgcttggtttattcttgcgttatttttcatgtatttaattacattttataccaaacaatttcgacctgcttatgttttgattgtatcagttttggtttcaatggcagcaggttactccaatatggatacgaatcttttcagctggttgaggattgccgttttttacccatttttttatgccggatatgcattgtcaatggatacaattacgaaatggacagaaaatagaaagttgaaaattgtttctgtggcagttatcctggtatattttttagtttgctatgtcggaattgataaattattttgggcgagatttctgttgacgggaagaagttatgaggcacttacgcatggtgcattttatggtggtattttacggttgtttacttatgtgttatcctttggacttgtgttcgcttttttatgcatcattccaaaaggaaagaatattttttctcaattaggaacgagaactttgggtgtttatgtatttcattataatttcattaacctttttgtgcattcttgttggtataaggcattatatcataatttcccaaatacatgggaaattatacttgttttgcttggaattgtggtgaccttgatttgctgcttgaaaccatttgatgcatgctgccgtgcgattttgtccagtaaatggaaacttcgcctcgatgatgagttgaaatgacaaactatctgtgatatgataaaaacaacgaatttttttggaggttttagcagattatgatatttggagtattgttagcaggcggtgttggaagccgcatgggaaatgtagagaaaccgaaacagtatatgaatattggtgacaggccgattattattcacacaattgaaaagttctttgtgaatgataaatttgaaaaaatccttgttttgtgtccggaacagtggatttcacacaccaagaatcttataaaaaaatatttgggggagacagaccgtattgctgtgatggcaggtggcacaacgagaaatgagacgattatgaatgccatttcttatattgaagaaaactatgaagtggatgatgatacgattattttgactcatgattccgtccgtccgtttgtgacacatagaattattgaggaaaatattcgttatgcactggagtatggtgcctgcgatacggcggtagctgcgactgatacgattgtacagagtgaagatggcaaggtgatttcatctgtgccggaccgcagtaagatgtatcagggacagacaccgcagacattccgcttaaagaaactaaaatcgttgtatgaatctttgaccgatgaggaaaagaaaattcttacggatgcagcgaagatttttgttatgaagggcgaagacgtatatctcgtagaaggagaagtatcaaacattaagataacttatccttatgatttgcgtgtggcagaaacattgattcagtcgaagcaggaggattaagagcgaatgcttaatacagtataccagttggtggctcctcgtaaattcgaggtcacttatgaaaacatcggattgcaggatgatgacattatcgttcgtccgacacatctttcgatttgtaatgcagaccagagatattatcaggggcttagggaagaacatatacttcgtcagaaactgccgatggcattgattcatgaagggattggtgttgtacttcgtgacccaagtggcgagtttgagccgggggaagaggttgtgatgataccgaatacaccggtagaagaagatgagtttattgcggagaactaccttcgctcaagtaaattccgtgccagcggatttaatggatttatgcaggaatatgttaaaatccgcaaggacagattagttcgtctgccacagggaatcaacaaagaagtagcggcatttacggaaattgtcagtgtcagtgttcatgcgatttcacgctttgaccgttttgcacatggtagaagaaatgtggtaggtatctggggcgatggtaatttaggttatattacggctgtatttttcaaaacaatgttcccggatacaaaactgtatatttttggtgtcagcaaagacaagctttctgattttacatttgctgacgcaacgtatcaggtaagtgacattccggagaatatggaattagatcatgcttttgagtgtgtgggtggagccggttccggaaaggcaatcgaccagattattgattttattaagcctgagggaacgatctctatattaggagtatcggagtatccggtaccgattaatacccgcatgattttggaaaaaggattgagagtattcggaagcagccgaagcggaagagtggattttgaaaagacggttgaattatatagagagcatccggaaattatcaattacctgtctaatattgtaggtgcggtaattccggttcgttcgatagctgatatgaaaaaagcatttgagatggacattcagaagtcctttggaaagacgattatgctttgggagaaatgaggtatcttatgatagcagtgattgtaccaatttataatacagaaaaatatttacgggaaacaatagacagtgtcatttgccagacactgtcttttgcagagcatatccggctgattttgttagatgatgccagtacagatggctcatttgccatttgtgagcagtatcagaagcagtatccaaagcagattgtagtaaagcactatgacacaaaccagggtgtttctgcacttcgcaatgaaggcgtacggattgccggagagatgggtgacgaacttattacctttttagattcagatgacaagttagcagatgatgcagtggaaaaagcgaaaatgtattttgaatcacatgaggatatttcggttgcggctattgctgtaaaatattttggcacaagagacggagagcagcgtttaaattggcgctttcaggaaatggatgttgtggacattaaaaaacaatatacgtttccacattattatgtaggtggcgttttcttgagaaaacgtgttttaaatgaacttcattttgatgagaccatgaatttttgggaggatgcgctggcgattaatcaggtgattgtgtcagaaggaaaatacggactgattcaggatacattttatttttatagaaagagagaggatgagtcctctttagtggatacggcatggcataaaaaagagcgttatacaacgctgttatcgtccggttatggacagttatttgcctactcaaggaaaaagcaccatcgtattattccttatgtgcagtacatggtagcgtatcatatgcggcttatgatgatgaaaagtaagcagagcattatcgaagaaattttatcggaagaagagttggcggcactcagagatgatgtgcagaaggtattaaaaaagataaaagtgaaatacattttacagattccaacgtcacttccgattattgagggaatgctctcaatgcgtgccgggaaacaggtgcgtgccaaacgtgtctacaaggacaatgactgtgtacttatgtataagggcgttgaattagccagaatgtccgagcgctctgttaaattattccatatcatagaagatgaggaatcggagtttaacggtatgtggagagggcgtttttgcacaccgatttacgctatgaaaaaagaagattatatctttgccgagcataacggggtacggattgattccaaagaatttatctgccgtaaacagatttttattcttgggaaacgtctgcgatgctactatcatgcagggtttgccattgcgattccgaaagaatgggatcgtgctgtgtttggaatccatattgcagaagcagatgcggatattttgatgaatgagattgtatttaatgaggtaaggctgatttattttgaaggggaaacagaagaacatgatgaattcgaaatcgacagagatgatgaaaaagacatgtaaagatcatttttttaaagcagggcaatggttttggtttgtgtttgtgtacggcattgctttgattgcctttagcagtttggtacaaaaatctttttttgcgatgcttttactgccgattgttgtttatggaatatatcatttttttatgagagaacgaattgcccttaaagagataaattatcagattgttttttatgtcgtaagcattgtttttgctgtgtttatgtttcttgttgcttattccgtgcgtgtgcagattttttcatgggattggggaaaagtaattcgttctgcaagtgagtatacattaacagataagttgacagatactacgtactttgcaagatatccgaataatcagttttggtattgtattttgacattctttttcagaatggttcattttatatggccggagacgggaataaatgaattttatttagcgtctatagcacttggatgtgttatgacagtggcatctatcgtgttgcttcatcacatagcagtgcttatttggaatgaaaagaaggcgttttttgttggcttaatgacatggttttgtatgccgttgtggttatgggctatgtatgcttatacggatatagcaggaatgcttttgctggtagttatgctgtattgctacacgaaggctgttttgagtgaacccggctggaaagttttttgctggttgtgcttatttggagtggctgcatctgctgcattttcagttaaagttactgtgtttattctctttattgcagttttcgcctgcttgttacttcaaaaaaaatcatggaaaaagattattgccggtattgtcattgtagcaatttcgtttggagtcggtcatgaattgtgtaattatgtaaagtcttctgtaattccgttagaagaatcgtattgcgatgcctatgaatttccgctgacccattggattatgatggctcttggatatgggggatatcagcaggaggatgtcgattttaccatttcatttaattcttatgaaaagaaaaaagaagccaatataaaagagatcaagaaacgattgaaggcacgttctttccatgaaagttttaaattttttggttatgataaacaagttagaacatggggagatgctacacttgccagctgcgtatatttagctgaagggccacaggagcctgacaatatattaaaacaatttgtgacattaaaaggaagcaaatactggatagctcttttgtatatgacgctatattatggcttaatacttgttgggatgtttttatcggcacgatttgcagtaaaaagaaaatctgatgcaaaagcggtggatatgccgatttttgcttcaagtattacgatgcttggaatagcattgtttcagactatttgggaatgtaattcaagatatttagtcgtatttattcctattatgattttgttagctgctgatggtttctttgcatggagagattatcttagagaggagaggataaagtgaaacactatcatttttcaaaatccgacacatcaattgcaaaattaattgctataactttgatgcttttgcatcatttatttggatttacggatcggattttgcctgagaatatgtaccagagtttatatatgtttcgcgggcagcctatagaagcagtaatttgtgcttcttttaaggtgtgtgttgcgttctttttgttccttagtggatatggaacatatctgagcctgcgtaaaagtaaatcaatttcgaaaatgattgcaaatcgtatatttcggtttttaaaatacatatggcaggttatgattatttttgttccaattgattttatattaggtgtgacaaaggtaaatcttacatcctcatggacaattcaatatgattttgaaagcattattcttagcatgcttggatttgaaaagtataatggtgagtggtggtttgttatgccatacatatttttgcttataatgacgccgcttatgtttcgatttttacagagaaaaaaagctgatttctttacggattttctcgttgtttttgggattgctttgttttctttgtatggtatccctaagttgatgagttatgatatgttgattgattttaaagggacagtatggggaattctgctttgcaacgttgtttacctacttccaatttatctatttggtatgatttttgcaaagtaccaggtattctcgtattatcatcagatattaccgaaaggaatattaagttaccctgtattattatttgttgcagctgcaggtttttatatgcgttataaaattggatcttcttatgactttttcttggttggacctatgatttatgcgtgtgttatgcttattaagaaaattccgggagttatctgggtgtcaaaaaaggcaggaagatatattacctttgtttggttgattcatagtttctacgtgtttcaatttggacagaaatttatatattccttcggaaatccgatattaatttttatcgtgctggcagtggtttcttttgcttcagcagctgctgtttactggctttttaccggattatccaaaggagtcaagaaaatcagatgctttcataatcggacagtgtaagtctgttttccaaaattatatcaatggcctcacgtacaggagcgtcgccggacttttgagtcagaacaaaatcaacatatggatgcaatgcggcagcgcagtcagccggtgcaaaggtaatgccggctgtttgcattgcagacagatcattcatatcatcaccaatatacaccgtttgttcaggagtgcagtcatatttcgccattacagttttcaagatatcagctttatcgcgaacaccctgataaagcacggtaatccctatttcttcgcatcgtctggtgacaatttttgaacggcggccggtaatgataataggaataatacccttttttattaagagtttaatacctaatccatcttttgcgttaaatgctttcattacctcaccgtcattaccaatataaatttttccatcggttaatgttccgtcgacgtccattgcaaacaatttaatttttgaaaaatcttttttcatgtgagtacctccggtattagtaattattcatccattaccgtttcaaagtaagatggtgtaatgaatgagatagggcagcttgattttcttgtatttttataatcaacaagcatgctttttatatctttatttgcttcttcagcatttaatgtatttctggttttttccatggctttttcaacgtaattcggattttcactattatggctgtaaccatcaaaacctgcgatggaaatgctattcacattcatcaggtctaacagacggagaagaagcacaccagaattatcgagctgctcccagccgcattttaccaatcgcagaaaatcgataataaagagattatcatcttttcttgtcgttacatttgatgtcacaatttttttgcatttattaaaagctgcttcattacgccaatactggtaccggtttttgttgctgaaatatgcaaaatcaatcggataacaatcggtgagaagattaacgctaattacaataggattcttctctttataaaaatgctgaatttgtccctggcaggttttaatcgtatgaccgggaagaagaaccaaaatatcttttccactgagtgcattttgaagtgatgcaatggcagaatcatcctcacagtgtgtattttgataatccaaataggtcttttcgagtagcgagtagtcgtaccgttttcgctccaccgggtccaaacggtttagcaaaaagttaatgtcgcggcttgcaattcctgcctttgctgaaaggtaggagatgttatttacatgcgcactgtgcgaaccagcaagaaaatacgggatggagtagccccattcataactgttatggaaaccgtcgatataattgtctataagatctaaaacaatatcaatatcataaccactattaaacttacggttcatatactgcatgacaagttctgtatttgtatttcctgcgccacgtcccatgcctgccattgtgctgtctacaacaatatcgcggagtccctggctcatatcgataaaatcctgagatagagcaaaggacatctgcaggttattatgtgagtggaatccaattttagcatttgcccacaaattatgatgaaccagataaaatacgcgctgtaaatcttcacgatacagagaaccgaaggtatcgacgatggaaaaggcatatggttccaattcatttattttttcaatcaagtctaaaagctcagcatctgtatatcctaatatgtcaacaggctgcacataaagtttgtatcctttattgacgattgctttacaaaaatcaataacttcaaaacgttcgcttttaaaaaagcaggcacgtacaccatcaattgaagtgccgtcataaggctctaagttatcaatatggtatcggctgtaatcggcaaggcagacataagatgaatgccttttgtctgtaggtaaaaatgagcggatctgtgcagcattattaaagatggttgtgccctcccgatgtggttcgtctttcagaaatccgcattcaataacatctatgccgctttctgttaaaccttcaataattccttttattgcggtattgccaaattgactgtcaatcaggtatgcaccatcgcgcagtgtacaatctaatatatttactcgtttcataaaaacctccctgttaaaattgatactaccattctgatggaagaagccaattctcatatggtatcatatgtccaaatgcgacaatggcccctttcgctgttggatagtagcggtctaccatgctatttttaattgcaagaagttccggggcaatctgttctcccggaattttattgcttgaattgtaatagcgtccaaaataatatagggtagcagatttattggtcatcttattataacattgtgttaccatttgggaaatcgttttgtgtaaaaactttccatattcaccaaaaggattatgagtggcaatcaaatcccattttttgtaggataagataagattaatatcttcctgcatagcatttttacatgtggaaagcatatcggtttcatattttccgttactaaatgtttttcggacgtccgggtaatccaaaatcaggtatttgtcatttgtcgtacgcattgtttgctcaaaggctgttcttcgttttggattccagccatgcgtcatgcagacaacgagatattcaccttctataagatgtccgccgccccaaagtgtctcgtcatccggatgtgcggtaatcatcactttttttatggaagttaagtcaaggttatctaacatttgtttcgtaatgtagccttttgtacgagtgattttaagattccagctgcatgtaagagctggatttgtcttatatactgcagtaatagtaacagtttcaattggacgaagggcagttactgtaccattttcatcaacggttgcagcggttttgttgctggatgtccatttgattcgatgatccgttgcgttggctggacctgtgactaactgcattttatgtgatgttccggattctaacgaaacaggattgttctttgcaaattctattgaggtatatggtatatcctcaatggtaatatgatgttttgccttttttttactttctttctcgcgaactgttatagtaacctttcctgcatggtgggatgtgacaacaccatccttattgactgtggcaacacttggattgtttgacgaaaaaacaagggtatcatccgttgtgttttttggagaaagagtagttgtcagtgctatttgttcaccaacatgtgcggtattttttccggaaagtgtgattttttttatcttgatgcgtttttttacttttaatttaaatgaagtgcgctttgctgttccttttaccgaagcggttatggttgtagaacctttttttttggcttttacaatgcctttttttgaaacagacgcaacttttttatttgaggaggtgaaaattactttcttaaaacgcgcattatggggttttaccaatgttttcaattccagtctatcgccggttgccatggcttcttttggtttgtttgttattttgattgatttggtacgaaaataggaaacgacacgtacagaagctgtaatatcgtttggtttaccgggaattttgagagaaattgtaacggttccctttttctttccggtgacggtgccatgtttgtttacagaagcaatgctggaatcactgcttttccatatccaagcggctttgttttgcgttgaaagtgttgaatctttcacttgcattgtagttttttttccgatttgtacggatttatcaggcatatcctgagctgcctgtactttgatataagtactgctgcatgttaaaaaaaatacagcacccaagaaaaataagatttttttttttatagtcataataataacatctccttttgttaaaaatcctttggtttataaaataaaaaacatatgtgaagaaaatatgtcaaatggacacattgttttttcttattatgttttccaccagtgcaacatgttccggtaagtccacaccaatggaagtgtagtttgtttcttttaagcgcatggtgtatcccttttgcagtgcacgcagtggttcaataccttcacctttttccaattctgtctgctccatatttgcaaattttaacaaaaaatcttttttataagcatagattccgacatggcgaaaaactcgtgctaattgaccgtcttttatattggacggaataacagagcgggagaaatacattgcatctcccatgtcgtttgttactacctttactgtgcttgtggcacggatttcatcaggatctgtgatttccttttttaaactgccaaaataaaccgagtcatcttctgtaaaaatggaaatcacttctcggatcatttccgggttaatgacaggttcatcgccctgaatgttgatatacaaatcgccatccgtgtgttcggcaacctctgctacgcggtcggagcctgtctgatgggtatcttttgtcatttttacattcatgtcgtatttttcgcatactgcacgaattctttcatcatctgtggcgacgtaaatttcgttaagttccttgactttcatagcctgatgatagacccagtatatcattggttttccgcagatttcaaccaatggttttcccggaaaacggctggatttataacgtgccggaataacaccgattatcttcattttgattcctccatttttttactcaaaacatcttcaagttttacgcgtggaaagatttcaagatttccaccgcgagttgcattatagatatgaatattatgtttctttgcatacgaatcaagaagtgcatatacttccatggagcggtctatgatgtgctccccaatttgcttggttgttaaagtatttgcatgcattcttgtcttgattcggttaatatcggtttctgcaacttcttttgttgtgtaattatctgtaaaatgtccacctttatcatgagggtttgtacaatccacaccgagcagataaatttctttaaagcccatatgaaacgccatttcggcagctagagaaagtacggttgccttaatcatgcagtatgcctgaatgtttccgcggactttgtagcgttcggttggaatggtatggacgtaagtggtatcgaccggttttttgcgcatgcggcgataggtgcgttctgttgtaaacagaggagcctttaccattttggaaagttcgatgccaagcttggatgcgtaaattgtgtcagatacacagtgaaatgacggacgccagtcggttttgtcaaaaattttgtataccatgtttgtaccgaaggtgtattcatctttcaataaatgtaaatcttcaccggtcagactgggaccgtttccaatgagaaaacaccgttctcctttgtgactgtccttcaaacgctcgaggcgtaaactattattgttatggaacattccgtgagagcggaaaaatccgagaacattataacgcagtaacagccataaaatgcgcattcggttgagcgtttttttagtatagtttacaaaacgttcgtagagggttctcttatgaggcagtgccctaagacacatatcaatcactcgtttgccggaattcccatcttcatatggattgaatttttggttaaattccaattgcttgtctcgataaggaaattcgcattcctgacggtggatggcatcaaccagttcctgttccgtttttgtgattggtcccggtaattcttccggcgacaggtaaagaccacgcacatcttgtttgtaggaatctgcgtcgtacatatgaaaaaccatcggacgcattaaatttgcatagtcaaacatggtggaagagtagtccgtaatcattaaatcactgactaaatacaaatcattgaccgactctacgtcacttacgtcatatatgacagggttatcttttatttttgctgctccaatttggtgatgggcgcgaaataaaagaatataatcgctgccgagcatgtccatcagtacattgacatcaaaaccatccggcaaggaaaatgccccattttcatccagtgatgagtcacgccaggttggtgtatagagaagaacctttttcccttccggaatatgtaatgcttcctttttcttttggatttcttcacttgtataatgaaaaagtttgtcattgcgaggatatccacttgcgacaaattttacagaaggatctccgattgcaaaagcagaagctattttttcactataataaggagacggagatggaaaaaaagttacttttttcccttttgcccggtatcgtctgtgcatatgagaacgtgtctgacgaggatcggaatctgtttcgatatcacagccgagtctctttaatggtgtaccatgccaagtctcgatatagatttgggtttttcgtggttttagataatcagcaactgtgatattgttaatccagtaacgagcactggcataatatctgcggtaggcagaagttcccttcttcaccagtatggtatgatggttttccagtaaatcaaaatgcgctgcagggtcagtgaatgcccacacaaaataaaacgagcggaatttttcatccttttgcagctcgtcatatatggcacgcacgctgtcagtggctttttttccgccataggattcaaagacaatatagttgtcagagactgtcgagtgcagttttgtaataccgtattttatccgatttttatagtaggacaaattttgtcttagcatgtaacgagactgcttgttcatggttgtatgttcctttccccaagtgttaatagatacctcatatactataacgatttataggtaaaaagtcaaatgttttgcaaatatatgaaaactgtggtataatgcccataataatgtgataatataggaggacaggtatgtcaaagggtaaaataatttatatggttgtaccttgttataatgaagaagaggtgcttgatgagacgacaaaacagttaagtgataaattgcaaaaattgatcgatgcaggtgagattagcgaaaaaagccggattctttatgtgaatgatggttcaaaagatcagacatggccgattatctgccgtctgcatgaagaatatacacttgtcagtggattgaatctttccagaaaccgcggacatcagaacgctgtgcttgccggccttatgtatgcgaaggatcattgtgatgcagcgatttcaatggatgctgacttacaggatgatattcatgctattgatgagatggtagataaatttaatcatggaattgatgttgtttacggtgtgcgcagcagccgaaaaaaagacacgttttttaagaaatttacggcagaaggattttataaaatcatgaaatggatgggggttgatattgtctttaatcatgcagatttccgcttgatgagtaagcgtgttttaatgcagatggaaaattacaaggaagtcaatctctttttgcgcggaattgtaccgttaatcggatatccggcagacaacgtatactatgaaagacaggagcgctttgcaggagagagcaaatatccgctgaagaaaatgttgtcgtttgcatttgacggcatcacttcatttagtgtcaaaccaatccgctttatattaagccttggtcttgtcatcttcttggcaagccttggaatcctgatctattcgattgtgcgccatgcaatgggtgcaacggtacttggctggagcagtcttatggtttctatctgggcgcttggtggtttacagcttcttgcgataggtattgtcggtgaatatattggaaagatgtatctagagacgaaaggccgtccgagatttgctatacaggatattctaaatgatgtagaccgggccgagtaagagttcagagattttgttttgatggggaaaggaatacaaaaagaaagtgatagtggaaaaaatacaaaattttttgtgtgtggcagcgaaaaagatatttctttgcgtacacatttttattgtggttatgattctgcttgagttcggaagacttgcaggtgatgtgtttccgttacattatcaattgttgaatgctttgctggcattgcttgggttgacagcaattttcctccttttttttatatgctgcacgagaaaaatagcaggttgtgtttgcaaaaaaaacagagttgttatgttttgcatattttatgcggtaattatatttgtgatgcagatgtatctgtgtaaatgtatctatttttatacgacgtgggatgtcggtatactgcagtcggcagcagatgttgtgacacatggtggaacaattcaggattggatcagccaaagaggagattcgttttctcagaattattttaatgcttacccgaataatatttttttgacgattatttttgccggaataaaatatctgtcatctttatttggatgtgtagataattattttcctacgattgttgcgggggtgatttccacagatgctgccattgtgtttactgtgatgactgtttggaaattaacgcatagtcgaaaagtgactttcctgtctataatcatttgcacagtttttttaggattcaacccatggattataatcccttattcagatacatacgtacttccttttttgagtgcggttttgtatttttattgttccatgaaagatgagaaaaagggttatgcatcatggataggaattgtgatagcggcttcgctggggataaaaatcaagccgacggtggtgattgctttgcttgcaattgttctggcagaaatattttttttgcgaaagtgccaaattaaggaaattgccgcaaaatgtttaattgttgcaggaggaaccataattgttttgggcctgataaatagtttgagtgatgctgtgtatgaccagcggaatggagatgcacaaatgacatggcagcattatctgatgatgggggcaaatgaggaaacatatggctcttattttggcgttgacagggagcgttcatggggaatatccgatccggagaagagaaaggaaatgcaaattgaggtgtggagacaacgtataagtgagaaaggcatttggggcacaataaagttttatatgcagaaattgataattgcaaatgatgatggctcatttgcatggggctgggaaggaaatttctttggtgaatatcgtggactgcacagtgaatttgcacaaaaattacaatctttttattatgcacaggataataagatgatttataatattttgcagagtatatgggtttctatacagattttggtttgtttctttgcaatattttttgataataggaataaaagagcacttttcattgcgatgacattgactgggattaatttgttccttatgatatttgaagtgcgtgccagatatttgtttgtatttgttccgttttatattacagcggctatgcttggccttttctatatgcaggaaaaagtcaagatgataaaagatagaaaatgtcatttgcaatagatagaagagaaggattaataaatcagtgagaaactttattcgcaaagcgaatcccttgtttcgagttgatttactaatccttctttttttatttcttgaacacccattctctttgaatctggaaactgattgcaaaaagcagggtgtcaataacacatttgcgaagtgtcgaataagtaataaatgtcagcagatgatcgactaaaacagcagacaacaaaagctgaacaattgccaatgtgtaatatcttacaaaaagaaatggcgagcttgagtcatttttaaacacctgatttttgttcacaaaaaagttaaatagcgaactggcaaaacgtgaaatcacagtccgcattaatataagcacggacaaatcgaaaaacggaagcatccacttgtcggagatgatcggacgaagcagatagccaagcagccagtacaaagcaatgtcgataataaaactggataaagagcttagcataaacttaaaaaacactttgtaaatccgaatcgaatcaatgaacggattaaaatgcgagctttcattatttgccagataaattgtctgaatcggaaattcttcaattggaatctggtattccttcgcagcaatcagcatattcatttcatattcgaaccgttctccttttacatttgcaaaatgctctcttatgagaggggttggaagtcctctgagtccggtctgcgtgtcagaaacatgtatgccgcataaaagccggatcatctgccgagtcaacttgtttccaaaacggcttctcagaggaatttccttgtcgtcaaactgacggcagccaagaatcaaagaatccggatgctcataggttagttttgcacaagtgttaatgtccggaagtacatgctgaccgtcacagtccacggttacggcacctttgatatccgggcgctgctctaaaatatagttaaacgcagactttagtgcaattccttttccgaaatttacgacgtggcggattattttgcagtggcaagtctctttgcatgttttaaaatactttcgattggcaataagacttccatcatcgaccaaaatgatattggaaaagccatcgtcgtgcaattgtccaacgagtgataccatgcgctcatccgggtccagtgccggaatgatgatggcaatactttctttataattacccaaaacatttccccctgtaattctggaatcgaaataatactgtaagtataagcctatatcgtctcagaatcaagcattcatgattgacattctttttttacattagctttttgctgcgtttgccgcatttcgtttggcacggtaacgctccgttccatcgagaatttttttgcggatacgaagattttccggtgtgacttcgagtaattcgtcagtgtcaatgtaatcaagtgcctgctctaaacttaattctttcggcggtgtaaggcgcagtgcttcatccgcaccggaagaacgggtattcgtcaggtttttctttttacatacattgacctcaatgtcatcgctttttgcgtgttcgccgacaatcatgccgccgtaaaccttttcaccgggaccaacaaacaaagtgcctcgttcctgtgcattaaaaagaccgtaggtaattgtttcgccggattcaaaagcaatgagagagccttgtttacgataagggatttctcctttaaatggaccatagccttcaaattctgtattgataacaccgtttcctttggtgtctgtcataaattcgccgcggtatccaatcagtccacgggctggaatgataaattccagacgtgtcatgcctgcatttaatggggtcattgcctgtaattcccctttacgctggctgaggcggtcaatgacatttccggtaaattcatccggtacatcgacataagcacgttccatcggttctaattttttgccattttcatcttctttataaagaacctccgctttgctaaccgcaaattcatatccctcacggcgcatattttcaattaaaacggataaatgcagttccccgcggccggacactttataagcttcggttgtgtcggtatcttccacacggagggatacgtcggtatttaacatgcggtataaacgatcacgcaaatggcggcttgtcacgtattttccttcctgaccggcaagtggactgtcatttaccataaaatgcatggcaatcgttggctccgaaattttctggaacggaattgcctgcggattttcaggactacacagagtatctccaatgtgaatgtctgcaatacctgaaatggctacaattgagccaatcgttgcttcttcgacttccacacggttgagtccctcaaattcatacaatttggaaattttaactttttcatttttatccgggtcatgatggttgacaataacggcatcctgattgacgcggatggttccgttatcgacttttccgatgccgattcggccaacgtattcattgtaatcaatggtgctgattaagacctgtgtgtcggcgtccggatcgccttccggtgccggaatataatttaaaatcgcatcaaagagcggcttcatgtcggtgcctttctcattgacatcgcaggatgccacaccttcttttgccgaggcaaagataaatgggcagtctaactgggattcatccgcatctaaatcgataaacagctctaaaatttcatcgacaacttcttccggacgagcttccggacggtcgattttgttgacacagacaacaaccggcaaagatagctccagtgctttctttaacacaaattttgtctgaggcattgcaccctcaaaagcgtcaacgactaagatgacaccatttaccattttaagaacgcgttctacttcaccaccgaaatcggcatgtcccggtgtgtcgatgatattaattttcacaccttcataggtaatggctgtattttttgataaaatagtaatgcctcgttcacgctcaatatcatttgagtccatgacacgttcggcaacttcctgattggcgcggaatacaccgctttgtttcaataattcatccactaaggttgtcttgccatgatcgacgtgtgcgatgatggcgatgtttctgatatcgtctcttgttgttttcatagaaacctccattcattcatgcaaaaaccacaaaatcgtattatagcacgattttttttgtgtggcaagttcgggcgtaaaacgctaaacaaaatgctaggtttttttgttcttttatggtaaaatagaattcatataaaaaaggaggtgctcttgtggggctgaaaaggaagaagtggttactggggacaggataataacggagatacgaatcgtttgcaggaatcccttttaattacagtaaaataataaaaagaatggagaacaaagatggaaccggaaattacagatatttttgaccgtattatgaattggaagttgcttcgatttatgtggcctttttataaaaaaaataaggacaagcttttatatttgttttttggaggatgtacaacacttgttaatcttgtgattacatatggattgtggtatggtttgaaatgggaacagtggtatgtcgggaaatttgcactgggcacgttccttggaaatttaattggaattgtgtctgctattttgtttgcttatgtgacaaataaaaagtttgtatttgcgtcgaaaacaacaggaatgaaagaacttttggttgaatttgttaagtttgttggcggccgtgtatccactttaattatcgaacttggcggtgttcagcttgctgtaatattgttccctgattctaatacacttttgtttgtggcgaaacttttgactcaggttttggttattataattaattattttatcagcaaattatttgtgtttaagggaacaaaagaggcatcttttgacaatcaagactaaattttaatttgaatttgtccgatatacagattacggatgcgaatgtttattttagaatcagattttagatagatgatatagaaaggtatggttatggatatgagagaacaaattaagaaaagattcaaaaaaagaagatatgcagtgcttcttacactttttgtgggggtattattttttctcctgcgtgggcagttttctcatgcggctgaccagatttttattcagtttaatggtgctgatttagacccggcagttacttatgacatgacgacaagcagtatgcagctgatgcttcgtacggaaggaacggcttatgatgatgaacgttataaggtagaatggacgattgaagatgctacagcccgtgacattattgcatcaattagtcctggtacatccaaaacaattggtattgtaaaggctttgtcacctggtgatgtcaccgttacagtaaccgttaaggacagtatggctggggatgctgtgttaggtagtacgacgtgtaatatccgtgtcgtattctcgatcgatacatcaaccgacgattcgatttataaatttgttcatgaaaatgacacggcaaggtctcttgtgatgtattcgaacagtgcaccggttaatcttggtttgaactttggttctgccaattcttcgaatacccagtggtcgagtgcgaatgaggaggtagtaaccgtaacacagagcggtggtcttgtttctccggttggtgccggtaagacgcaggtgattgcaacgtatacaccgaccggtggtgcggaaacgtatacggcatatctggatgtttatgttatccctcgtgtttcgacaaccaatggggcaaattatggaacggcgattgacgcccagttaaattccggtgaatgtttatacacggatacgaactttgcaaacaatctggaagtaatccgaagtaagattgtgtgggttgtaaaaaaagatgatgatcagggaaattcaaaaattattgcagattcccttggaaaagattcggatttgatttcgattacgccgacggcgagtcgaagcaatgaactgcggattgaaggaaaagcgggtgagtatgacctgtatttctatacttatggcagttatgatgaaaacgtggataatggaacaacagcatatacaccgaccgttgtgcatctgacaattaagagtgatattcaggacaaaacggagattttaagtattggtgatggatatcattttgcggaaagttataatatgacgctggaagattttaatgagtgtttcagtgtggatattaagatggcgcagggagcaccggattattccgaatatgcggactttgataatacaaaggcagaattaacggcaaaaaatgtcggtaacctagtggcaacgctgaccgtgagaagcggcagggaagcctatgttcgcagaattttaggacttgccgagaatgaggcgctgccggcggctttcacaacaaagattgatattacggataacattcagttaaatcggacgtcaatgacgattgtggttgggcagaaagagcagttaagtgttaaattaaatagtatttattccggttccattacatgggagagcagtgacccgaactatgtatcggtagacagactgactggtttgattgaaggtaagaaagtgacaacgcaggatgttgtgattacagtaactttggatgccggaaatggtttgtataagactgcaacctgtacggtaaaagtagaggctacggtatccggctttaccttgaatccgggaacggatcagcagatgttagttggcgatcatcttacagtagttgcaaacatcaaacagaccgttaccgttgcaccgcttcgctggattagcagcaatacttcggtctttacggtagaacaggcatcggacggcaagagtgcaattcttactgcagttggtggtggacgtgcgacgttgactgtttacagtactgtgaataacgagtacaaatcgtttgaggtgacggtgcgtattccaattaatgaaatttcatttagtgccgcacagatgcagttagagctttacaagagcggttataatatgaaagacgaagtgaagtggggtccaaccaatgcgaccgatacagcgcttacatgggctagttccgatacttccgttgttgagttagacaaagatggttatatgaaattcaagggagccggtacagcgcttgttagtgtgtatccgacctacaatccatacaatgtaatggcatcctgtctggtaacgattatcggtacgccggatagtatgacgataagtcagatggatgtgacgatgaatgtaggtgaggcggttccgttattagtagattttaatccgaaaaatacggcaaccggtattacgtggacgccaaatgatgatggtatcgtggcggtaacttatgatgaagaacgccgcattgctacattgaccggtaaagcaccgggaactacgaatattaatgtggtgacaaccgaaggtttgatatcgaatgtaaaagtttctgtgaaacagccgtcaacggcgttgaatctgacaccaaaagacgtaacgcttaagaccggtgacagtgtgaacttaaaggcaacctttacaccggcaaattcaacagatacgattgtatggaagagttataataccggtgtggcaacggttgatacgaatggccgtgtgaccggtgtgaaagcaggttcgacatttattcaggcgactgcttacaacggaaaagtggcaggaccgacgacagttattatggtgactgtgcaagatggtgtgaaaggagtttccttagactcatcagaaaagacggttcgagtgggcagctcgcttacgctgattccaatttttaatccggtaacagcttttaataaggcaatgacgtggaagacttccaatagtaatataaaaatagaggcggcaggtatttccaatctgaaagtaaccggtgtaaaagccggtacggcgatggtaaccggtacgacgacagatggtggattttctgtatcctgtttgattacgattctgccaaaacagaaagaaaatgatacgaaggtgacggtatcgccgaaaaccaaatatttggctaaaggcaagtcattctatgtgacagccacagttaccggctcaagtaataaaaaggtaaaatggacgagcagcaaaaaatcagttgcaaccgtgacttccggcggtaaagtaaaggcaaagaaattaggaacgacttatatcaaagcgacagcgaaggatggttccggtgcatacgccagatgtaaagtgcgtgttgttcgtaaagtgaaaaaaattaaactgaaccgttattcgggcagactgcttgttggaagtacgttgaaactgaaagcaactgttcttccgaaaaatgcgacgattaagtccgtgaagtggacgacgaataaaaaatcgattgcaacagtcagcagtaccggacgagtattgggaaccggcgagggtattgtaaagattaaggcttcggcaaaagatggttccggtaagtcagcaacttgcatacttcatgttgttgagccgattgaggcaacgggaattactgtggcaaacagccagattaccgtggcgaaaggaaagattgcccagtccggcattaccttaaatccggtcaattcgacgacgaagattaaatatcactccgataatccgagagtggcaaccgtaaataaatatggtaagattaagaccaaacgtgccggagaggctacgatttacggaacgacttcgaccggactgtatggttattgtgatgtattggttgtagatttaaaccgcaaggcagtaactcttcgtccatacgataccgaacagcttcatgtaaatgagattagtaccggtgtaacatggtattcaagagatattaacattgcaaccgtatcatcgaccggacttgttaccggacgtaagagaggtataacaacgatttatgcggttgtcaacggtgtaaaactcggatgccgcgtgaacgttacaaaattaaagtagtggaatgggaggagactattgttagtaaatttacatgtaaaaaactttgcgataatagacgagattgatgttgatttttcttccgggttaaatattcttaccggagagacgggagccggcaaatcgattttgattggctctatcggcatcgcgctcggtgcaagagtttcgcaggaaatcataggaaagcatggcgactctgcgatggtggagattgttttccagattgaagatgaagagacaaaagagaaattatcaagattaggtgtagacccggacgaaggacagattgtcatttcccgccgtattacgggaagccggagtgtaaaccgaattaatggtgaaaatgtatcggtcagtgtgattcgccaggtggctgccctctgcattgacattcatggacagcatgaaaaccagtcattattgcagaaggataaacatttagcaattgtagatgagtttgccaccaaacagtgtgtcgctctgaaacaagagattgctgctttataccgtgaatatacagcgctgaaaaaacagtggcaggatgaagatgtgtcagatgaggagcgtgcgagagaacttagttttttggaatacgaaaaacaggaaattgagcaggcatctttacaagccggtgaaatcgaagaagtggaagaagcataccgcagagcatccggcgctgagacaattgtggaatcgcttggtctggtacaccgtttgacaagtgatacggccgcgggagctgtgagccatgcgttgcagagtatgcagcggattacaggctttggtgatgaaattcggaacttgcaggaagaacttttgcagattgaaggacttttagatgattttaatcatgaaacagcggattatatgcaggacttttctttcgatgccaatgagttttcggatttagagaaaagactcgatacgattcacaatttgcaggcgaaatacggaagtacctatgaagaaatactttcgcatttgcaagaagtagaggataaactgcaaaaacttgcagattttgaacagtataaggagaaacttcttgctaaaataaaggaatatgagtcggatttgacaaagaaatgtgagcagttatcaaaagaaaggaaagaaaccgcttccattcttcaggaaaagattaaagctgctttatcagatttaaattttgcctatgtagattttgaaatttcatggagccgcaaagatacatttggtgcggatggatgggatgaagctgaatttttgattgcaacgaatccgggcgagccaaagaaaagcctcggaaaaatcgcatccggcggtgagttgtcccgtattatgctggcaattaaatcggtttttgccgaaaaagaccatattgagaccttgatttttgatgaaattgatgccggaatcagtggacgtacggcacagaaggtttcggaaaaactgaaacttttaagtaaaagccaccagattctatgcattactcatctggcacagattgcggcaatggcagatacccattttttgattgaaaagatggttgatgaaaatcattcggagacagtgattcgtccgttggataagtcgcagagtgaacaggaattggcacgtattcttggcggtgttgagattacagagtcggtacttgaaaatgcgagagagatgaaagcgttagcaaaccaaaaaagttcagatagttttcagaattagaaaaatagaagttggctatactaaacagaaggaaccaaaacaatagtaagttttgtaccttctgtttttattttgccaattatgggaggaatgagtatgagaaaaaaagttcgttttttgctggctggattattagtggctgatgtattattgattggatatttgatgtatgattatattcaaaataaaattcctgattctgttttgacttacgtcggggaaaaacaggaactggacctgccggcgttttttaagaccgagcaaagtgttccggctctgcatgtgcaaaatcaggatggcagtttttctatgaaatcaaaccggttaggaagttatgaggtatcggtccgcttatttggtgtgctgccggtaaagaggatggacgttaaagtggtgaaaaggaaaaagatttttccgagtggagagccaattggtatttatgtggagactaatgggctgctagtgctggatacgactgaggtcccggcaaaagatgggcttacttatgcgcccggtgaaaatttgttaaagccgggggattatattttggagtggaatcagaaaaaggttgctacgattcaaagtttaaaccgtgaaattcaggggacaaaagataaaaaggttacggttttaatacgccgaaacggagaaaagataaaaattgccatgcgtccggtgctttcatcagatggcacatataaaatcggaacatgggtacgggaggatacacagggaatcggcacgcttacttatgtaacgaagaccggtgaatttggtacacttggacatggaattacagatgttgataccgggacgctgttgaatttacacgggggtgaattgtttcagacgcagatagtcgatattatgaagggggagaaaggaaatccgggagaactgcagggatatatcaatatgattgcaaaaaatacgataggaaaaattaaaaagaacacggagcagggtgtgtttggtgagatgaaacaggagcgtgtgtccgcctattccggaaaggcgtatgaagttggcagaaaacaagagattgaagccggaaaggcgtatctgtatgcgaatcttgaaggcagggcgagaatgtatgaaattgaaattgaagatataaaaattaatgcaagggataataagagtatggaaatcagggtgacggataaaaagcttttaaaactgacaggcgggattgtacaggggatgagtggttcgccgattatacaaaacgataaaattgttggggctgttactcatgtttttgttgatgacccgacaagaggttatggaatttttattgaggagatgttggtgcagtaaaaagaaccgcatttgctgtcaaaaaccgaaactaggagtcgaaagatgatgaaatataaaaagaatataaataaaaaattaaaataatttagaatttactcttgtaatatggagaaaagaggtatatacttttaatcacattgagtttataaaaaatttataattatttcaagggggtactagttgtgcagaaattaaaagtattaattgcagatgataatccaagaatggcatccatgattcagaatattcttatggatgatgatgagattcaggtcgtgggaacggcagaagatggagtagaaacactgggaatgattgaggaaacggagccggatttgcttttgctggatttgattatgccgaaattagatggtcttggtgtgatggagcggctgcaggaaaagcagaagatgaaaaaggtgccggagattattgtggtgtccggtatttcgcaggaacgaattacggatacggcatttgccttgggagcttcatattacttattaaaaccattcgagtcggaaacacttctttctcatgtacagaaatttaaaccgggtgcgagggcaaaactcattgctacgggaaatgagaaccgaagaaatgaaaaaatggcgaaatataatcttgaatcggatgttaccaatatcattcatgaaatcggggtgccggcacatataaaagggtatcagtatttgcgggatgcaattatgatgtcagttgacgataaagaaatgttaaattctattacaaaaattctctatccttctatagccaaacaacatgggacaacaccaagcagagtagaacgagcaatacgacacgcaattgaagtggcgtggagccgcggaaaagtggatacgattgatgaattattcggatatacggttcataatggaaaaggaaaaccgacaaattcggagtttgtagcgctaattgcagacaagatacgattagaacagaaaatgaaagcctaaaaaaatcttttcaccgctccctttttggtgtataataataccaatatgattttgtgtcaaaaagaaaggggagaaggatattgaagaaagtattatttgttgcttctgaatgtgttccttttataaaaaccggtggattggcagacgttgtcggttcacttccaaagtattttgataagagtaaatatgatgtacgggttatgattccaaaatacactgcgataccggaagagtataaaaaccagatgcattatatcacgcatttttatctggaacttgcatggcgtaagcagtatgttggtgtgtttgaaatggaattaaacggtgttaaattctattttcttgataatgaattttattttagcggcagcaagccttatggagaaatttatcaggatattgaaaaatttgccttttttgataaagcggcgttatcaacactgcctgtgattgatttccgcccggatattattcactgccatgactggcagacggggctgattccggtatatttgcatgatgcattccagcagagcgaattttaccgtggaattcagtcaattatgacgattcataatttgaaatttcagggtgtctgggataaaaagacagttatggatacggcagggctggatgcatactattttacacctgataaattggaagcctttggggatgctaattatctaaagggtggtcttgtttacgcagatcagattacgactgtaagtaatacctatgcagaagagattaagaccccgttttatggagaaaaattagatggcctgattaatgcgaagtcggggtgtttgaccggaattgtgaatggccttgactacgatgagtataatccggcaaaggatccacttatttatgcaaattatgatgcaagaacatttcgcaaagaaaaaattaaaaataagcgcggccttcagaaagaacttggtctttcacaggatgataagaagtttatgattggtattgtgtcgagactgaccgaccaaaagggctttgatttgattgactatgtgatagaagaaatctgtgcagaagatacacagcttgtggtacttggtaccggagaggaaaagtacgaaaatctgttccgtcattttgcttggaaatatccggaccgcgtatcagcgaatatttactattccaatgagcgttcgcacaaaatttatgcagcctgcgatgcctttttgatgccatcactctttgaaccgtgcggattaagccagctgatgagtcttcgatatggcacggttccgattgtaagagagaccggcggactgaaagataccgtagagccttataatgaatatgagagcaaaggaaccggtttctcattcagcaattacaatgcacatgagatgctcaataccatccgctatgcaaaagatgtttattataatagaaagagagagtggaataagattatcgaccgcggtatggcaatggatttttcatggaagaattcagcgaagaaatatgagcagttgtatgacagaatgtaaaaaaatacaaattatttgaatttactcttgaattttattacggaattgggtagaataggttctagaagtttgtatattttttaacaaaccaaaattttaactatttttaggaggaaatatcatgtcagtaaaagtagcgattaacggatttggacgtatcggacgtcttgcattcagacagatgtttggtgcagaaggttatgaagtagtagcaattaacgatttgacaagccctaagatgcttgcacaccttttgaagtatgattcttctcagggtaaatatgagaaagcagatactgtttctgcaagtgatgattccatcacagtagatggtaaagagattaaaatctatgctttcccggatgcaaacaactgcccatggggtgagcttggtgtagacgtagttttggagtgctccggattctatacatccaaagaaaaagcacaggctcatatcaatgcaggtgctagaaaagttgttatctctgctccagcaggaaatgaccttcctactatcgtatataacacaaaccacgagacattgaaagcagatgatacaatcatctccgcagcttcttgtacaacaaactgccttgctcctatggcagatgcattgaacaaatatgctgcaatccagtctggtatcatggttacaatccatgcttacacaggtgaccagatgactcttgatggtcctcagagaaagggtgacctcagaagatctcgtgcagcagcagtaaacatcgttcctaacagcacaggtgctgcaaaagctatcggccttgtaattcctgagttgaatggtaaattgattggttctgctcagcgtgttcctacacctacaggttctacaacaattttgacagctgtagttaaaggaaaagacatcacagtagatggtatcaatgccgctatgaaagcagcaactacagagtccttcggatacaatgaagacgaaatcgtttcttctgatatcgtaggaatgagatatggttctctcttcgatgcaactcagacaatggtttgcaaagttgacgatgacacatacgaagtacaggttgtatcttggtatgataacgagaactcttatacaagccagatggttcgtacaatcaaatacttcagcgagttagcataagtcttgatttaggacaaggtttgaaattgatcccaaaaagggtccggtcggttggaccggaccttttttcatagaaataattaaaatggaggtttgttatgttaaataaaaaatcagtagatgatattaatgtaaaaggtcagcgcgtgttagtacgctgtgactttaatgtaccgcttcaggatggtaaaattacagatgaaaaccgtctggtagcagcacttcctacaattaagaagttgattgccgatggcggtaaaattattctttgctcccaccttggtaagccaaaaggagagccgaaaccggaactttctttggcaccggttgctgttcgcctttctgaacttttgggacaggaagtaaaattcgcagcagatgataacgtagttggtgaaaatgcaaaagctgctgttgctgctatgaaagatggtgatgtagttcttcttgagaatacacgttatcgtgcagaagagacaaagaacgaagataatttctccaaagaacttgcttctttggctgatgttttcgtaaacgacgcatttggtactgctcatagagcacactgttcaaacgtaggtgttaccaaatatgtagatacagctgttgttggttacctgatgcagaaagaaattgatttccttggaaatgcggtaaataatccggagagaccatttgttgcaatcctcggtggtgccaaagtttcttccaagattccggtaattgagaaccttttggataaagtagatactttgattatcggtggtggaatggcatatacatttatggctgctcatggtgagccggttggtaaatctcttttggaagaggattacaaacagtatgcactcgacatggagaaaaaagcagaagaaaaaggtgttaaacttttgattcctgtagataatgtagtggcagatgatttctcaaacgacgcaaactttaaagttgttgagcgcggtggtattccggatgacatggaaggtttggatatcggacctaagacaagtaaattgtttgcagacgcaatcaaaggcgcaaagacagttgtttggaacggaccgatgggatgttttgaaatgccaaactttgcaaaaggaacgattgcagttgctcaggcaatggcagatttgaaagacgctacaacgattatcggtggtggtgatagtgcttctgcttgcaacaaccttggatttggtgacaagatgacacatatttctaccggtggtggtgcttcccttgagttcttggaaggaaaagaacttcctggtgttgcagcagcaaacgacaaataataatataagattttgattctgtggtggtattttatatgccaccacagaaatttttggagaaaaaaacaataattacacatttagtgcaggttgagaagatattttgtataaggagtgatattttatgtcaagaagaagaattatcgcaggaaactggaaaatgaataaaacaccaagtgaggctgttgcacttgtaaacgaattgcttccgttggtgaaaaatgatgatgttgatgttgtattttgtgtaccggcaattgacattgtaccggttgttgaggcggtaaaggaaagtgatgtaaatgttggggcagaaaatctttattttgaagaaagcggtgcttataccggtgaaatttctccgaacatgcttgtagatgccggagttaaatatgtcattatcggacattcggagcgcagagagtattttgcagaaactgacgagacggtaaataaaaaggttttgaaggcatttgaacatgaccttaccccaattatctgctgtggtgagacgttgactcagagaaaacagggtatttacgtagattggattcgtatgcagattaaaattgcattccagaatgtaacggcagatcaggcaaaaaaagcagttattgcttatgagccaatctgggcaatcggaaccggtgagacggcaacagcagaccaggcagaagaagtatgtgcagcaattcgtgcttgtatcggtgagatttatgatgcggctaccgcagatgcaattcgtattcagtacggcggttctatgaatgccaagaatgccgcagaacttttggcaaaaccggatattgacggcggactgattggaggcgcttctttgaaaccggattttggtcagattgtgaatgcataacgcgaatgaactcgggaacttgttaaaaagtgaaataaactattgacaagaaccgtatcagtatgtataatatgtcttgtgtctgtcaaagagatggacacaagataaatgcgcgagtggctcagttggtagagcacaaccttgccaaggttggggccgcgggttcgagtcccgtctcgcgctctaatataaaaaagagtgattccaaaaggaatcgctcttttttacttcgagccctgccgtggctcgaagttcgaggtctcggctgccgcctcggtcgtagcaaaacggtgtccaccggacaccagctacgtctcgcgctttcatattaaaaaagagtgactccaaaaggagccactttttttacttcgagccccgccgtggctcgaagttcgaggtctcggctgtcgcctcggtcgactatactgttagaagtatttcgacaccattttcttcaattgcttttaagtcttcttctaatgcatcgtcatcagtaataagaacatctaaagcgttaataggacaaatgcttataatagaatctgtgccaattttactggtagggtaaagtccataaactttttttgcagacgcaagaagagtgttatacagacataaatttctggttcgctggatggataatccgaagtcagcaccacttgtttatgtgtaaaaaaacagatgtcaattctcttgaattacggaaactaaaaaatccgccatccgtttatttaacacaaacacaagcggtagcccttgcattttttttcatattttgataaactgtaaaattgagaatagaactaactatattattgtgttttagacgcagaaatgaggcagatatggaattaattagtatacgcgatttgtatcgcaaccaggaaaagtatgtagaacagacggttacggtcggaggatggttaagaagcgtcagagattccaaaacatttggattcttagtggttcatgatggaacatttttcgagccgcttcaggtggtatattcagataaacttgataatttttcagcaatttccaaattgaatgtaggagcagccgtgattgttacgggaaaagtagtagcaacaccgggaacgaaacagccatttgagattcaggcagatgaggttgttgtagaaggtgagtctgcaccggattatccattgcagaaaaagagacactcctttgagtatcttcgcacgatttcccatcttcgtccgagaacaaatacatttcaggcagtgttccgtgtgcgttctttgattgcgtatgcgattcataaattcttccaggagagagaatttgtttatgtacacacgccattgattaccggaagtgactgtgaaggtgccggtgaaatgttccgtgtgacgacattggatatggaaaaccttccgatgacaggagaaggaaaagtagattacacaaaggatttcttccgcaaagaaactaaccttaccgtaagtggtcagttaaatggtgaaacgtatgcgatggcgtttaaaaacatttatacatttggaccgacattccgtgcggaaaattcaaatacgacacgccatgcggcagaattttggatgattgagccggaaattgcatttgcggatttgaaagatgacatgatgttagctgagagcatgttgaaatatgttatccgctatgtgcttgagaatgcaccggaagagatgaaattcttcaaccagtttgtggacaagggactgattgagcgcctgcggggagttgtggatgcggactttgcacatgttacttataccgaagctatcaaactcttagaagagcacaatgataaatttgaatacaaagtaagctggggatgcgatttgcagaccgagcatgagagatatcttacggaagaaattttcaaacgccctgttttcgtaacggattatccaaaagaaatcaaggcattttatatgaagatgaacgacgataataaaacagttgccgctatggattgtctggttccgggaatcggggagattatcggaggaagccagcgtgaagatgattatgataagctggttgagagaatgaacgaatgtggactggataaaaaagattatgaattttatctggatttgcgtaaatatggtacggcacgccatgccggatttggtcttggatttgagcgctgtgtgatgtatttgacaggcatgcagaatatccgcgacgtcattccgttcccacgtactgtaaataattgtgacttataaagattacactaggaggttagtaacatgaatttaataattccacaaggctatcagtcagcgttagatatccgcgagactgaggtagcaattaaaaaagtaaaggatttctttgaaaaggctttggctgccaatttgaatctgacacgagtttcggcaccgctttttgttgacccggattccggattgaatgacaacttaaatggtgtagagcgcccggtttcttttgatattttggagcagaacggaagggtggcagaaattgtacattcattagctaagtggaaacgtcatgcgttgggccgttatggttttgctcatggagagggactttatacagatatgaatgcgattcgccgtgatgaagaaaccgataatgtacattctttgtttgtcgaccagtgggactgggagcgcattatcgacaaagaagaacgtaatgtagatactttgaaagctattgtaaataatgtatatcaggcattgatggaaacagaagattatatggcaatgcagtatgactacattaagaaatccctgcctgagcagattacctttgtgacaacacaggaacttgaggaccgatatccggacaagacgccaaaagagcgtgagtacgaggcagtaaaagaatatggtgccattttcctgatgcagattggagataagttagcttccggagagccgcatgatggacgtgcaccggattatgatgactggtcattaaatggtgatattatcgtttattatccggttcttgatatggcatttgaaatttcttccatgggaatccgtgtggatgaaaaagcattgaaagagcagcttgaaaaagcaggatgcccggagcgcgaaaatcttccgttccagaaagaaattttggaaaagaaacttccgtataccatcggtggtggaatcggacagtcaagaatttgtatgtttttcctgaaaaaagcacatattggagaagtacaagcatcgatttggccggatgatgtgtgggaagaagcatcgaagaaaggacttaatattttataatggataattttaccttttatgcgccgacttattttgattttggtaaaggcgccgaaaagcatgttgctgatttaataaaaaaatttggcggacataaagtgctgcttcactatggaggaggctccatcaaaaagagcggactttatgatactgtgatttccgtattaaaggaaagcggtttggaattttgtgaacttggtggtgtaaaaccaaatccaagaagcggacttgtttacgagggaattgaattgtgcaagaaagaaaaggttgactttattcttgccgttggcggtggaagtacgattgattcgtctaaggcaattgctgccggtactttgtatgatggagatttcatggatttttatcagggcaaggcatctgttgagaaagcgcttccaatcggaacgatattaacgattgcggcagccggcagtgagggttcgccaaatacggtaatcaccgatgaaaaaacaatggtgaaaaagggaacaaaaagtgatttgcttcgtccgaagttctctattttgaacccggaacttacctgcaccctgcctccgtatcagtcggcagcgggagcgacggatatcatgattcatgtttgtgagcgttatttttccaacacagaggaagttgagattacagaccgcttgtgtgaagcaattttaaaaacaattgtatatgaggcaccgcgtgtcattgaaaatccaaatcattatgaagcgcgtgcaaacattatgtgggcaggtatgttagcacataataatgtttgcggtgtcggtcgtgtgcaggattgggcaagccaccatatcgagcatgaattgtcagctctttatgatgttactcatggcgcaggacttgcagtaattgcgccgctttggatgcgttatgtctgtaagaaaaatccgggtaaacttgctttatttgcaaaccgtatctttgaggtgccgatgaatgagaaacatccggagaaaaccgcactcaaaggaattgaggcgtttgaagcatttttgaaaaaaatcggcatgccatcttctttcgcagagattggtgcaaaagaagaggatatcgagcttatgaccgataagcttttgaaggggcgtaagaccgaaggaaattatgtgaaattgaatcgtgatgatgtgattgcgatttatcggagtgcattgtaaaaattaaggaggcagatatggaccagagagaatttctacgtcagatggaagagttggtagattttggacgaacgaaagaaaatttgctcaccaaacaagaaattgccgattattgcagtgactggaatttgacagaggaacagatgccatttgtctatgcataccttaaagaacatcggattgaggtagaaggatatcgtgcgccggtagagaaaacggaagaagaggctgtcgaaaaaagcgaaaaggattccaaatatctgcgcttatataaagaagaactgtgtcagttaaagcggtacgaagaagaggaacttgtgcgtttactcgaacagttgcgaagaggcgaggaagaagtaatttcttctgttatcgaagcgcatctgcaccgggtcatgcagttggcggataaataccgcggccgtggtgtgccggtggaagatttgattcaggaaggtaatttggaattaaccgcctgtgttgcgatgctctgtggaaatgaagaagttgtggattatcaaaaagccattgaacatgcagtgagaagccggttgattgaattagtagatgaagaactggcaggaacggacagcgtgcatgcactgcttgggcgtgtgaaccttttgttggaggcaacgaggacattagcacaggaatacggacgtattgcgacaattgaagaactttccgaatttacccatatggatatcgaggaaattaatcagtacgtcgatttgtcccacaatgaaatagaactgggaaaaggtgaaaatgaacgaaaataaagaatttaaactggaggctctcgttgagcctctttgcttatggtatgaaaaggaaaaacgcagtatgccgtggcgggatgatgctacgccgtatcatgtatggctgtcggagattatgctccagcagacaagaatagaagcggcaaaagcatattatgaccggtttacaaggtgtctgccggatattccttctctggcagcagtttcggaggaagaacttctgaaattgtgggaaggacttggatattataaccgcgcacgcaatttaaagaaggcagcttctcttttggtggagcggtatgatggcaggctgccggccgattatgatttgctgctttcactgccgggaatcggcagatatacagcgggggcgattgcatccattgcttacggcttagcagagccggcggtggatggcaatgtgcttcgtgttacgatgcggtatttaaattgcgatgaagatattatgaagatgtcggttcggactaagatggaaaaacaacttcgtgccattatgccaaaggactgtccgggcgaatttaatcaggcactgatggaactcggggaagtaatctgcattccaaatgggaaaccactctgtgaaaaatgtccgctttctcatttgtgtcttgcccacaaagaagggcgtgagatggaactgccgaaaaaggcggagaagaaaaagcgccgtatcgagaaaaagacagtccttgtattccggcagggtgaccggattggaattgtaagacgaccaaatcaagggctattagccggtatgtgggaatttccatcaaaagaaggacatttgacgatgcagcaggtgaaagagtatttgtcagaaactgtatcctgtgaggtgacggtaaaacgattaaagagcggcaagcatattttctcccatgtggagtggcatatgtgcggttatgagattattcttccggaaggaaaaccacaagatgtagtgcatgggcttttgctttgtgacttgtcagaggtccaggaaaaatatccgataccggttgcttttcatattttcttacaccagatttgagtgtggaataacgtaaaataagggctttggatgaatttccggctcttatttttatattccgtaaaaacacatgatatagtgcatactgcaaaaaaaaatacaaaagaattacaatatatagtagacaatgcatacctcatttggtataatgattcctgtaggaaaaattatgaacgttagtattggtacggattgaaaggagttgtacaaaaagtgagggtaatcaaaagggatggccgaaccgtagaatatgaccgaaacaaaatattgattgcaatacggaaggcaaatgcagaagtggatacgtttgaaagggttaatgatgacatgattgatggcatcgttgccggtatcgagaatatgaaacgtgatacgatgcaggtggaagatattcaggatatcattgagcagaaattaatggc

SEQ ID NO: 544 - DNA, 25432 bp, unidentified
  source 1..25432: mol_type = unassigned DNA
cattttcgtgaaaaaaatgcagaaggcgactatgttggtggtcctatgtattacatcaaaaacgggcttggcaagaattggcagttccttgctgttttgttttcagcttttggtgttttaactgttttcggtacaggtaatgccacacaggttaacactattactaccgccattgattctgctcttttaaattataatgttatttcacaaaatggtgtttcaacacttaatttaattatgggtattgcaattactgttctcgttggacttgttttattaggtggtattaaaagaatcggtaaggttgccgaaaagcttgttccttttatggctttgttttatgtaattcttgccatcggcgtaattattttaaattacagacatgttcctactgtttttgcttctatttttgaaggagcttttaaaccttcatctgttacaggtggagttgttggcagcatatttatttgtatgaaaaaaggtgtttcacgaggtatcttttctaatgaagctggtcttggtacaggttcaattgctcatgcatgtgccgacacaagaaaacctgtaaagcagggattctttggaatctttgaagtttttgcagatactattgttatttgtactttaactgcccttgttattctttgcagtggcgttaacattgatttcggtaaagccgccggagcagaacttacaattcagggatttacttcaacttatggtaactgggtttcactcttcactgctgttgcaatgtgctgtttcgcattttcaacaattatcggttggggattgtatggtgcaagatgtattgaatttcttttctcatctaaggtcatcaaaccttttatggttgtttactcattggttgccattcttggtgcaacagtagacctgggacttatctggagcatagctgacacatttaacggacttatggcaattccaaacttgattgccttgttcttattgtcaggtacagtagttaaacttataaaagaatatactgaattttaaggatttaagatttaataaaaagtcggcttctcgccgactttttatcactgcatcattccattaaaaatgcctaacaatattatcactaaaaatataacaagtgtaattcttgctgcccatacataggttctatctatctttgttgtgtttttcttcttttcgaagccattctctttcgctatgcttagtgctctgctccaatcttcatctctaactacaactcgtttgaaaatattaaaatctgcaccttggactctaagatatccacctgctccatctgcatgtacctgtgccaaaatcccctgactttccaaaagacctacaagcatctgaatctcaacttcgttgtttgttgcgtatacttctttcatatgtttttcacctcattaattatgtacattccactactttcaattagtagttgattgttaaagcttaagcaaatttgaatccctttaatttgcttttactttatttacttgttgttttgttcattatacaattcctgtatttttttgtctacgacaaaatataattagtaaaaacacatgccaaagtcaaaacagttgataatcaatcaaaacttgttggcattttaggattttcatatgcttcaaagcacatcagcacttgctctcttgtacatttttccacagcaagattttcaggtatttcatcttttccgaagaatcctatctctgttgtttcgatgtttttctcaaactcaccgcatacatatttacactgaacaaaaatcttgattacaccataagcataatttgttacattgtgctttcgccaatcctgaacagcaataagcctttctgattttacagttagtcccgactcttccttaacttccttctccgtattagaagccaccgactgatcaacgtcacaccatcctcccggcaatgaccatgtgccattattttcgtgaacaagaagaatctttccgtcaacgaatactgctgctcttgtgtcaactttcggtgtttggtaacctgtttcattgcaaaacagattgtaaactttttctgccgaaatgtttgttttagctgaaatcatttctgctgcaatacgtcttatttcttcatagcgttctatgtcatatttgtcttttccatattgcaatcctgcttgtgctatactttgaaggcgaattgcaaaatcaatccacttgtcgttcattgttgtcacctcctgatttaaattatttcccttgttttttttttaacagtttaacatgatttttttacttaatcaatcccattacaagtgtcgcaattcctgctaatattgcagcaatcacttccaaagtccgctcaaaaaatctctggcgtaatttattccataaacacataccaaaatgtataacacatatcccggaacgcaaatcaatttaaaaaccttactgtttttgcttattttttctcacaacactactaatactgttatctctaactcaaactttccactctattctttattattctctttaaaaacacatatcctaccagacacgccacaatctctgttattggaaatgcccaccatattaatgatactcccatctggccatttcttacaaatattgagaaaattcctgccaatggcaatataagcactagctgccttattaatgaaattataagtgactcgattcctccgtccagtgcctgataaattccctgatatgccacatttattcctgcgaaaataaagctaatagaaataattctcattgcccagataaaatattctcttgactctcctgcattaaataatgttgcaaaagctcccggaaatacttctgtaatagcaattcctagaatcattaatgtcattgtgtatgcaagaccatatttgatgccatctttgattctctttttgctacccattccataagcaaaagctattataggtgttatggcatctctaagtccaaatgcaaggaatagtacaaactgctgcactttgtagaaaagtccatatgctgtctgggctgacggactaaatttcaaaatcaggttcattacataaaccattatcgacataagtgcctgtgcaataattgccggcagtccaattgaatatatttccttaattattctgccttcaggcttcatatatttaaattcatgctcaaattctttatttaactttatatgaaaaacaaacaataacagtgctgatgaaatctgacctattacagttgcataagcagctccctctacgcccatttcaggaacaggtccaataccataaatcataattggatctaaaataatatttaccactgctcccacaacctgacctattgttgaataaagtgaacgacctgttgcctgcaataacttttcaaataatgaaaagaaaataatcccaaaagaaataacacaacatattctaagataacttgtccccattgaaataacttgtgaatcaactgtctgtgatgaaatatatattttcaccccaaaaattccaaacagcaaacatactgcataaataattgctccaagaaataaactgtttcctgcaacttttgcggcttttttattatttccctgtcccaaagttcttgcaagaagtgcgttagttccaacacctgtaccaataccaactgcaaccataagcatctgaaccggaaaaaccagcgtaagtgcattaagtgccgcctcacttcctgtcttcatatttcctacaaaagcactgtccacaatattgtaaactgcctgcaatgccattgacaaaatcattggtaaccccatctgaaccattaacttatttaccggcattttcctcatcttgttactttctgccattttaatttaaccctcctaactgcaaaaaagtgtgcacttatcttataagttggacttacgctgataagctacacacttttttaatgactttatataattccaatgcattttccataaaagaaaaaacgagtagcaaaaactggatttacgctagtttgctactcgttcagtagtttattatatttatcattttcaaaaaagtcaaacgaattttttattcattatcatatgaatgaaagaactttgacagattattcaggctttttagaagtacctttacttcatcttcgctcatttcactaatagctgcctgtgacattttctcatgaaactcttcatgatgtttataagcctttatacctttttctgttaaagttatattaacaattcttctgtcttcctcgcttctgtttcgctcaacatagtgcttctttacaagactgttcatagaagttgtaagcgagcccacagttatcttcatcttcttggcaattgttgtcatattgttgccttcgccaagtcctacggcctcaataatatgcatatcattgtttgttatatctttaaattcttcagttataatcgccttttcttccagttcccatatttcctggaacaaatgcactaatacatcattaattttttcaaatgttgtcatcaatctctccatttaatttatctacggttttgcatctacttttaatattaacattatttaagcctattttcaaataagaatttaaaataaaacaattcaaaatgcaaacttccaaataaaactttcaaaataattcggtatacaaaaataaatcaatttaaacttctttttcttccagcagttctttaaataccttctttacagttgtaattttattaactttgtacgcatctgctccgcaaaatagtaacgcctcatctgtttttccctttgctgcatatattaatctttccgttatgcaataaggaatttctttaggattacatcttgcaaggcaacctaaacatttctttggtgtaaatttttcaccatttattactttttccataaatttattttttatggctcggcctggcattccaacaggactttttactattactatatcttcttttttggccttgatatattcttttttgtaattttcatctgcatcacattctttagttggcacaaatcttgttgctacctgaactccttgtgcccccaagtcaaaagcatgtttcaccttatttttgtcacttattccaccggcaacaactacaggaatgtctttgttgtattttttttcatattcttttacaacatctattattccttgaatttcattgtcataatcaagttcactttcaagttcttccaccgaaaaacctaaatgccctccggcttttggtccctcaattataatcatatctgctgttgcgttatgtcttctgtcccaatattttaaaataacttttgccgactttacacttgaaacaattggagccatcttcgttttaaaacctttaagatattctggaagttctgttggaagacctgcccctgacactataatatctgcccctgcttttgcagcttcaataacatgctccctgtaatctttcagggcaaccattatattaaatcctataattccatttggtgaaattcgtcttgctttttcatattctttctttattgcttttttgttggcaagtcttggattattttcaaaatcctcttccttaaacccgatttgtgcagaagaaataattcccactccaccttcttttgccacggctcctgcaagatttccaaggctgattcctacccccattccaccttgtactatgggcctttctgctattaaatctccaatctgtaaaggtttataattcatccataactccttatttaaactgctttctaatatccattgctaaaaaagttgtatctttcatctactaattgttccttagtaatttttgttttttcagcaaggaatttcacaatttctttatccattttttccgtaattttaggtaacgtatccgttgtatatttttcaggttcaaagaaaaccttcttaattattcccatttcttttaaatcttttgcagtcattttcattgctcctgcagcttccttagccctcttgctgtccttccagagaatactggcataaccttccggagacaaaattgaataaactgcattttccatcatccatacttcatctgcaacagccaaagccaacgcaccgccacttccaccttctccaattactattgaaagaatcggtgttctaagtgatgacatttcaaaaagatttcttgcaattgcctctccctgaccgcgctcctctgcttccaagccacagaatgctcccggtgtgtccacaaaacaaattaccggtcggttaaatttctctgcctgtttcatcaatcgtaaagcctttctgtatccgtcaggtgatggcattccaaaattatgttcaagattctcttttgtgttatgacctttttcctgtgcaattaccgtaaccggcattccatgaaaagatgcaatgccaccgattattgcctgatcatccttaaaatatctgtctccatgaaattctacaaaatcatcaaaaagcaaatctatatagtcgctggcaataggtctatcattcattcttgacgccaaaaccctatcccaagctgactttttaactgactcagtaatcattttaatcgattctcttttcttctgagccattgttgatttttctttttttatgttaaaattatctgtgtaagacttatcatcttttttatgcaaagtaagaattgttattaacctatttcttaaatcttttcgctctactatcccgtcaataaaaccgtgttccaaaagaaactctgacctttgaaaacctttaggcaatttctgtccaatagtctgctcaattacccttggccctgcgaaaccgattaacgctttaggctccgccaaaataatatcaccaagcattgcaaagcttgcagtaacgcctcctgtagttggatcagtcaaaactgaaatatataaatttcctgattcactatgtcttttcaacgctgctgaagtctttgccatctgcataagagaaaccattccctcctgcattcttgctccacctgagcaggcaaaaataataaccggaatattttcttttgttgcatactccacagtttttgcaatcttctcccctacaacttcacccatacttgccataaggaaacgcccgtcacaaacggcaatagccaccgaattgccaccaattgtggctcttcctgttgtaacagcctcatcaagcccagtcttatcccttaacgcctgaacttttgcttcatagcctttcatcttcaatggatttcttgtattaagtccttcaaacataggctcaaaactatccttatccacaaccatctcaattctcctgtaagcatgaaccctgaaataaccgccacacttaggacaaatataattattattcttcacatcttcagccaaaacaatagagctacacttcttgcactttctgagaagaccgtctggcacattggaagtgttgaccttaattgtaacgtaatctttattttttctatcaaataactttttaaatttcataaacctctccatctgctacttttttatcccttctcgtggaagaatttttctgacgcaaacacgttgaatttcttattttgctccgccgcctattgtacagtgaaaacttaaactcgccttcggctcaaacagtaagtttatcactgtacgctatgctcgcaaaattgcaaaattctgcctattgtttgcttgtcaggaaaattcttccgcgagaaatagcaaaataatagctccatcaatttttatgctatgttttcaatgtttttgttgaaattttctataaagtttacatcaaagtgtccgctttggaaaactgaatcattgagaataccatacaagtagtccacgtttgtgtcgattccttctacgattacttctcccagtgcgcttatcattttctttatggcttcttctctgttttctccatgtactattagtttggccagcattgagtcgtagtatggtgttacttcatagccgttgtatactgctgagtctattctgactccgttacctcccggtaggtacaggtcggttatgactcccggtgatggtctaaagtttagtagtggattttctgcatttattctgcattctatggcatgaccatttatttttatgtctttttgtttgtatgatagtggttgcccatctgctatttttatttgttcttttattaggtctattcctgttactgtttctgttacaggatgttcaacctgtattcttgtattcatttccataaaatagaatttgtctttatccaaaaggaactctattgttcctgcgttttcgtattttgctgcttttgcggcacgtactgctgtgtcgcccattttttttcttaattcatctgacagaattacacttggagattcttctatcattttctgatgatttcgctgaattgaacagtcacgctctcctaaatggattacattgccaaatttgtctgctaatatttgaaattctatatgtcttggattttccacaaaatgttctatatacattgttccatcatcaaaagctgcttcgctttcttttttggctgcgttaaatgcctgttcaaattcttcagggccatacgccacacgcattccttttccaccgccacctaaagctgcttttatgattaccggatatccaacctggtctgctattttctttcctgttttgctatcatatatctgttcttcacttcctggaattacaggtacattggcctctatcattgtttttcttgcaactgacttgtttcccagattatacattacatctgattttggtccaataaaaataatattgcactgctcgcataatctggcaaatttgctattttctgacaaaaaaccaaatccgggatgaattgcatctgcacctgttgcaattgttgcgctaattatactttccatatttaaataactttcacttgcctttgtttcccctatacaaatagcttcatctgctaattgtgtgtgaagtgcatctttgtctgcctttgaatatacagctacagtctcaatacccatttctctacatgctcttattatccttactgctatttcacctctgtttgcaattaaaagtttctgaatcatatcattctccaattccaggcgggttaaagttgttacccaaccataaatgtaagttctgcttttgccacaacttttccgtctacgcttgctattgcctggcctattcccataggtcctttctgcttaataatttttgtttcaagttttaatttgtcccctggcactacttttcctttaaatctacatttatttattccaccaaagaatgctgtctttcccttaaaaccttcctgactaagtattgccaccgctccaacctgcgcaagtgcctctatagtaagtactcccggcataaccggctcctgtggaaaatgccccctaaaaaaatcttctctaaaggttacgcatttgtaaccaacggcatactcccccggcttatagtcttcaatataatctactaaaagaaaaggatgtctatggggaataatttcttctatttctttaattcctaacattttttaattcctctttttctactctacttcaaataatggctgaccatattctactgtctgctcattttcaactaaaacttttgttacaacgccatcaaattcactttcgatttcattcatcagcttcattgcctctactattgcaactacctgaccttttttcactgtgtctcctacctgaacaaacggctttgccccttcttccggtgcaagatatacagttccaaccaatggagaattaattacattgcctgttaaaacttctttctgttcgatactttcttctgtattttcctgtttaactaaaacatcttgtgctacaggttttggtgaagcaataacttcaacttctgtctttttttccaaatgcagttttgctccattttcttcataatcaaatatgtcaattttagaatttgaaatagcattaattaaatcttttatttcacttatatccattttcatcacctatttttcatattttttaactgctaatgttccattatgtccgccaaaacctaatgaattgcttaaagctactttcacagtgcatttttcccctgaacctttcatataattaaggtcgcattcttcaccttcgttttcaagacctattgtctgatgtatgtaattgtcctgaattgacttaacacatgtgataaattcaactccacctgctgcacctaaaagatgtccaatcatagattttgtagaattaattttcacagacttagctgcttctcccaatgccaactttattgctcttgtttcaaataagtcattatgatgtgtgcttgttccgtgagcgttaatataatctacttcctcaggtttaactcctgcttcttccattgcaagggtcatcgccttagctgcaccacttccatcttctgccggagatgtaatgtgataagcatcacatgttgcaccgtatcccacaacttctgcaaatatgtttgcacctctgtttattgcatgttgtaattcttctaacacaacaattccggcaccttcacccattacaaaaccgcttctatctttgtcgaaaggtcgtgaagcttttgttttatctgtttcttttgtaagtgcggtaagacttgaaaaacctgccacgccaataggtgttatggcactttctgttccacctgctaccattacatcagcctcgccatattttattgttctaaaagcttctccaatacaatgagttcctgtagcacaggctgttacaatgtttacgcattttcctttaagacctaagtctatagccacatttcctgctgccatatttgtaatcatcattggcacaagcaaaggttttacccttgaaggtcctttttcaagaagcttgacatgttcctcttccatatctcccaggcctccaattcccgagcccacacttacacctactctgtatggatcttccttttccatatctatacctgactgagcaaaagcttcttttgcagcagctactgcatattgtgaaaaaggtgaaagtcttttcgcctgtttaaatcctaatacttcttttgcattaaaatccttaacttccgctgcaagttttgcactataatctgttgtgtcaaacttagttatttcgtctattccaagaactcctgccttaacgttgttccagaaagtttctacattatttccaataggtgtaattgcacccattcctgttactacaactcttctctccattacctatctcctataattacattaccattccgccatctatgttaataacctgacctgttatataatcgcttttctctgaactaagaaaaagtgccaattctgctacttcctcaggtttgccaaatcttccaagtggtatttgtcctttagctccctctttaactttgtctgataatgtaattgtcatatcagtatcaacaaagcccggtgcaattgcattaacattaatattccttgaagccaattctcttgctgccgactttgtaagcccaataatacctgcctttgatgctgaataattagcctgtcctgcatttcccgtaactcctgatacagaagaaatattaataatttttccttttctctgctttaccattgttcttgaggcaaatcttatagtattaaatgttccttttaagttaacattaataacactgtcaaaatcttcttctttcattcccatcaaaagtccgtctcttgttattcccgcattatttacaagaatatcgattcttccatattctttaacaatatctccaataaacttttcacacttgtcaaaatctgaaacatcgcatttatatgaaactgctttaccaccattttctctaatctctgcttccaaagcttgtgccgcctgaactgagccctgataattgatgattacagttgcaccattttctgccattttctttgctatggctgcgccaatgcctcttgacgctcccgtaattacagctattttttcatttaacataaaactctccatactgtttttattttaatatgctctctccatatgatttacaaacttttcgtcatagttttttatcataatatttataaactgatttcctttagtttatctaaatcatctaccgtgctaatattgatgcatttaacatttctgtctatttttctaataaatcctgctaaagttttaccagggcctatctcaacaaaagtatcaacaccattattaatcatatttcttacactttgctcccatttaacaggtgaagaaatttgtttaaccaaaagttcttttgtttttgaaatatcgcttacatattcccctgttacatttgtaacatatggaatttttaattctgttaaattaattttttccaactccacagacattttttctccggcagttttcaaaaattttgaatgaaacggaccgctaacattaagttctattactctttttgccccactttcatttaaaacttttgctgctttttcaactgcaggttttaaacctgtaataacaatctgacccgggcaattgtaattagctatgtccacatcttctatgtctaaaattaattcttctatcttagatgtttccattcctaatactgctgccatagctcctgcttttttaggattgtccgttggaaccgcttcatccataaaaattcctctttttctaacagccacaatcgcctctttttctgtcattccatgggctgctacaattgccgcgtattctccaaggcttaagcccgctgctacatcaggctttataccaagattttcaacttcttttgtaattgcaagacaggttgtaaccaaagccgcctgtgtatattttgtattatttataagttcattttcttcaaaacaaatattttttatgtcaaaatccaaaactttatcagcttcatcaaaaattcttcttgcattaggttttgtttcataaaaatcttttcccataccaattttttgagcaccctgtcccggataaataaatgctatctttcccattttatgcctttcttaaaatcttgttttaaacattttttcaaatcaatgtttaattacaatcttcgttatattgtaattgctttgtatttcaacttctttttattgaattagaattttaatcaaatcctttgcttaaaagttgttctccttgtgtcataacttttgtaatcaaatctttacaggaacttatttctttaacaagccctgcgctttgacctgccattacactaccattttctacatctccgtccacaactgcttttcgcaaaccgccaagcgtaagtttttcaagctgttccagacctgcaccttctgcctcaagtttaaggtatgtattagtctgtttgtttctaagatttcttacgggatgtcctgtgcttctgcctgtaacctttgtgtcaatatccttagcttttacgattttggctttataattgtcatgaactgttgattcttttgttgccacaaaagaagttcccatttgaacaccactggctccaagcataaatgccgctgcaattcctcttccatctgcaattcctcctgccgcaacaacaggaatgtttactgcgtctacaacctgtggcacaagaaccattgttgttatttcaccaatgtgtcctccggcttctgttccttctgcaattaccgcatctgcaccgcacctttccatcattcttgccatggctactgaggcaacaacaggcattacttttattcctgcatttttccacatttccatatattttcccggatttcctgctcctgtagtaacaaccttcacattatgttttgctactactttcgcaatttcatcagcttgcggattcataagcattatattcacgccaaaaggcttatctgttaatgtttttgctttaataatctgatcttcaacccacttagcatctgcgccaccggctcctataattccaagcccgcctgcattagatactgccgctgcaagattggcttcagcaacccaagccatgcctccctgaataatgggatattcaatttctaaaatttctgttaaagctgttttcataatcgcctcgttttgttttctgattttttaaactattttctaattatttttagttatcttctatttttttctagcttttaattatctttctgactatttttatttgttcttttcaatgtaatcacaaacatctccaactgtcttaatattttcaagttcttctgttggaatctttacttcaaattcatcttcaaacttcattactaagtcaaataagtctaatgaatcagctcctaagtcttcatcaaaagttgtttcctttgtaattgttgctgcgtctgctcctaattcttctgctattaattctttaatcttttcaaacattttattttttcctttcatttttcatttttattttgtatgtaatccggctaaccggtaattacctatggtttataatttgttttataattttctaaaactccaaataaactgctgaccatgtaaggcctgcgccaaaacctgccattattattttatttcctttttgaatctttccatcccttaccatttcgtcaagtaaaattggaatgcttgccgatgatgtatttccatactcgctaacattttcaggaattaaatccattgaaacttttaatcgttttccaatgctttcaagtattcttttgttagcctgatgtaacaaaaacaaatcaatttctgatttttcaattttcatctttgaaatcagttcttcaatacactcagggacttttcttactgcaaatctaaaaacttcctgcccattcatagatacaaatgtttttttagaatcatttattttcctgtactgtattgaattctcacatgttaatgcacctcccattgaaccatccgaatgcattactgtttcaaatcttgctttttcatcttttttaataattgcagctcctgctccatctccaaaaagaattgctgttgttctgtctgtccaatcaactatttgtgacaagccttcagctccaatgactaatgccgtttcaaccaagcctgcgtttatgtaactttgtgcaatgttatatgctgtaataaaacctgtacatgccacattgatgtcaaagcacatggcattcgttgcctttaactcatcctgtacaatacaggctgtacttggcaaaatagtgtccgacgatacagttgatacaattatcaaatcaattttttcacaacttattccggcattctctattgccttttctgccgccctgcacgccatataacttgtactctcatcggtcataatatgtcttctctttattcctgtccgctctcttatccactggtcatctgtttcaaagaactcttttaagtcattattacaaacaacattatccggcgcataagaacctgttcctataatctttccaaacataaactcaaaaatcagattgaattcccaaagtaattcattatcctttcaaaaattattcaaaacactttaatcaaaataggttaagcaatcacatttatttttatttaaaattattttgttttaaaattttttgattataaagtgttttgactttcaaagtatattattaaaaaaataatttgtcaacaccttttttaagatttctctcctccttttctgtacaaagtcgcccagggcgttgtctacgctcattggatacaataaatctgcccttctagtgtcattacgtgtcatatgctaaaaatgttgtagctttcgtaatccccaagtttcacaaaaaaagccgggctacgcatttgtaccgacctccaatcgttagatttttaggtctaacttttggggggcggtacaattttcaatgcgtctcccggctttttattctatctggtttatgactattccctgccatctctccagacttatattctaatagccataaggtgttcccttaccgcttccttcctttaatcttgccattgctcttgctaatgatgcctttgaaatatgatattcagcaatactttgcttctgacgaagctgttcttctgctctttctttggcttcctcagctcttcttaagtcgatttcttcaggatattcacaagtgtcaactataactgtagctcgattgtttaccatctgggcaaaaccagtccctgttacacctacaatagtgctaccgtcttcctttgtgatttttatttctcctacctcaacagaaaataccatattttcatgatgagcctgaatggcttttgagccatcacgaagaggtaaaactaactgagtgcatcttccactatagaatatcttatcgcaagcaataacttttataccaaatgaattactcatagctcattcctcctagtttgcggaactttctcctgccattgtctttgccttttcaataacatcatcaattgttccaacattgaaaaatgcagcttccggataatcatccatttcaccatcaattatagccttaaatccacgtactgtttctttaagtggtacatactttcctggtacacctgtaaagttttcagctacatggaatggctgtgaaaggaacttctgaatctttctagctctatatacaacaagtttatcttcatctgataattcttccataccaagaatagagataatatcctgtaattctgtatatttctgaagaatttcctgaactcttcttgctgtttcataatgttcttttcctacaacatcttcctcaagaatacgtgaattagattccaaaggatctactgcaggataaataccctgttcaacaatctttcttgaaagaactgttgttgcatcaagatgagcaaatgttgttgccggagcagggtctgttaagtcatcggcaggcacatatacggcctgaactgacgttacagaaccattctttgttgatgcgattctttcctgtaattcacccatttctgttgctaatgttggctgataacctaccgctgatggcatacgtccaagtaatgctgaaacttctgaaccagcctgtgtaaaacggaaaatattatcaatgaataacaatacgttctgatgttcttcatctctaaaatattcagccattgtaagacctgtttcagcaaccctcatacgtgctccaggtggctcattcatctgtccaaacactagggcagttttatctaaaacacctgattctttcatttctgtccataaatcattaccttcacgggaacgttcaccaacacctgtgaatattgaatatccaccatgctgtgttgcaatgtttgtaatcaattcctgaataagtactgttttacctacaccggcaccaccgaaaagaccgattttaccaccttttgcataaggtgccaaaaggtcaataaccttaatacctgtttcaagaacttctacaacagggctctggtcttcaaatgatggtggatctctgtgtatacaccaatgctgttcaccatctaatttttctccattatctaaagtatctccaagaacattaaataatcttccaagagtcttttcacctacaggaacagatataccacttcctgttgcaacaacttccatacctttatgaagaccttcacttgctgcaagcatgatacatcttactgtattatttcctatgtgttgcgcaacctccattacacaacgctttccattgttatctacttcaagcgcatctttaatatatggaaggttgttgtctgcaaattctacatccactacaggtcccataacctgtacaatctttccttttaacatatggtttcgattccttcctatttcttcttctgtgccttagcaccaccaataatctcagtaatctgctgagtaatggctgactgacgcacacgattatattcaatcgacaactgttgcaacatatcttttgcactatctgttgccgcctgcattgccatcatacgtgagctatgttcacttgcaaatgattcaactaatgctccgtaaatgaaacctgttacacagtttggaacaatatgctccagaacttcctttactgatgtatctgtcttgatttcttcctgatacatatctataggaggtctgttcttttcaaactgttctctgtaacatggaagcaaacgcattttttccgtaaccatagatacagaattttccatttttgtgtatataacatagatttcatctaattctcttttgttatataactccaaaactctctctgcaattacacgggctctatgaagtgatggattctgaactgtatatttaaattctgaatcaacctccataccctcttttgcaaaaaactgacgaccaagctctccaactacaaagagcttattattttttccctgcttaaaaagttcattagccatcttaataacattgtggttatatgctccggctaaacctttatcagcagtaataactatataacctctcttcttttcctcatcaggaatattggaatgagggtcaaaatacttacttcttgcatcaggcaaatgtcgaagaagtctcgcaattgccgactgtaattcatagaagtaaggctctgtgtcttcaagtttctgttttgcacttctaagctttgcagaagaaatcatatacatggcatttgtaatcttcatcgtatcctggatacttttcattcgtttctgaatttccttagtatttgccattatctatcacctgcttctaaattctgctcttatattctttagctgcttcaactattctttctgtaagtgcatcatcaagaactttcttttcattaatttcatcaacaatatcctcatgttctgccttaaagaagtctaacattcccagctgtacttccttagttttcttgacatctacatctaagaatatacggtttgttgctgcaaccaatgtgataacctgttcagcaagactcatcggattacaaagtggctgctttaataattccataagtcctttaccatactgtaactgttccttagttgtatcatctaagtcagaactaaactgtgtgaacacttccatttcacggtactgtgccaaatcaatacgaatagttcctgccgcttttttcatagccttagtctgtgccgcaccacctacacgggatacagaaataccaacgttaatagccggacgcatacctgagaagaataagtcactttcaaggaaaatctgaccatctgtaatagaaataacgttagtcggaatataggcagatacatcaccatcctgcgtttcaataataggaagtgctgtaattgagcctccacctaattcatcacttaacttacttgaacgctctaacaatcttgaatgtaaatagaatacgtcaccaggataagcttcacgtccaggagaacgctctaacaaaagtgaaagcgctctataagctactgcgtgttttgaaagatcatcatatacaataagtacatctttgcctttgtacataaaatattcagctaatgctgtacctgcatatggtgctatatactgcaatgatgctgattcacttgctgttgatgataaaacaattgaataatccattgcaccatgtttctttaatgtgtttactaatttggcaactgtagatgctttctgacctatggctacataaatacaaataacatctttacctttctggttaagaattgtatcaattgctattgaagtcttacctgtctgtctatcgccgataattaattctctctgtcctctaccaataggaagcattgagtctattgccaaaatacctgtttccataggctgatttactgactgtctgtcaacaatacccggggcttcctgttcaatggctctatagtcatctgccttaatttcaccctttccatcaataggtgcacctaatgcattaactattcttccaagaaaagcatcacctacaggaattcctgcttttttctttgttcttgttacttttgtaccttcttttatctcagtgtctttaccgaaaataatacatccaacctggtcacgcttaatgtcctgtaccattcccttaacaccattttcaaaaataacgatttctccatacatagcatgttcaataccataaactgttgctattccgtcaccaacccagatgactgttccaacttcctggtctttacatactgtatcgtagttttctatctctgttttaaggatagaaataatttcttccgaattaatggaacccacgttatcacctccatgttagttttttctctaacctgttaagtcttcctctaatgctgttgtcctcttcaatatctccaactttcaaaacaaagcctccaataagttcaggctgctcaaccattgtaagttcaacagtttctttattgtacttctttgcaaggtaatttttaatctgacttaactgattatcatttggctctactacgtaagataatgtagctgttaaaatgttgtttgcttcattatatttcttatagtaagcttctataatctcatctatataagacattttttcatggtcacatacaacctttaaaaaattctctatttcttttggaaaaactttttctataatagaatatttttcattctttgaaataatgggactttccaaagttctatgcaactgctctgtcaaagaaaaaattcttttactctcttcaactgtatctttctttatgcctaattcaaaaagaacttctccataattattcgctgtctgtgtcatttacaccacctgctttagccaaaaactgatcatacattaactgattgctttcctttgtaccggattcacccaatactttttctgctgctgcaacagcaagtcctgcaatctctgactgtaaatcctgtactgtcttttctctatccagttctacagctttatgtgcatcctttataattctgtctgcctctgcacttgccacagaaaccttgttattatattcagtctgcgcactctttctagctttctcgatgatttctgaagattccttatgtgcctgtgtaagcttatcttcatactgagctttcaagtcatacgctttatccttttcttttcgggcatcagcaatctctccttcaatcatctgcttacgctgttccataatattagttaccggtttgattaaaaactttctaagtgcaaggtaaagtacaattagattgatgatggtaaatacaacgttccaatctattcttaataactgcattctctaccaaatcctttcttatcctaagaataaaataattaaaatagctacaaccataccgaaaattgcagtaccttctgcaagggcacaaccaagtaataatgccttagtaatctttccttctgcttccggctgtcttgcgattgcatctgttgcctttgatgttgcaataccaatacctacacctgctccaatacctgttaatgctgctaaacctgctccaattgctactaatgatgtcataatatttatctccttttactctatactttctttaataaatagcgatgttaaaaatacaaacacatatgcctgtataaaaccatcaaataaatcaaaatacaaacttaatggaaccggaaccaaaaccggcgctacgattttaataagttccataataacgaatgcgcctaaaatattaccaaataaacgcatacacaacgacagtggtctgataaacacttccaatatgttcataggaagcattattattatcggctctgcaaagcttttcaaaaatccctttacacctttctgatgtattcctgcatattctacaagaataatactcatcagtgccaatgctcctgttacacctacatctttagttggtgatttcagtccaaacagaccaatcatgtttgagattgcaatataaattccaactgtcatcatataaggaatgtatctctttcctgcctctcctaacatatcgtagaagaaattgtgtaatcctccgataacagtttctacaaccagttgtctttttccaacgttttctacctttaaatttcttccaaggaagaacgctgccacaattaatactgccataataatccacgtgaccacgacagattcggcaaccggaattcctccaaaaatcggaattgtaaatgctgtctcacaatttaattctgccattaattcctctgacagatttcccatttttgaacctcctctcttagtattgaacatatttacgtgtctgacttatttatcggatatcaaacatccaagttttaatcgcacgaattacttcgcatcttacacttaaacatgttaccttgaaaattgatttctcagtgtagaacctttggctgttaattgcctgcactaacatatattatgtacaaataccatactttttttattatatttactataatattttttctcatatagtataaaagagcagatgtcacagcccttcatccgaccgtaactccactcccttgtgtatatgtcattgcctatgcaattattgtcaaatatctctcacaattcgcaattatactactttctccaaataatggtagtcttttttttactaattatgattttttgtcaatttgtcaattatgtatattggctatatttcacatttttaagattataaagatactttttttagtgtattttgtatattttgtacacattttcattatacatatgtctaattcttattcttgtgattatgcttttttcgtctatactttgtgaattttttacaaaaaaattaatggttttttatgttaaattactgctaatgtttgccatcataataaaaacattgaactctccattggtatggtctacttccattctgccatcatatttttcaactacggcactaaccgaagacagacctattcctgtatctttaaactcccgttttcttgaataataacccgaatgacctttcttaatttcgccattgtacaagttcgaaactaacatacatatatactcattacttctgtttattcttaattttattcttttattttcttcttttttgcttgcttcaatggcattttccagaagatttcctattacaatacataagtctgtatcacgtatctttaattcttccggtaatgccacatttaaatgtacctctattccattatcttttgccagcaaaatataatgattcaaaattgcatcaactgtactgttattacaataaaccattggctcttttgtagaatcaatcttattatattcttccaaatattctattaactgctctattttattttcctttgctaactgataaacaacattaatatgatgatgtatgtcatgtctgctttttctggttttttctattttttcagtaatcatattatattgctctgcctgcatttcaattaacattctgctgcgcttagccttttcttctgctcttacaaagctttcttctgttctcacggccctaaactgcatcacactaacaattacaacacctatacttaacgtaagccttgcaagaacctgatgaagatgcatataagttatttcaaaattgttctcacaataagacagacttactattgaaaaaatcattggaattatccaaccatatttccactgtcgcttattatctgtttttaccacaggcacaatatatttcttccacaatatatacataaaaggaaagcatacacatgatattattattcttaaaactgctgtatccagatacgttgctgactgcttaattgttatatagttatttgtgtgacttgcccataccaaaacaaaaacacttattggtaatagttggccaaacacaaacaaaactttctgtataaaatcatttataaaatagatacataatatcaaaacaacaaatatctgcaccatacgatatgccagcataatatcaagattgtaaaaatcttctccgattattcttttgaatgaaatataataaagtgttagcaccacaaaatttgcaagtactgttgtaatccgggaaaatctcaacctgtccttaaaaggcatatataaaaggaaaatccacggaaaagcatctaaaataacatttattattaaccaaaaatcactcattttccccccctatcttcgttactgtaaccttgcttttatttcatcacttatttctaagaaacactcaaccaggataggattaaactttccgcattccctatcctttatcatattaactgcctgttcatggcttactgacttcttattaggtctgcccataaccaatctgtcatattcatctgccagtgcaacaacctgtgcacctataggtatatcatctcctttaagtccgtcaggatatcctttgccatcatatctttcatgatgtcccctacatattccataggcaatttgcataagctcctcatccttatactcatcaagattttctatcatgcctgcaccaattaatgtgtgcattttcatttcattgctttcttcttctgttagcttctccattttgtttattattttttcttcaattcctacctttcctatgtcatgaagagcagaggatgttataatcatcattctctgtgaccagctaagattatacttgtccgttttctgcattagcttgtccaataacatttcagttaaaattttaatgtgtgatacatgaattccactttcaccatttctatattcaataacctgttccaacacgcctattaacattctgttatttttctctttttcaaccatattcctggcaacaagcttttccaaacggcgttgttttgcataaagcttaatagtattaagaactcttgtatatactgtttgaaaatcaaaaggtcttccaatataatcaactgctccaagatcataagcccttctaataaatgactctgacttttcatctgaaatcattattaccggaatattttctgtaatcccactatgcttcatataagttaaaacctcaaatccgctcattccacaaattttaacttcaagaagcagcaatgcaatatcctctccgtatttattaatcatttctatcccctgctttgcatcagaagcattaatcacatcgaattctctcttcagcatttctgttaattctccgcgatttttctcagaatcgtcaataattaaaattttaaatcttttgacctcactggtattattattgccttcattaatatcgttttccgtaacaaccatattttttctgattttccttttagaatgcaaaagagccggcattttttttagctcttttaatctaaaaacaataactggctctattataataaattattcaactttttgaaatgcttttatataatgtttccatcttttattatggattttatatttaaatccttatctaaaagtacaatattggctactttgccaggggcaatacttccgaatctgtcatatatacctatagcctttgccggattaaccgctgcacatttaatggcactttcaagtggaat

SEQ ID NO: 545 - DNA, 9903 bp, unidentified
  source 1..9903: mol_type = unassigned DNA
gtggaaaataagaagaaaacattgcgtgaacatggtgtggaatatacatatgatgagcggttcctcccactcacgcagaaggaaatgcaattaaagggctgggaacagccggactttgtctatgtgatcggagatgcctatgtggatcatccatcttttggaccggcgatcatcagccgtgtgttagaggcacatggatataaagtggcaatcatttcacagccagactggaaggatgaaaattcgattgcgatttatggcaggccgaagcttgcctttttggtgtgcgccggaaatatggattcaatggtgaaccattatactgtttccaagaaaagacggcatacagatgcctacaccccgggtggcgagatgggaaaacgacctgattatgcgacaatcgtttactgcaatctgatccggaagaaatacaaggatgcggcaattgtggcaggcggtatcgaagcaagtctgcgccggctggcacattatgattactggtccaataagttgaaacattcgattctcgttgatgcacaggcggatattgtgatctatggtatgggtgagcatgccattgtggagatcgcggatgcgctgcaaagcggcattgacatcaaagacttaagttttattcatggaacggtctacaaagcaagaaatctggaacatctgtatgaagactatattgagcttccgtcgtatgacgcgttgcaggaagacaaattaaattacgcgcgaagctttaaaatccaatatgataacacagatcatatcaccgcgaagattctggtagaaaaatataaggattatcaatatatgatccagaatccaccggcggaaccattgacggagcaggagatggacgaggtgtatgcgcttccatatacgaagacctatcatccgatttatgaggcacagggtggaatccctgcgatatcggagatcaaattctcgctggtcagcaaccgggggtgctttggcgggtgcagcttctgtgcgcttacatttcatcaggggcggacattgcagacacgcagtcatgcttcgattatagaagaagcgaaagagatgacgaaggatccggattttaagggctatattcatgatgtgggcggcccgacggcgaatttccggcagcgcgcctgcaagaaacaggagaaatacggcgtctgtgcgaaccgtcagtgtctgttcccaaagccatgtccgaatctgattgtggatcattccgattatctgaaattactgcgggagctccgaagtctgccgaaggtgaagaaggtatttatccgttcgggtatccggtttgattatctgatggcggacaaggatgatacattctttcgggaactttgcaaataccatgtcagcgggcagctgaaggtggcgccggaacatatctctgacaaggtactgatgaagcttggtaagccggaaaatgcagtctttcaggcattttgcaagaaatacaaacggatcaatgaggaacttggattgaagcagtatatggtaccatatctcatgtcgtcacatccgggttccactctgaaagaagcggtggaactggcggaatatctgcgggatctgggttatatgccagaacaggtgcaggatttctatccgacaccttcgacgatatcaacctgcatgtattacactggcgtggatccgcggacgatggagaaggtatatgtgccaaattctccacatgaaaaggcgatgcagcgtgcactgatccagtaccggaatccggataattacgatctggtgcatgaggcacttgtgaaagcaggacggacggatctgatcgggttcgataagaactgtctgatcaaaccgcggaagatgaagaatgctgcaaatgagaaaaaatctcaatatggcgcatcgaataaacaatctggaaatcgttcgaatgtgcaacataaaaattctgcacagaagcaggggcaaaaccagaagcagcaaatgaatacaaaaaacaaaaaaagtatacgcaatgtacataaaaagaaacaaaagtaaaggtttcttttattgcgaaaccacagaaattatgatattatctatctaggcgtgtcgacatatgcatgatcggcacagatagaaacaataaaacgaaatggaggaaattttcaacatggcaaagaaagtagttttagctggcgcatgtcgtacagcaatcggtactatgggtggtgcactttcgacaacaccggcaccagtgttaggttctatcgtaatcaaggaggctctgaacagagcaggcgttcctgccgatcaggtcgatcatgtatatatgggttgcgttatccaggcaggccttggacagaacgtagctcgtcaggcatctctgaaggctggtcttccaatcgagacacctgctgttacagtaaacgtagtttgtggttccggtttgaactgtgttaacatggcagctcagatgattcaggctggcgatgctgacatcgttgtagcaggtggtatggagaacatgtctatggctccttatgcagccatgaacgctcgttttggttacagaatgaacaacggcaagcttgttgatacaatggtaaacgatgctctttgggatgcattcaacgattaccacatgatcaagacagctgataacatctgtgagcagtggggactgactcgtgaagagcttgatgtatttgcagcaaacagccagcagaaggcagcagcagctcaggagtctggtgcatttgacgcagagatcgttccagttatggttaagaagaagaaagagacaatcgagttcaagaaggatgagggccctcgtcctggaacaactgttgagactctggctaagcttcgtacaatcaacccaggcggattcgttacagctggtaacgcttccggtatcaacgacggtgcagcagcaatcgttgttatgtctgaggagaaggcgaaggagcttggtgttaagcctatggctacattcgttgcaggtgcacttgcaggtgttgatccttcaatcatgggtatcggacctgttgctgcaacaaagaaggttatggctaagacaggcatgaagatcgaagatttcgatatcatcgaggcaaatgaggcattcgctgcacagtcagtcgcagttggtaaggatcttggtattgatacagagaagcagcttaatccaaacggtggtgcaatcgcacttggtcatccggttggagcttccggatgccgtatccttgttacattgcttcatgagatgcaggcaagaggcgctaagacaggtcttgctacactgtgtatcggtggtggtatgggctgctctacaatcgttaagattgaggactaattgagccgcgtaacatacttggatagagtttaaggagattaagatggaatttattacttatgagcaggaaggctttgtaggcgttgtaacgatcaacagaccaaaggctttgaatgcgttgaatagtcaggtgttggatgagcttgaggctacattcgatgcaatcgatctggatacaacaagagccgtagttcttacaggcgccggcgagaagtcatttgttgcaggtgctgatatcggagagatgtctacacttacaaaggctgagggcgaagcattcggtaagaagggaaatgatgtattccgtaagatcgagacattcccaatcccggtaatcgctgcaatcaacggatttgcacttggcggtggctgtgagatttctatgagctgtgacatccgtatctgttctgagaatgcggtattcggtcagccggaggcaggtcttggtatcacacctggatttggtggaacacagagactcgctcgtctggtaggtgctggtatggcaaagcagatgatctacacagcaagaaatattaaggctgatgaggcatacagaatcggtcttgtaaacgctgtatatccattggaagagcttcttccggcagcgaagaagatggcagcaggcatcgcagcaaatgctccgatcgctgtcagaaactgcaagaaggcaatcaatgatggtcttcaggtagatatggatacagcaattgtaatcgaagagaagctcttcggtgactgcttcgagacagaagaccagaaggctggcatgggcaacttccttgagaaagacaaggagaagaagttaaaggttgttccattccagaacaaataataaaagtaattaaaattttaaggaggaaataaacatgaaggttggcattattggtgctggtaccatgggacagggcattgcaaaggcatttgctatggttgatggctacgaagttgcactttgcgacatcaagcaggagtgggctgaaggcggaaaggataagatcgcgaaaggctacgctagacttgtagaaaaaggaaagatgacacaggagaaggtagatgcgattcttgcaagcatcacacctggtctgaaggaaaatctctgtgcagactgcgatctgatcgtagaagctgcatttgaggatatgggagttaagaagacaacatttgctgagcttgacaagattgcaaagccagagtgtatcttcgcttctaatacatcttcactttctatcacagagattggaaatggtcttacacgtcctatgatcggtatgcatttcttcaatcctgctgacagaatgaaacttgttgaggttatcgctggtgtaaatactccacaggagacagttgataagatcatcaagatctctgaagagatcggcaagacacctgttcaggtaaatgaggctgccggtttcgttgtaaaccgtatccttatcccgatgatcaacgaagcagctttcatcaagatggaaggtgtttctgatatcgccggtatcgatgcagctatgaagcttggtgcaaaccacccaatgggaccacttgagttaggtgatttcgtgggcctggatatctgccttgcaatcatggatgttctgtacaaggaaacaggcgacagcaagtatcgtgcatgtccattgcttcgtaagatggtacgtggtggaaacctcggctgtaagacaggcaagggcttctatgtatacaacgcagatcgcacaaagacacctgttgacgctcagtaataagcgtacaatccccgcacgtggcttttcagccatgtgcggatgtaataatcaatctattatggaggatagaaagaatggatttcactttagacaagaagtatgaaatggcgcagactctgttcaaggattttgcgcagaacgaagtaaagcctcttgcgcaggaaattgatgagcagcacagatttccaagagagactgtagacaagatggcaaagtatggtttcttaggaattcctgtttctaaggaattaggcggacagggctgtgatattctcacatatgttatgtgtgtagaagagctttctaaggtttgtggtacaacaggtgttatcgtatctgcacatacatctctgtgtgtagacccgatcgtaacatttggtacaccagagcagaaggcaaagtatgttccggatcttgcatctggtaagaagctcggtgcgttcggcctgacagagccaggtgccggtacagatgcacagggacagcagacaaaggcagttcttgatggtgacgagtgggtactgaatggttctaagtgcttcattacaaatggtaaggaagctgacgtatatatcgttatcgctgttacaggtatcatcgagaagcgtggcagaaagatgaaagagatttctgcatttatcgtagagaagggaacacctggatttacatttggtacaaaggaaaacaagatgggtatctgtggttcttctacatatgagttgatcttcacagactgccgtatccctaaggatgcacttcttggacagaagggcaagggcttcaatatcgctatgcacacacttgatggtggtcgtatcggtatcgctgctcaggcacttggtatcgctgagggcgctcttgagacaactgtaaactatgtaaaggaaagaaagcagtttggtagatccattgcccagttccagaatacacagtttgtacttgctgatcttgctacaaagatcgaggctgctaagcttcttgtatacaaggctgcaagaaagaaagatgagtatcagagtggcgctaaggtttcttactctgtagaggctgctatggctaagctttatgctgctgaggttgctatggaagtaacaacaaagtgtgtacagcttcatggtggttatggttacatcaaggagtatgacgttgagcgtatgatgagagatgctaagatcacagagatctacgaaggtacttcagaagtacagcgtatggttatctcagcaaacttgttaaagtaaggaggtacttatcgtgaaaattatcgtatgtattaagcaggtacctgatacaaagggtggcgtacagttcaacccagatggtacattgaatagaggagcaatgctcacaattatgaacccagatgataaggctggtcttgaggcagctcttagactgaaggatcagtatggcgctgaggttacagttcttacaatgggacttccaaaggctgcagatgttcttcaggaagcaatcgctatgggcgctgacaagggtgttcttgtaacagaccgtgtacttggtggtgctgatacttgggcaacatctacaacaatcgctggtgcgatcagaaagcttgactatgatctgatcatcacaggccgtcaggctatcgatggtgatacagctcaggttggtcctcagatcgctgagcatcttggacttccagttatctcttatgcacaggagatcaaggtagatggagacagcgtaatcgttaagcgtcagtatgatgacggttaccatatggtaaaggctcagatgccatgtcttatcacagcactttctgaattaaatgatccaagatatatgacaccaggtggaatcttcgatgcagtcaatgcagagatcacaactcttggtagagcagatcttgtagatgttgatgattcaaacatcggtttgaatggttctccaacaaagattgccagagcttctgacaaggttaagaagggtcagggagagatggctccagaagacgcagatccagtaagctatattgttggtaaactgaaggataagcacgtaatttaattaaaaaggaaaagtggtgaataaaatgggagcaatgaatgcagaagaattagcaaagtacaagggcgtattcgtctttgcacagcaggtagataatgtattaagcggaatctctttcgagcttgttggcgaaggaaagagacttgcagagaagttaggcacagaagtaacagcagtattggttggttctgatgtttcaggacttgtagacgagcttgctgcttacggtgcagataaggtaatcgtagtagacgatccagagttgaagaattacagaactgagccatatgcacacgcacttgcttcagttatcaatgagttcaagccagaaatcatgttggttggtgcaacagcaatcggtcgtgatcttggtcctacagtttcagcaagagttcagacaggtcttacagctgactgtacattacttgagatcggtgatttccctgttaacccaatccctggaaaagagcagaagcacaatcagcttcttatgactcgtccagcatttggtggtaacacaatcgctacaatcgcatgtccagacaaccgtcctcagatggctactgtacgtccaggcgttatgcagaagcttgacaaggttgagggtgcaaaggctgaggttatcaactacaacccaggtttcacaccaaataacagatatgtagagatccttgagatttctaaggctgtttcagacatcaaggatatcatggatgcaaagattcttgtatctggtggtcgtggtgttggttctgctgagaacttcaagcttttggaggatcttgcagacgtacttggcggacaggtttcatgctcacgtgccgttgtagattcaggctggaagccaaaggagcttcaggttggtcagacaggtaagactgtacgtccacagctctacttcgcaatcggtatctcaggagcaatccagcatgtagctggtatggaagagtctgatatcattattgcaatcaataaggacccagacgctccaatctttgatgtagctgattatggtgttgttggtgatctgaacaagatcgttccagcactgacagaggctatcaaggctgagcttgctgcaaagtaatttgattacttgcaaaagtaaatagtaaataagagtttagaaccaccgtgtatcgtaagatatgcggtggttttttgttatagcgacgaggaaaatgcacgcatttatgcggtgcatttgacgaccgctaatcagagacaagatgtgcagagcgccatcttgtctctgtgcaagcttgttgactcaaagtgggcgtggagagaaattggcaagcggaaaaacccacgatgtgggcgtagaaaaagaaaagcaagctagaaaacccactctggaagcttgtcgctaggttatggaggaaaaagtgggcgcggagagaagcaggcaagcggaaaaacccacgacgtgggtgtaggaagagagaagtaagccgaaaagcccaccccggaagcttattgtaaggttgcggagagaaaagtgggcgcggagagaaattggcgggcggaaaaacctacggtgtgggcgcgggaagagaaaaacaagcaggaaaacccatcatggaagcttatcgtaaggttgcggagagaaaagtgggcgcggagagaaattggcaggcggaaaaacccacgacgtgggcgcgggaagagaaaaaaaagcaggaaaacctgtgggaagggagacaggaatgctgataatgctgttggtttatttatgagagatttatcggtattttctgaatcgacccaagtacttcaatttaagttaaaagggagtttattcgtgtttgacaggagtttcgttatagattgtttattactatgatttttactaattgttataaataccatattgtgaatatattcacaatgtggtataatttacataaagaaagatattatatcttcaggtaatgacagaaaggaggaataataatttagttaggaagattataataatctttataaatacggacgattaggagaaaattatgtataacgatatgaatcaaaatcaatatccaaatcagggtcaatttcaaaatcaataccaatatcaatatccgcagcaaccaccggagtcaccggggtttggagttgcatctatggtattaggaattatatcattgtgcttatcttgttgtgcatattttatttcaataccatgcgcaatagttggaattatattggggttgataggcctgaaaaaacaggcaggtcggggaatggcgacggcaggtcttgtatgtagtattatatcatttattcccgcgattattcttatatcaactggagcatcaatagtttcgtcgttaaaaaatttttgatgtaacatttatggagtatagttgtattgtttaatcaaataaaatgaaaatatcaattaagaactatttgttatttgctctatttttatgcgtagtgattgcgactctgcttattaagatatatgatattgatttggtgaaaatcataccagcacattgtatattatatgataattatgggttttattgtactgggtgtggaggaacgcgtgcatgtatggctctgatccatggtaattatatagagagtattcgttattaccctgcaattatttatttagtgggattatttatctattattttgttatgaatataatttgtctagctaaaaacatgcataaaatgattgtgaagcctatacatttttatattttaattgctataatattaatacaatggattgttaaaaattttctattaataattcttaactatcgtattatttaa

SEQ ID NO: 546 - DNA, 13042 bp, unidentified
  source 1..13042: mol_type = unassigned DNA
atgactttaaaaaagaacgatattgtaaaccttacaataacttcggcaactgccgagggcagcggagtcggaagaacagatgatggcattgccgtttttgtacagggttctgcaatcggtgacgaactcaatgtgcgtatattaaaggttaagaaaacctacgctttcggcaaaatcgaagaaattctcgttccgtccaaggcgagaattactcccgactgcgaaaactttatgaagtgcggcggttgcacatggcgacatatttcttatgaagaagaatgcaaaataaaacagcaaagagttgaggatgccgtaacacgcatcggcggtcttgataatgttgttttcaagccgataatttcgtcggataatatcacaagataccgcaacaaggcgcagtatcctgtcggtcttgaccgtgacggaaatgttgtgactggtttttattcattccacagccaccgcataatcaattgcaccgactgtattttacagcccgaaatttttgcaagggtaattgaaatcacaaaagattttatcgcaaaaactaacacggaaatttatgatgaaacaacaggcaagggaagacttcgccacatttatatcagaattggcgaggtttcgggcgagcttatggtgtgctatgttgtcaacgcaaacggtcttaaacaggaagatttactcgtgaaaatgctcaaatccgaacttccgcagttaaaaagtgtgattattaattctaacagagaaaaaaccaatgttgttctcggcagaaaaaacagaacaatctacggaagtgaccatattaccgacacactttgcggattgcagtttaaaatttcaccgttttcgttctggcagatcaacagaaaacaggctgaaaagctttacggcaaagccaaagaatatgcaaatcttaaatctgacgaaattctgcttgatttatactgcggaacgggtacaataggtcttacaatggctgattcctgtaaacagcttatcggtgcggagattgttgaagatgccgtgaaggatgcaaatgaaaatgcaaaagcaaacggcattgaaaatgcacgattcatctgcggagatgcctcagatgccgcatttcagcttgaaaaagaaggcttaaaacccgactgcgtaattcttgacccaccgagaaaaggctgcggtgaagagcttgtaaagacaatttcaagaatgtcaccgagccgtgtagtctatgtatcatgtgaccccgcaaccctcgcaagagatttaaaattcttcacagaaaacggctacacccccaaagaaatcaccccctgcgatatgttctccggaacctcccatgtagagagcgtggctctgttgactaaagtacaggagtaaaggtgtgaaaattattaaatttgaagaaatctatcgtgatgatatgatttttacggttttacaggcaaaagatgctttgggtagaaaacctactataaatcctgaccttcttgatattaaggcaaactatcttgattgcaatgatatgttttggcttgcaatagatgaaaatgacagggtagtcggatgtattggatgttcaagaattactgatacagatcaggcatttttgcataggctttatataaaaccgtcattaaaacgaaagggaatcggttcaaagttacttaatacggcagagttatggatgcgtgaaaacggcattgctgtttcaaaagtacatttggggacaccaaaggagcagtggtttgaatcttatgttttttatccgaaacacggatatatagaatatgaaccaaggtatatgatgaaggttctgtaattaatgaaagtcaaaagtaacatatttattatgattattgagtagtgcaacaaattaaaatgaaatatgattggggtttggggtacgatattgaattgacttatttaaaaagaaaaagtgaaaccgatggtgatgctttttgatggaggtgcacaaaatggcaaagaagaaaaatgaaataagtattcgctcaagtgctgcggaatatctcacatatgttgcttctgtgggaaatcaggcagatagctttgaaatgcgttatgaggacgaaaatatatggctcacacagaaaatgatggcaacgctgtatgatgtttctgtgcctgcgatcaatcaacatctaaaaaaaatctttgaagacggcgaattagtcgagaattcagttattaagaaatacttaacaactgccgacgacgggaagaattatcaaacaaaacattataatcttcaggcaattattgcagttggatttaaagttaataatgaacgagcagttcgattccgtaaatgggcaggtcaaattgtaaaagattataccattcagggctggacaatggatgtagaccgtctgaagaagggcacgatgttcacagatgaatattttgaccgtcagttagaatacattcgtgaaattcgcctgtctgagcgaaaattctaccaaaaggttacagacctttatgcaacagctttcgactatgataaagatgcaaaaaccacaagactctttttcaaaactgtgcagaacaaaatgcactatgctacgcacagacatactgctgcggaactgattgttgaacgagcggatgcggaaaaggaacatatgggactaacctcttgggaaaatgctcctgatggtaaaatagtgaaaagcgatgtatctgtagcaaaaaactatcttactgaaaaagaattgtcttttttggaacgtattgtatcgctgtatctcgattatgcagagttacaagccgaacgtcatattcctatgagcatggaggattgggcgaaaagacttgacggtttcctcgaatttaacggtactgaaattctcacaggagcaggaaagataagtgcagagcaggcaaaacttcacgcagaaacggaatttgagaaatatcgcatcattcaggacagattgtttatgtctgactatgacagatatttacttgaactggaagaaaagatgaaagaagagtaaatggaaattttaatgttttgcgagaaattataaaagcgtctcattgcatgagtctgtttattgagatatgattggcttggaggtgatacattatggcaaatgaagataaaaaggattttaatgctatgcttatggatagcaaggatatgcctaaatttcaaataatcacagatgaaaagagtattaaaaaatatggtggagataaaatgtattttgcaccgccaatcgactatgacaaagtaatgaaaaaaattccgtatggtaaagtgattactctcggaaaaatacgagaatactttgcagagttaagcagtgccgattttacagagcctatcacagccggaatttttgtttcaatagttgcatgggcgagttatcagcgcacagaggataaaaccccttattggagaacattaaaagcgaatggagaattaaatgcaaagtatcccggaggaattgaggcacaaaagaaaatgcttgaaactgagggacatactgtagtgcaaaaaggaaaaactaatatcaagtattatgttaaggattatgaaaaagcattatttacattgaaatagataatgcgaaaacttcagtttcacggacatatccccacaaacggcagaaccacgaaaaaggctgtggatgtattcccttgaacccaaaatcagccaagaaattcatcgtattcagatgagccatgtggaaagcgtggcattgattgaaagaaattaacaaaataatatagaaaaggattaaaaatgcaaaatacacttaaaataaaacgaacaaaaacagctttggcatttaatcttgcgattatcgcttgtgagattgccgcaataattatcgtgtttttcaaaataggctgctatccgcttgtatattacactgaggacagcaacctgtttgcacttgttgcctgtgcggttatggcaggctttcaggtgcgatatctcaaaagcggaaaagaaattccgcactcggttcagatgtttaaatatatggcggcggctgtgctttcggtaacatttattgtagttcttgccgtactttccccgatgcgaggagagggcgtaaacggttggctctatatgctttttaacaaagacttcacctttttacatactttgtgtccgattcttacaattttatcgtttgtgctttttgaaaaagaacctcaccttaacacaaaatcagctttcacggctacaatccctacattaatatatgcgattgttcttattatacttaacatagttggtgcatttgacggtccatacccgtttttgcgtgtgatgaatcaaccgttgtatatgtcatttgtttggttcatcgttatagtaggcggtgcatttttccttgcacttctgcttcaaaaacttaattcaacaggaagaaaaagaaaataatagataataagacagtaaacagatgaaaatttcagattggagtgatttttatgaaataccgcaagttggtggagaatgctaaaaagccaagcggcttttggggcaaaatgatgattaaggctatgaataaaggacattcaagcctcacctcatggggacttgaacatatgaatatcgaacgcaccgcaactgtacttgacataggctgcggcggtggaaaaaccgttgaccgactttgctcaattgttgccaacggcaaggtttacggaatcgactattccgaactctcggtaaaatcctccgaaaaactcaactcaaaaaatatactctgcaacaaagcgaaaattcttcaggcatcagtatccgatatgccttttgatgacaatacattcgataatatcacggcagttgaaacctactacttctggcctgataaggagaatgatgtaaaagaagttttccgtgttctcaaacagggcggaacggttatgctgctttttgaaatgctcagaacagacgatgatccgttcaagtgggaaaaggttgaaaatatgctgaatatcaagtcggtaactccgcaggaaatcagagccgtacttgaatcggcaggctttgaaaacataaacacatacactaaggaaggtacaacatggctttgtgccacagcacaaaaaccgaaggatgatgaaaactaatgaaggctttgattacaggcgcaagttcgggcataggtaaagaaatcgcccgatatcttgcagaactcggttatgaccttattcttgtatcacgctcaaccgataagcttaacaagctgaaagaggaactttcaaatgtgaatgtcagggtaattacgcttgatttttcacgagaaagtgacagcctggatttgtatgagcatattaagaatgaaaatgaacagattgattttcttgtcaacaatgccggattcggtgcatacggaaaatttttggatgttccgcttgaaagagagcttgaactcattcacacaaatgtttcaacggttcacattctcacaaagctttttcttaaagatatggcggagagaaacagcggatatattctcaatgtaggttcagccgcaggatttcttgcaggaccgacatttgcaagctactatgcatcaaagaattatgttgtccgtcttactcaggcaattcatgaggaaatgcgtagggataataaaaatgtcaaggtttccgtactttgcccgggtcccgtaaaaaccaacttcaataatgttgcggatgtaaaattctgcataagaggacttgacccgaagtttgtcgcaaggtatgccgttgacatgaccatgaagggcaaaatgattatcacacccggctttgaaatgaaagcggtgtcgtttttcagacattttgcacccgaaaaacttctcacgagaatttcttataatgtgcagatgaagaaaaacggtataaaataattatcatatatatcatatagaaataggggaggtgacacattgaggataaaattcgttgacaaggcgataaaactttacaaaagaataacaggcagatttgaaccgataacaagcaaatgcgttcacgataatatttttgcaattgccggacagtcggcattctttattatattatcggctgtgccgctctcaatgttctttgtgtcacttttgcagaacctgcacattccgattgattttgtttatcacggactcagcagtgtgttttcgtcaaaaattgccgatgatttaacatactttctgacctctgcctatgaaagtgctgtgggaatttctcttgtaacgcttgtagtcactctgtggtcggcggcacagggaatccacgcaatcacaaacggtcttaacagaatttatgatgcttacgaaaacagaaactggttctttttaagaataagggcgatgttctacacaattgcattgtttgtaattttgcttgcgtcacttgtacttattgtcctcggttcaacaattaacgattttctttcaccgcatctaaaatcgttgcctgacataatcggaataatctatcatctcagatatatacttatctttttgtttctgacggtattgtttgcgctgatttacaggaactttccgaacatctcacgcagtgagcataaggaatacggctttaagtcacagttgcccggtgcgtttctctgcacggtttcgtggtatgttctttcgttcggtatttcggtttatgtgtcggatttcaacggattctccgtgtacggaggtcttacaagaattgccgttattatgatttggttttactttcttatggtttgtcttatggtttgtgcggaaatcaattatgtctatcatgacaggataaaagcgtttaccgttgcaaaatttaaaagaaaggtaaaaaccaaaggttcagagcttaatcagataagaaaagaaagaaaaaataataagtcaaataaaagtaaataaatcaaaataaaacacttccgttcggtgatactaccaatggaggtgttttttatgaaaagaaaattttctaaaaaggtgatttcaatattgctcgtatttgcaatgctcatcggcggagcgtgcttttcatgcacaagtgcagcggcgtttgaccttgactatatcagcgaggacggaatgaagctcggctacagtataatcaagggctattccaaaatgtcgatgaaaaaaggtcagtacaaggacgggaaaattgccgtttactgcggacttgatgtgaataatctatatgttatgggttcgctcggttggttctatatgacaaacggtgttgatctcgagcgtgcaatgacggataacgattacgcaatggagatgattgcaaagcttgattcacatcttcaaggtgcaggcataacaaatgacagggcaaaagaaaagaaagccgagattttaaaggatgcaaagtatgtttatcaatgctttgacacattgggactttacattgttgatgttgacaaaaacagagccgatgaactcatgaacgacagcggtattgattttgtacttgacggcggttgcgttcccaaaaatatgaaagacctcaacattgacggaaaaacagatgaaaaggacgctgagcttattcagaagtatcttatcaaagacctgacctttgacgattatgacgaaaatcagtatgctctttttgtttgtgatattaacggtgataaaacccccgatatccgtgatgcgacagaaatcctaaaaaagtgacaattgtcataatttgtgcaaagtgaatatgattttaactgcgacagctgtaattttagctgtcgcttttgatttgtgacagcaatgtgaaactttgaataattatttgtaatttctcttgacattcaaaatgaaggtgctataattactgatacaaattgttttgtatcgaactattctatatagaacaatatctcataagtgtgatttcggaggtgaaataatgtgtgatgacaaaagcgtaaaaagctgtaagtgcaacaaacgctttaatgattcaatcggtcacgaaatcaaggtgcttaatcaggttttgcagagaaagttaatctattccgccaaggataagggtgtggataagctgactcttatgcacggctggattattgcatatctctatgatcatcgtgatgaagatgtttatcaaaaagatattgaaaacgcattttcaattgcccgttcaaccgttacaagtattcttaaacttatggaaaagaaaaattacataacgagggagagcgttgaaagtgatgcaaggctcaaaaaacttgtcttgaccgaaacaggtattgaacttcattacaaaatcgaaaatatgataaccaaaaacgaaactttgcttgacagtctgctgacaaaagaagaaaagaaacaatttctttttcttataaataaaattctcagcggacttgaaaatgcaaattaaaacggaaggagataagtatgataaaaactttggcaaaaaatatcaaaggtttcgtcaaagaatccgttctgactccgttctttatgatactcgaagtaattgttgaaacaattattccgtttcttatgtcatcaatgattgacgacggtatcaacaagggcgatatgcagcacatattcataacgggcggttatatgggtgcacttgcactcacgggcttgtttgcaggtatgatgggcggtatctacggtgcaaaagcttcggcaggctttgcaagaaacctcagacgctcaatgtttgcaaatatccagtcattctcgtttgccaacattgaccgttactcaaccgcaggacttgttacacgtatgacaacggatgtaacaaatcttcagaatgcatatcagatgcttttaagaatgtgtttcagagcgcctgtatcgctcatctgtgcaatggcaatgacattcatcatcaatgcaaggcttgcctgtatttatctcattgcaacaattttactttctgttgttcttgcctttattatgaaggcaacatacaagtatttcagtcaggtttttgaaaagtacgatgaactcaacgcaagcgttcaggaaaatgtaacttcaatcagagttgtaaaggctttcgttcgtgaaaaacacgaagttggcaagttccgcaaggcagccgacaatgtttacagactttttgttaaggctgaaaatgccatggtaacagtatcaccgattatgatggttacttcatacgcatcaatcatccttgtaagctggtttggcgcaaatatgatcgtaagcagtgagcttacaacaggtgaacttacaagtatgctcacatattgtatgaacattcttatgaatcttcttatggtggcaatggtgtttgtaatgctcacaatgagcattgcaagcggtaagcgtgttgcaggtgtgcttaatgaaaaatcaacgcttgcaaatcccgaaaaccctgtttacgaggttaaggacggaagcattgagtttgacaatgtttcattctcatacaacacaaaagccgaaaaaccgattctcaacgatatcaacctaaaaatcaaatcaggcgaaacaatcggtattatcggcggtacgggttcttcaaaaacaagccttgtaaaccttattgcaagactttatgatgtaaccgaaggttctgttaaggtcggtggaaaagatgttcgtgactatgatatcgaaactctgcgtgacaaggtttcggttgtgctccagtcgaatgttcttttcagcggtacaatccttgacaacctcagatggggcaacgaaaatgctacagaggaagaatgcgtcaatgcctgcaagctggcgtgtgcagatgcgtttatcgaaagcttccctgataagtacaacacaaaaatcgaacagggcggtactaatgtttcgggcggtcagaaacagcgtctttgcattgcaagagctttgctgaaaaatccgaaaattcttattcttgatgattcgacaagtgcagttgataccgccacagacgcaagtatccgcaaggcattcagcgagaatatccccgatactacaaagctgattatttcacagcgtgtatcaagcgtttcacacgcagacaagattattgtaatggatgacggtgagataagcgcagtgggtactcacgaagaacttatcaaaaacagtccgatttacaatgaaatttatgttgcccagacaagcggcaacggtgattttgatgcgaaaggagagctgtaattatgccgggaccaatgggaagaagaaaccgaggacctgcacaaaaggttgaaaattcaggtcaggttcttaaaagactattcggtattatcttcaaaaaatataaatttcagatgattattgttttcgtctgcatcctcatcagcgtacttgcaaatgttcagggttcattgtttattcagaatcttattgacgattacatcactccgatgattcagagcggcagccgtgacttcggaccgatgctcggagcaattttaagagttgcaattttctatgcgatcggtgcggcgtcggcatttatctacgccaaaattatggtttatgtaacacagggtacaatgcgtgatttgcgttgtcagatatttgaacatatggaaagccttccgataaaatactttgacacacaccctcacggcgatatcatgagtgtttacacaaatgatattgacactctccgtcagatgatcagccagagtattcctcagcttttcaacagcggaattacaatcatagccgttcttgtaagtatgtttacactcagtattcctcttacaattcttacacttgtaatggttggtgtaatgctttttgtaacaaaacagcttgcgtcacgaagcggaaggttttttgcaaaacagcaggcagacctcggtgcgactaacggttacattgaggaaatgatgaacggtcagaaggttgtaaaagtatttaaccatgagaaaaagagcattgaagaattcaatgagcttaatgacaggcttttcaacagttcatacaacgcaaacaagtttgcaaatatccttatgccgattaacgcacaaatcggtaacatcagctatgtgctttgtgcaatcgtaggttgtatctttgctctcaacaacttcctcggatttacaatcggcaaactcgtaagcttcctcacatttaacaagagctttacccagcctatcaatcaggtcagccagcagtttaactcaattgttatggctcttgcaggtgcagaccgtatctttaaacttcttgacgaagagcctgaggttgatgacggatatgtaacacttgttaatgtacgcaaagagggcgaaaagcttgttgaaacagaggaaaaaacaggtatgtgggcatggaagcatacccacagtgaaacaggcaaaacagagtaccgtgaactcgagggcgcgcttgttatggacgatgttgacttcggttatacagatgataaaatcgttcttcacaatattgatttgtacgcagaacccggtcagaagattgcgtttgtcggttcaacaggtgcaggcaaaacaacaatcacaaaccttattaaccgattctatgatattcaggacggtaaaatccgttatgacggaatcaatatcaacaaaatcaaaaaaggcgatcttcgccgttcacttggtatagttttacaggatacacacctgttcacggataccgttatggaaaatatccgttatggcagacttgacgcaacagacgaagaggttatcgcagcggcaaagcttgccaatgcagacagctttatcagaaaacttcctgacggctacaacaccctgctcaaaggtgacggcggcaatctcagtcagggacagcgccagatgcttgcgattgcaagagccgctgttgcagatccgcccgcacttatccttgatgaggctacaagttcaattgatacccgtaccgaaaagatggttcaggacagcatggataagcttatgcacggcagaacaacctttgttattgcccacagactttctacaatcaagaattcagactgtattatggttcttgaaaagggcagaatcatcgagcgtggttcacacgaacggcttcttgaacaaaagggcagatactatcagctttatacaggcaaaaccgcataatgataatcgaaaggggagagttgcaaaggctctcctttttctgttcttgaaatattgacttgtttattgtacaataagactcagaattgtgaggtgttaaaaattaaaattaattcaaaattgattttaaagcttactgcattgtttgcggtaatctgtcttgcactctgttcgtgttcaatcaatatcaatgtgaacggttccgattcggaaagcaaaacaactgtttcagaaatcggaacattatcggttcattaccttgatgtcggacagggtgacagcatatttattgaactgccgaatcaaaagtgtatgctgattgatgcaggcgaaaatatgtacggcaaaagtattaccgaatatatcaataatctcggatacacaaatattgattatctcgttgcaactcaccctcatgccgaccatatcggttcaatggcttatgttgtaaagcataataatatcggcgaaatctatatgcctaaggttacaaccacaaccaagacctatgagaatctgctcacggcaattgcagacaagggacttaaagtcaagtcagccaaagcgggtatgaatattattgatgacaacgatttcagcataaatattcttgctcccgtaacgattgacgaggataatctgaacaattgctcgataattctaaaaataacttacaaaaacgatagctttctgttcctcggagatgccgaaaagaaagagcttgaaaccgttacggcagatatgagtgcagaagttcttaaagtaggtcatcacggaagcagaacatcaacaacaaaagcgttgcttgaaaaggtaaatcctaaatatgcggttatttcactcggcaaggacaatagctacggacatccgcacaaaagcacattaaagttgcttgatgaattcggagttgaaacatacagaaccgatgaaaacggaacagttgtcatttcaaccgagggttcaggtgtgacaatcaaaacgggacaaacttcaatgaaaagggatgaataa

SEQ ID NO: 547 - DNA, 21236 bp, unidentified
  source 1..21236: mol_type = unassigned DNA
cacgtgtttggcggaccgaatcgaaaatattcggaacgatacggcttaaaagtgagactgtgcggcgaacgatgccaccgaaatggtgcgaactcagtacatagaaaccatcaagtgaatttgtctctaaaggcagcaggacaaaaagcctttgagagtcagcacggcacccacgaggactttatgaaaatcttcggaaaaaattacatctaggcacctctggcttgaatatcacggcgagccatgttaaaacctcccggttaaaagccgggaggaaataaaggagaagaaatgaaacaggacataaaaacagcagtgattgaactgctcactgacttaatcaaatggataggaggcaataatggaacagataacaatagtattaaatgacatggaagatgtcaaaagggaaattgacaattgccagcgcaaggcagtaaagagcgttgtcgaacttgggtacatcttgagaaaagcggatgatgccgaactcttccgcgaagctggctactccagcatattcaaatttgcagaagcggaatatggttggaatcagtcacagacctcgcgctttatggatatcaatagagagttttcgaaggatggctattcgactgaactccaggaaagatatactggctacggtcaggcaaaactttcagaaatgcttacgcttccggataacattcgagaggaactttctccggacatgaaacgagaagacatccgagaagtgaaacggcaaacaaaacaggcagcagagcaggaagcagaatctaactttgcggccacggtgtcatttgaatcgacggacaacaatttcctcacggattcaattaaaaccttactgggacagaaagaattcgtggataaatttagaaacttatacccgcactttacacgaatgatgagcacgggaaccgtagataccgaagcggtagcgatggcggtatcaggtaccggatttggttttacaagagccggtgcgtacatgtatttctttaaggacacggagttgcgtatcacaaagggaatgcagaaaaaaacatactcatacgaggagttcatcaagtcggcggcggcaattagaaatccatccggattatccgcagaggaatggtatgaaaaagtgttcggcataccgttaccagtggaacagaagaaagaaccaccaaagccacagaaaaaagagccgccaaaaccgaaaccgaaaaagccggtcgtagagcgaaaaaacgttgattcggaacaaccggaagagccaattgagtgtgaagggcagacagaaattggtgaatttgcggaaaaagaggaaatcggcagcagtaaaacagaaggaaacaacgaaaactcgatatcggacaaagattttgaagagccagttgcgccggcgcaagaaaaacaactgtgtagcttttgtgaaactggtggttatattacttcggatgatggtgcaactacactgaccatattaaaattactggacgacaaaggaaatgtaaaagtagagatgagggatgtgtcgggaaaagtaagattcaatcgttgtccgatgtgcgggaggtgttttgaatgaaaacaaatcatagagaagaacgacaggaaaaggtatacatcacaaaggaacagttgacgccgtcccggttaatgttaaaagccggagatgtgatttatatttataagccggcaccgattggtgagagagtaaaaggttttgaacgcagagtaccggcacagattgtgaaactgtatagaaatcatgctctgtgtgctgtaaacggacgacgtgaggcgtttacctatgcggagattgcacaggcacagttgagagaaaggaagggaaagaaatgagactgattgatgtagatgccacaaagttccgttgcagatacgacaaggtttgctcctgtgataataaagataaatgtaaaaagtgcgagtattatgttgcggattttaaaacactacatagtcagccgctcgcttacgatgtgaatgaagttgtaaaacaactagaagacgaaaaagaatatgcgtatgcaaattttgaagaatatgtcagggaaacgtgcccgtggtttgatgcagatcaccatgatacgtttgcgaatgggttggtgcgagcggttgaaataataaagaaaggaaatggtgaaaatgagactgattgatgtggatggatttacaaagagatataaaatcgaagaaaaatatacaagtttgtatacaaaatttgtgatacaagagggaacaacatgcgaaaacccgggggcaaaacttcttttagaagatatggagcacagtggattctttagtgctccggcgagtacaaggtatcacggaagttatgctggaggactcgcgcagcattctatcaatgtattcgaaagaatgatggaaagcgaagcaccaagagattacgatgtaggaacaatcgccacggttgccttgctacacgatatatgcaaaatggacgcctatcacaaagaaaaaacagaggacgggaaagaaacttacgtatataacaaagacgcttttccggcaggacacggtgaaaaatctattttcctcattcagcgttttatgaatctgaccgatgaagaaatccttgccatccggtggcacatgggagcgtttgacgatgcggttagaggtgggagccgggatataaacgcggcatacaaacggtcaaaattggctgtatatttgcatcttgcggacatggaagcaacatacattgacgaaagggaggaatgaatatgtttatcaaaacgaccgtattcaaacgcttgctgaaacaggcatacaaaagagacttattacaagtcggacatgaggacaacacaaacatatattacataattggcggttactgggccattatggtcgagaaaaggttttttacaaatgcggccaaggctgcactggttgagttaatcggagacctgccagaagacgagagcatcaagatatatagtgatggaacaaggcagcagttgatagacgattccacgtggttcgcgcttgcgttgcaagaaccggaaaaatatttggaagaaacgaatcttttgatggaagaggaaaaattcggcgttttaagtaggttattttcaacaggcgagaaactcatcccagtaaatgaaggcttgtactctttaattgacgaagaggcaaaaacatcggatgaccttgacgttgttggtccgtataagacacgtttatccggtcatatgctaatgtggaagaacaacacgtcaacggttgggcttttgccaagggtatggaatgatgatggagagttgatggaacagttaaaagaattagaacagttgaaaagatttggaggggtaaagaatgagcatgagagaaaaaataccggtatggaagaaggttaatctatcaatcgaagaggcagcagcctacagcaacataggggaggcaaagattagagagctggcaaaactcccggattgtaactttgttctgatgaagggaacagtaacgctgatcaaaagaaagaaatttgaagaatatctggcggagttagaagttttgtaattcgccataagttctcaaaatctttcaaaaagtattgaaagagcattgtatttgtgagattataaaagtgcaatgctcttttcttttaccggaaaggagaggaaacgaaaatggtaagacgaaaagacaacaaaggaagggtactccaaaaaggagaaagccaaaggaaagacggcagatatgtataccagtacacagatttgcaggggacaagaaaatccatatacgcaaagaatctgtcagacttacgcaagaaaaagcgagaagcaataagagacctagaagaccacattgacacctatggggcaacaataacattaaatcagttatttgataggtatttatcattgaaaacaaatataagatattcaacgcgtcagaactatacgaatatgtggaacaacaatatcaaacacacaccgttgggaaataaacaagttgggaaaattgtaaaaagcgatatattaaagctgtacaaaaacttttcggagcgaggcttgaagtattcgacgatttgtacatttaatggaatactggttcctgcttttgatttggcgctggcggacgacttgatacgaaaaaacccttgcattggatgcgtgaaggaatttagaaaggatgatgcaagggaacgagtggcattatcaaggtctcaggaacgggaatttgttaattatataggcagcagtatatacgccaaacacttaccaatgataaaggttgcactgaaaacgggcttgcgatgtggtgaactgataggcctcacctggtcagatgtagactttgacgaggaagagataaacgtgaatcatcagcttgtgtacagaaaggttgatggaaagtataaactgtatgcagaggtgccgaaaacgaaatcgggcacaagggtgataccgatgacaaaagaagtgtggcgtgaattactgatacaaaaacaacgtcagattatgctcggcacaacaagcaaagaaatcattgatggatatcgtgacttttgctttactacaaaaagacgtgcgcctgtcatgccctcggcagttaataatgtgctgtataacatcgtgaacagttacaacaagacagtaaaagactgtgaagaaagactccctaaaatatccgcgcacatcctgagacacacggcgtgtacacgcatggcggaaagtggtatggatgtaaaagtgttacaatacatcatgggacataacagtatcaatgtgacaatggaagtgtataatcatgtatcgccggaaaggagcagggaggaaatgaaaaaaacagaaaacattcgcttgatcgtttgatattttacttcattttttacttcaaaatatagaaaaatatgaagtaaaatgagaaattatgagaaatcaggtaaaaaagtaggagcgaagaaatgacgtaaaatggtaggtttgagggattataagaaagaaaacaagacctgttagcagtcaatttgaatgagtgctaaatttttcttgacattcgattgtgacagcgttatcatatctgttagaacaagattgaattactaattggaggttgataacatgacgaatgaacaaggaaatttagcgattaattcagaaaacatattcccgattattaagaaatggttgtattcagaccatgatatttttatccgtgaagttgtaagtaatgcttgtgatgcgattacgaaattgaaaaaattagaccttatgagtgaggcatctctgccggatgattacaaagctaaaattgaggtggaagtaaatccggaagataaaacaattacgtttaccgataatggacttggtatgacggcagacgaagtgaaagagtatattaaccagattgctttttccggtgctgctgatttcttggaaaaatataaagataaagcaaatgaagagcagattattggacattttggtcttggcttttactctgtatttatggtagcggactctgcagaaattcataccctttcttataaagaaggttcggaagcggttcattgggagtctgacggtggtttgacgttcgagatgggaccatccgataaagatacagtaggtacccggattatcctgcatttaaatgaggacagttacgagtttgccaacgaataccgtgttcgtgaggtgcttgataaatattgttcttttatgccggttgaaattttccttacaaaggcaaatgctgagccggagtatgagacaattccgagcgaggaagtgacagaggaagatacggttattgaggaaattgtggaagagccaaaagaggatgacaaaaaagagggcgaagaagcaaaagagccggttaaaaagaccaaaattttgaaacgtccggtatccattagtgatacgcacccactttgggcaaaacatccaaatgagtgtaccgaagaggaatacaagacattttaccgtaaagtatttaatgattaccgtgagccgttattctggattcatttgaatatggattatccgtttaacttaaaaggtatcttgtacttcccgaaagtaaacttggagtatgagaatgttgaaggtatgattaagttatacaacaatcaggtatttattgcggataatattaaggaagtaattccggaatttctgatgttgttgaagggcgttattgactgcccggatttgccattgaacgtaagccgaagtgctttgcagaatgatggttttgtgaagaagatttcggattatattacgaaaaaagtggcagataaactttccggtatgtgcaaaacagaccgcgagaattacgagaaatattgggatgatatcagcccgtttatcaaatttggctgcttgaaagatgagaagttcaaagagaaaattaaagattatgttttgttcaaggatttggacgacaaatacagcacattaaaagagtatttggagacaattccggagccggaagtagaggcagaagtggtcgaagagggcaaagaggatgagaaatcttcagaagagacagaggcaccaaagaagattgtttactatgttaccgatttgcagcagcagagccagtatgtgaagatgttccgtgagcaggatatgaatgcggttgttcttcttcataatattgaccagccgtttgtatcggcattggaagccggcgatgacgatgtgaaattccagagaattgatgcagatttgacggatgctttcaaagaagaaggcgatgaggaaaaactgaaagaagataccgagactttgaaagaattgttccgtaaagcaaccggaaaagaccaattagaggttaaagtggagaaattgaaaaatgataaagtttcttctatgattaccttgtctgaagaggccagaaggatgcaggatatgatgaagatgtattccgcaaatggcatgggcggtatggaactgccggatgtcggacagacgcttgttctgaatgcaaacaatgatttggttcagtatctgctggcgaacaaagacggcgagcacagcgatatgttctgcaaacagctttatgatctggcaatgattagccatcagccactgcaggcagataagatgacagagtttattaatcgaagcaatgagattatgatgctgcttactaagtaatgtaaggtattatgattaggagagcaccaccggtgcatgagaggcaggacttgctttttatgtgccggtgggtgtttttgcttatttgaaaaaaatgaccaaaagtatgaatgaattacttgacaaaaaaattaggaatgtgtattatatattctgtcggttatacaccgtgtgcttcgatagctcagtcggtagagcacttcactcgtaatgaaggggtcgagggttcaagtccctttcgaagcttcctttattttgtttacaatatactattttgtatactattttcgaactgcctgcatttacagtaaagtagatgcaggcagtttcaataagaaaggagaaataaatggcagatagaaaactttcgcaggatatggcaggcgcgtgggggcttatgagacagaaagaaaaagtgctcatgattttacaaagtatactgactgccatattgttaatctttatcattatcgatgtgggcatggggatgaataagggctggattttaaaaacggagcttggaattgttattgtgctgtttgttttaaatgccctgaaagcctatccggagaggaagaaagcaatcgttttttatgtgctgcttaccttggcggcagtggtttgttttacactccagtttatataaatggaaaaatcttgacaaacgtatgtggatacgctacaatacatggtgattcaaagtataattttgaacgaataaaaagaatttaagtaaaaaggagaaatcgtattatgttagaaaaaatgcaggaacttatcgcagatcagttgagcgtagatgcagacagcatcacagaagcatcttctttcaaagatgatttgggagcagattctcttgatctctatgaattgatcatggctcttgaagaggagtatgatgttgagattcctacggatgatttggaaagcatcaacacagtaggcgacgtaattaatttcttaaagagcaaaggtgtagagtaaaacaattgcacataacctgataaacaggtcaagattgacaccaagaaagtttgacatagtccgcttctcttggtgtcaatgttttagagtgcaatgtatatgcaccaatgatgagaaaatgacgaaagaaaggctaggatagaactatgggtaaaattgcatttgtcttccccggacagggagcacaggtggtaggaatgggacaaaatgtttatgaaaattcagcagtggcaaaagatgtgtttgaacaagcatctaaggcagttgatttggacttgaaagcactttgctttgaagaaaataacgacattaatattacagaatttacgcaggtatgtcttcttacaaccagtgtggcaattatggaagaattgaaaaccagaggtgtaaaggcggatgtggcagccggacttagccttggtgaatactgtgcgttagtagcagcaggttctatgaattttgtagatgctgcaaaagcagttcgtaaacgtggtattttcatgcaggaagaagtgcctgccggaaaaggcggtatggcggcaattcttggtatggatgccgcagagattgataaaaatattgaagagtttgataaagttcaggttgcaaactataactgtccgggacagattgtaatttccggagagactgaacaggtaaaacaggcagcagacaaattaaaagaagccggagcaaaaagagctgttcttttaaacgtaagcggaccatttcactcaagccttcttaccggagccggtgaaaaattagaggctgtattaaaagaacttacgattgaaaaaccgcagattccttatgtggcaaatgtagacgcttcctatattacagagcaggcagacattatgcctcgtcttgtaagtcaggtcagccattcggtacgctggcagcagtcagtggaaaagatggtagaaaacggtgttgatacctttatcgagattggaccgggaagaacattggcaggatttaataagaaaatagccaaagccattggcaaggaactgactacatataatgtggcaacaatggaagatattgacaaggttgtagaagcgctcaaatagtgctttatgaaagagaggcagtatgttattacaagacaaaatagcagtcgttaccggtgccagcagaggaatcggaagagcaactgcaaaagcacttgcccgcgaaggtgcaatggtaattgttaattataatggttccaaagagcgtgccgacgaggtcgtttctgagattgaaaaagatggcggtaaagcgaaggccattcagtgcaatgtcagcgattttgagcaggcgaaagaatttttcggcggcgtggtaaaagaatatggaagaattgatattttggtaaataatgccggaattacaagagacaatctgattatgaagatgtctgaggaagaatttcaggatgttattcagacaaatcttgccggagtctttaatggaattaaatttgtgacgcgtccgatgatgaaacagcgtcaggggcatattatcaatatggcatcggtttctggaattatcggaaatatgggacaggcaaattattccgcttccaaagccggtgtaattggtcttaccaaagcgacggcaaaagaattgtcatcccgtggtatcacagtaaatgcagtagcacctggatttattgcaacagagatgacggacaagctttcggatgcggtaaaagaagaagcatgtaaaacgattccacttggtgcctttggtacggtagaagatgtagcggaagcagttgtatttttagcatctgaccgtgcgaaatacattaccggacaggtattgtgtgtcgatggcggtattgcgatgtaacagaatgaatggaggaaagaatgagtagacgagttgtagttaccggtatgggtgcagtaaccccaatcggaaataatgtaaaagatttttgggaaaatgtaaaaaaaggaaccgttggaatcggaccaattacgaagtttgacacaaccgattacaaagcacatttggctgcagaggttaaagattttgacccgacgattgcgatggataaaaaatccgcccgacgtatggaagattttgcacagtatgcggttgtagctgcaaaagaggcacttgaagacagtgggctggatatggaaaaggaagatccatttatggtaggatgcagcgtcggctgtggaattggaagtcttcagtgtgtgcagaaaaattatgagaaaattttgacaaaaggaccaaaccgtgtagctccgcttatgattccgatgctcatttccaatatggcagccggaaatatttcaattcagtttggattaaaaggtaaaaatatcaacgtggtaacagcttgtgcaacaggtactcactgtatcggtgagggattccgctccatccagtatggtgaggcagatgttatggttgccggtggctcagaagctgcgattaccgagcttggtgttgccggatttaccggattgaatgcgttgaatacaacagatgacccgaaaagagcttcgattccgtttgatgtagaccgtggcggatttgttatgggtgaaggtgctggtattttagttcttgaagaattagagcatgccaaagcacgtggtgctcatatttacgcagaagttgttggttatggtgcaacgagtgatgcacaccatctgacagcgccgattgacgacggaagcggcgatgcaaaagcaattgagtttgcaatcaaagatgcgggcatcaaaccggaagatattgattatatcaatgcacacggaaccagcacacacatgaatgatgcattcgagaccaaggcaattaaacttgcgatgggagatgcggcttaccagtgtaaagttaattcgacaaaatccatggtaggacatctgcttggtgctgccggtggtgttgaggcaattacttgtgtaaaatctattatggaaaactatgtacatgccaatattggtcttgtaaatcaggatccggaatgtgatttggattgtccgaaagaggcagttgaaacaaaagttgatgtagcactgagtaactctcttggatttggtggacataatgctgtattgattttcaaggcatttgcagaataaaaaacggaagggaaaaacgaaatgttattagatatcaacgatattcaaaagattatcccacaccgttatccgttcctcttggttgactgcgtcgaggagatggagccgggagtaagagcggtaggatataaaaatgtaacgatgaacgagccatttttccagggtcattttccacagcagccggtaatgccgggtgtgttaatcattgaggcattggctcaggttggcgcgattgcagtattaagccttccggaaaacaaagggaaacttgccttctttggcggaatcaaaaatgccaaattcagaaagcaggtaattccgggcgaccgtctgcgcttagagacagaaattattaaatgcaaaggaccgatgggcattggcaaagcagttgcaacagtagatggtaaattagcagcagaagcagaaatcagctttatgtgtacggatgctaagtaaaaggcgtcgaaataatatagtttaaaaatagaaaaaagaaattcatttgtctcgagacaggataatgtttcacattatagtctctcgccaattgaatttctttttttctattttaactgtattgttcgaacgtacttctgtaaaagagagaggaggaatatgccaacaaaacgtcctaatgtttaactaatttttagtgggtatctggtatgcgtggttggcatgccgatacccttacgcgtttgtttagcgggagcgcccacgaaacacaaacatttcttattaatttacggaccctaaaaaacaaccattaaacacttatcccaaacgaatatcactaataaattaaaaaaaaatcttacgataacagaaaaaaggtggtatactaatagtgtagacggaaaatataagcgcctcttatagtcgtggcgcagtcggcagaaaggatggatagacttgtttgaaataggagactatgtagtgcatgggaatagtggagtctgccgggtagaatcgattcaaaatatggatggcatagatggtgccccacagcgcacgtattatacgctggttccgatttatacttcgggcagtaaactgtttgtaccaacggatggaaaaagagtagtaacacgtccggttatgacgaaaaaagaagcagagacattattaaaagagtgggacgaaattgagacactctgggtagagaacgataagaagcgggaagaggtgtacaaagaggcactccgttcctgtgacagcagacagtgggttaaactgattaagacgtcttatcagagaaatcaggccagattacaaaaaggaaaaaaagcaacaacaagtgatgagcgttatctgcatatggcagaggataatttgtttggtgaattagcaattccttttgaaatgacaaagggagaagcagaggagtattttgtagcacagattcgtggagagtaaatgaatttattatgaaaaaaagccggttcgctttttcgcagaccggcttcattttttggttattttgattcaatttcttttgtcatcttagcaatcaattcttttactgctggtacaacatcagcaagtgcaactttatcctgtacggatttatcacggcttgagagctcaacaacggattctttcatatttcttgggctgactacaagacggattggaacaccaagtaaatcagcgtcagagaacataacacccggacggacgtttcggtcgtcataaataacttcaatgtgttctttttgcagacttgcatataattcatcagcaaaagcttttgcttcggcatcgtctgcacgcagacagcacaggtgaacctgccatggggcaatggtaatcggccataccggaccgtagtcatcgtgatgtgcttcacagacagaagcagcaagacgtccaacgccaataccataacagcccataattggataatgggattcgccatccgcatccaaatactgcatattcatggattttgtatatttcgttccaagctggaagatgtttcctacttcaataccgcgggaaatgtggatggtctttttaccacagtgtgggcagatgccgccatcaacgatttttgctaaatccacatattcggcatcgacaacatcacgctccatgcagagtcccgtgtaatgatattcttcttcgttggcaccacaggataaattatttgttccctgaagtgatttgtcataaagcacggtgtagttgccatttacggtaagatttaccgggccgatatagccggcattcagaccacagtcacttgtaattacagccggatgaacttcttcgccgagatagttcgtcagtttggtttcattgacatctaaatcaccgcggatgaaaataacaacaaaatcgtctgtcatatttttctggtaaacaacagctttacacgatttctccaatggagaatgaagaaaatcacaaatttcttcaatagtgtgaatgttaggtgtgtgaacttttgtcagtggttcatcgactgcatctttcgtattttcaataactgattcagcagcttccatatttgcacggtaatcacaatcggaacagatggcaatcgaatcctctccaattggtgttaagagcatatattcatgggaaagacttccacccatcataccggagtcggaggcaacggtaactacttccgggataccggcacgtgcaaaaatacggttataagcatcataacaaatttgataataacgctctaagtcttcctgtgaagtgtggaaagaataagcatctttcatagtaaattcgcggacacggattaaaccggcacgtggacgtgcttcatcacggaatttagtctgaatctgataaatcataaaaggataactgttataactttttgcataatcgcggacaagctgaacggcagcttcctcgtgagtcattcctaagaccatttttgagccgttgcggtcggtaaaacgtaaaagctcactgccgacactttcgtaacgtccggactcatcccacaaagatgccggaagagcaactgggaacaaaacttcctgtccgtcaatggcatccatttcctcacggataatcgcctctattttctggcaaatgcgctttaatggggtaaattgtgagtaaattcccttggctacatctttcatatagccgccgcgcatcatcagtgcatgactttcaacgacgcaatcgcttggtttttctttgaagcgttcgcctactaatttgtctagtttcataattgtcatttcctccaaaaataaattcgtacatcaaatgtaagtgctcaaaatcgattttgaacaattacatttatgttagcatttagccgggcaaatgtcaacttgcacaaaccaaaagagagtggtacaatgtgcgtaatttggagcgaatgcagaaaggatgaaagaatatgacatatcagacagcagtttttgatttggatggaacgttattaaatacattagaagatttagcggacgccgtgaattattcacttaaaaaaaataaaatgccactttgtacaattacgcaggtgtgtcagtatgtgggaaatggaattgtaaagttaatggagcgtgcggttccatccggtaaggataatccggtgtttgagcaggcactttctgattttaaagaatattatgcagaacactgccatgacaaaacagcactgtatccgggggttcttgcgcttcttcaaaatttaaagaaaaagggtgtgaaaatggcggttgtatcaaataaggcggattttgcggttaaagaattgatgccggtttattttccgaatctgctggatgtggcactcggagaaatggaagaaatggggatccgaaaaaagccggcaccggatatggtttataaggcattggcagagttgcggtgtgataataaaaatgctgtttatattggtgattcggatgttgacttagcgacagcaaaagccagtgaaatggactgcattggtgtgagctggggatttcggggaagaacttttttagaagagcatggtgccgattacattgtcgataaaccggaagaaattgaaaaatttttcaaataaaaacaaacgaataaaaacaataaaatgggtcacaatagcattgtaagaaacgatttatttgtagaaagtgaggatatttcaatgaaaaaaatagtagtttttgcaatgcttgttgtttgtttgtccgctatggtaaccgggtgcggcaataaaaataacagcgcaacggacccatctgcttccccggaagcaacaaatgaagcgacacagacgccaacgaatgaaaataataacacagcaacgccaaatgcgacggatgacaacaaaaacgatgataacgatttatcggatgatgtaaaagacggcgtggatgatgctgctgacggtgtaaacgacgtaattgacggtgtggatgacgccgttgatgatgtgacgggaaacgataaaaattaataatgggatgaaaaagaagcagcaacgggattgcccgaaactgcttcttttttgtacatatatatttttatgcgaaatagttaagataaatgaaaaaaatgtaaaatatgtagtttttttgtcaaaatttttattgcttggaatatattggtatggtagaatataaattgttatagggagttttatgggataaataattgaggaaggaggatatttttatggaacagaaaaacggagcagcaacagcttctaccattcttggtattgtgagcttagtaatcgctgtcatcggaggaattacctttggtgtaattggtgccgcaattgctttgattttaggtatcgtagcagttgttctcggtattaatgcaaaaaaacagacaggaggcacaaaaggtcaggcgggttttgtctgtggtttgattggtattatcttcgctgttatttttgcagtaggatgttcaatctgtggtgctgttgagtccagcagtaccaaaacaagttatacttgttatggatgcgttggtggttcctgtttagtaagcagtgatgttaatgatgcagcagatagtttaaatgacttgagcaatgcattgaacgacttgtcagatgcttacaactaagagaacaatataaccaaaataaagaaggttgctgcttaggcagcagcctttttttctaaggaggagaaaatgtttccatcaattcatttaggatttgcagatattccaacttatagcacaatttttttggcaggtttttttatagccattattatagcaagaaaaatagcaggccgctatcgtctggccaaggaggatgttttatatggtgccatctatgcggcgattggtattcttatcggctctaaactgttgtattgcttgacaaggcttccgagcctgatacagaaatgggatgcagttgcggctggttttgataaaaatttcatgcagacactgttatttttaatgaattatttgtttggtgggcttgttttttatggtggcctgattggtgcctttttggggatcttttgttactgtaagcagtatcatttatcctatgttccgtatatggatgtgtttgcaccattgattccatttgttcacggtatcggaagaattggatgcttttgttctgggtgctgttatggcattgaataccatggcccttttgccatacagtttccgtataatgaggctgttccgcaattaagtcaggtgccgcgtttccccgtgcagcttttagaggcgcttatgaattttcttttgtgtggtattttattttgccttatgaagaaaaagaatttgagaaatggacggttgatgggaatttatttgatttattattccattgccagatttttgttagagatgcttcgcggggataaaatcagaggaagtatcagtattttttccacctcgcagttaattagtttgattttgctgccggttggaattgttttggtgcgtggaaaatgggtggaaaagcattgcaaggaagaaaaaagtggtgtataattttccatagaaaaaattccggcgggacaggatgaccggtgagaaagatatggaaggaagaaaattatgttagatatcaaatttgtaagagaaaatcctgatgttgtaaaacaaaacattaaaaataaatttcaggagcacaaactgccgcttgtggatgaagtgattgcgcttgataaagagcgtcgcgagacacagcagaaagcagatgaccttcgtgctcttcgtaagaaaaattcaaagatgattggtgcgctgatgggtcagggcaaaaaagaagaagctgaggcaatgaaggaagaggttgccggttatgccaaagaactttctgatttagaagcacgagaggcagaaattgcagaggaattgaataagcgcatgatggtaattccaaacatcattgacccgagtgttccaattggtaaaaatgatactgaaaatgtagaaattgagaagtttggtgatccggtggttccggattttgaaatcccatatcatgcacagattatggaatcatttgatggactggatttggattcggcacgtgacgttgcaggaaatggattctattatctgatgggcgatattgcaagacttcattctgcagttatttcctatgcaagagactttatgattgaccgcggatttacctattgtgtgccgccgtttatgattcgttcaaatgttgtaacaggtgttatgtcgtttgatgaaatggatgcgatgatgtacaaaatcgagggtgaagatttgtatctgattggtacgagtgaacattctatgattggtaagtttatcgataaaattattccggaggagcagctgccaaaaactttgaccagttattctccatgtttccgtaaggagaaaggtgctcacggaattgaggaacgcggtgtttaccggatccatcagtttgaaaagcaggagatgattgttgtctgcaaaccggaagacagtaaaatgtggtttgataaattgtggcagaacaccgttgatttattccgtacattggatattccggtacgtacgttagagtgttgttccggtgacttggccgatttgaaagtgaaatcgattgatgtagaggcatggtctccacgccagaagaaatattttgaagtgggaagctgctcgaatttaggagatgcgcaggcacgccgtttgaagattcgtgttgtcggtgaaggtggtaagtattttgcccacaccttaaataatacggttgttgcaccaccacgtatgttgattgcgttcttagaaaataacttatgtgaggatggttcagttaagattccgaaagcattacagccatatatgggcggtaaagaaaaaattgaagtgaaataaaaatgacacagtgtggttttatagtgagactgcacgatgacagaagattctgctatcgtgtagtctttgttctgtgatttgaggaaagataaatataaaaatttacaaagaaaggtgagaggaaatgcgaagcagcaaaagatattttgcactgttatttcttctgtttgccctggcatttgccggagtgaatcagatgaattatgtgcaggcaaaggagacgacacaaaagatttgtctctacttaggacaaaagattactcttgcggatttgccggaaggggaagtggttttaagtaaagagcatgtggttgaggtgtcggcaaacaaagttgttacgacgattggtgcaggtacggttacgatttccgtgaaaacgaaggcggagacagttgactatgcagaaattgaagtaaagaaaaatgagattctttcggatttgagttttaacagacagtcgtttacggcacatcctttgggtggtggctcttttcagctgccgataccgcagtttgaatcgatgacgtgtgtgtggcaggcaagaacgccggaaacggccacagttacacaggagggaattattacgccggttcgcgcaggctttgcagaattttctgttacggttacggattcatatggcggtgtgtactcttttgtgcttggtgttgaaattttgcagccccaatttacaatccaaaagcagaatttagcgaagggctgtcagacaacacttttgttagaatctgttgcaggaaatccggttgtttatcagacaagggatacttccattgtttcgattgtttcctataatcaggcgggcgttgtagttaaggcgaaaaaagttggttctactactgtagtggcacaggtagatggcgttcagacagaatgtgtgattacggttacaaacccgcaaataaaaaaggcatatggtttttatcagaaaaagaaaaaactggcggtcaaggtgactgggttaaatgcagaaagccgtccggtctttcgttcgtccgatgtaaaggttgctgttgtgacagcttcaggaaaggtgacaacgaaaaagtatggaagtgctgtgatttcctgcgaggtcgatggaaagacagtaaagtattatctggcagtaagtacgaaaacggctgtccgggcgatgcggtatggttataaaaagataggaaagaaaaagtacagtcaggcaaggcggatggataaaaactattatgactgctcctcttttgtttaccgaacctatcgtgcggtaggaagatatcttgtctgcaaaacaagctgggcgccggtggcggcggacatcggccactattatgtgagaaaaggaaagtccattaaggcaaagaaaacctattctgaaaagaaaatgagaccgggagatttgatttgctttggcggctcgaaggcaagaagaaacggacggtataagcgaatataccacattgcagtttacattggaaatggtaagacaatggagagtagttcaacctataataatgttgtaataagagacagaggcgtttttaaaaagagcgaaattccggtcgttgtacgcccataatttgtaaaaaaagtaattgacgagtaaaatatcacgtgatacaataaagttcctttcggaaggaacagcaaaaagcagtgtttctcatgcgcaggggaaacactgcttttgctttatcagacagcgtggtgtttgtctggtgaatctaatttcattttatctgtttatctggtaaatgagaatcgcagctatttacatgatataaaaagacaagagggaggactgtctatgaatttaaaaatgaaaaaagtaattgcatgggtgcttgtgtgcctgtgtgtatatggttcgatgccaaaggaaatggtgaaagcagcttcggctggctccatttattatgtgccgaaaggacagcagggatgctatacggatagtttagatgttgcgttgcagtgttgttcgatgtgtggaggagtaattactttggaaagagatatttattatgactttcctgactttatccactatgatgcgataaataaagatactattcttgtagtggatgaaggggtcacattgaccattggtaagaagggattgcaaatggatggaattttgcagattcgtggaggaacagtggatttagaaaattcggatggaatattatatggttccggtaaaatcgatttgttagcgggacgtatgattaaaaaatcgtattctgtaaataaaaataacacatccatttgtttggaagcaaaaagtatttcatacggtcagaaactgaaagaggcacagattcctgaggataaagttacgtggtcaatgccggttgagggaacgtggcagtttgtgaaaggagacttagtcccacaatcgggaacatccaatcaggatattgtatttgtgccgaaatatccgatgacgtatgattccttattctttacaaagagcgggaaagtaacggtaaatgctgttatcccaagacgacaggatgaaaaagaagtacagatttttgccggtcagaatttaatgaaaattcatccggacttgatgtatgtaagtccggttaccggcgaaaaggtagcaggtgaatttaccttttctacggatgccaaagagtatgatgttggaaaacatgagatatcgggtgtgtttacgccgcaggataataattatcagtcggtt

SEQ ID NO: 548 - DNA, 14278 bp, unidentified
  source 1..14278: mol_type = unassigned DNA
atggataagtcagaaagaattaaagatcttgtagaattattgaataaagctaacaaggcatattatcaggaagccaatgagataatgactaactttgaatatgataagttgtatgatgaattggttggcttagagaaagaaacaggcatggtgttgtctaacagccctacagttaacgtaggttatcaggttgtcagtcagttgccaaaggagcaacacaacagccctatgctttcccttgataagactaaagaagttggagcattggcagattttgcaggagacagaaagtgtcttttgtcttggaaaatggacggcttgacagttgttcttacttatgaaaatggagaacttgtaaaggctgtaacacgtggcaacggattggttggagaagtaataacaaacaatgccaaaacatttaagaatataccgatttcaataccttataagggcagacttactcttagaggggaagcaataattaaatattctgactttgaacagattaacagagagattgaagatgcagattctaagtacaagaatcctagaaatttgtgctcaggttcagtgcgccagttaaatagtcaggttacggcagagcgaaatgttaattttgtagcgtttgcacttattaatgcagatgatgtggactttggcaattcaattgagcaacagtacaaatggatggaaagtcagggatttcaagttgttgagtacagggttgtaacaagaaattcaatggaggatgcagtaaaatattttgctggaaaaattcagacttacgattatccttctgacggattggttcttatgtttgatgatattgaatatggtttgtcacttggaactacagccaagtttccacgaaacggaattgcttttaaatgggaagatgaacaggcagaaactacgcttaaatatattgaatggagtccaagtcgaacaggacttattaatcctgtagcagtttttgaaccggttgaacttgaaggaacaacagtaagcagggcaagtgtacataatattagtattatggaagaattagaacttggctccggtgacagaattaaagtttacaaggctaatatgattattccacagatttcagagaatctaacaaagagcggaatagatgatttgcctaaggaatgccctgtatgtggttatgcaactgaagtgaaggcagagaatggaataaagacactttattgccctaacagccagtgtccggctaaacacgttaagttatttactttgtttgtgtcaagaaacggaatgaacattgacggattatcagaggaaactttggagaagtttattgacgcgggctacattaaggaatttgcagatattttccatttggacagatattatgaagaaatagttgcaacaccgggatttggacagaaatcatatgataatcttatggattcagtggaaaaagccagaaatgttgaactttcagcgttgatttatagcttgggtattccaaatattggttcagccaatgccaagcttatttgcaaggcgtttaacaataacattgaaaaaataagaaatgcaagtgttgaagagttgattgaaatagatggtataggtgaaataatggcagagaagttctgtcagtattttgcagacgaagacaatatcaaaaaacttgataatcttcttaaagaagtaaatattgcagaaccggaagaaaatacaactcctcagaacatggatggtttgacttttgtaataacaggttcagtggaacattttgctaaccgtaatgaactaaagtcgtatattgaaaagcatggcggaaaggttacaggctcagtttcagctaggactaattatcttataaacaatgatgcaatgtcagcatcttctaaaaacaaaaaagccaaacaattaggtgtggaaattgttacggaagaagtttttttagaaagatggtgtaaagatattgaacagtaggtcataatatggtaaatatgatacaaggataaaagttggcagaataatcagatataaagtcagatgaaaaataatataaataaaacaaaacaaacctgacagaaaacagatatgaaagttatatttttatcctatgtatgaacagtattaaatttctaaataagtatttcaggaggagttagttatgagaaatgatatagtagaaattttatgcgacatcaatccactgttagacccggacgatgaagacatgagcatagcagaatttttagaatcaaaacaattaatggagttaatagcaagacttgaagaccacttcgacatcgatattccatatgacgatagaaatgaagacaacttctacagtgttgacacaataatcgaattgctagaagggttgcagtagaacttcaaagaattaagaaattaaaaaatcgctcataaaagttttaagacaaacatatagctatcaaacttttatgggagatttgcaataaatgaggagtatgaccaattggtagtactccttatttttgtgcaaaatttcaaaagtcatatttgcgggggacacacatctaaaatccaactgattttgtacaatatatgattgaatttgtggtagatgtaccccgatattttaaaaacttcgttttttgaggtacgcgtcctaatttctagtagtattcacttgactttttttcctgttgcagatactataataattgtattagttgtagtagtacaattatagtgaaggggaaagaatatgcttactgttaattttcaatcaagaacgccggtatatcagcaactttacgatgatgttgtaagactggcatctcttggagtgttaaaaagcaataccaaattaccacctgtgcgtgttttggcaacagagcttggaattaatcctaacacagtgtcgaaagcatataagatgcttgaagctgatgggtatatatattctacagttggacgtggaagttttgtatcagataagttgtgtcaggatgaggctgaaaaaattgccgcaaggcaggaactgaaaagaaccttgaagaaagcgtataaaaaaggtgtcacaaaagaagaaatagtgaatatgatagaacagataatagagggagtagacatagaatgatagaaattaagaatttgactaaaaaatttgattcaaatgtagccctaaatagaatgaattgttctattagtgaaggcacaatttttggattggcaggtagtaatggaagtggaaagagtacgttattaaggacattatcaggtgtttatgaaccagatgagggccaggttataatagatggagagcctgcattcgataatcataaaataaaagagcgttgttattatattgcggattatccgtttttctttaacgacagcacagttgagaatatggggaaattgttgaaaaatatttattccacatgggaccagcagagatttgaagaattatgtgaaatgttcccaattgaaagaaaaaagaaaattataaatatgagtaaaggaatgcagcgacaggcatcacttattcttgcttttgcggcaaaacctaaatatttgttcttagatgaaatttttgacggtttggatccacttataagaaaaacgcttaagacacttattattcaagatgtgacagacagaaatatgacatgtattattgcatctcataatttaagagagattgatgacatatgtgaccgaattgtaatgttgcacgatggttcacttttgactaatgaggaaacagatagccttaaaaataaaatacataaaattcagatggcttttaagaatagtccaagtgtaaaaacacttacagaaatgaatgttcagattataagtcaggttggaaactactttagcgtaatggcacgaggagatatagatgaaattatggaaaaacttaattctttaaaccctgtgtttatagaaactatgccttccacattagaggaagtatttattaatgaaatggagggcgcaggatatggaaaataatagtttaagtaataaatctaaggcaatagcattatttaaatggactaatagaaaatatctttcagtttccatagcatattggattttgttatttctagcctatcctttggcagaaatatttataatgattaccagcatatctgcagatgggaagtataattattatgtagacagaatgcagacttatggagtgcttataccgtccactttgtttgcggcaattgcaataggatattcaattgtaatatccttaattgcattttcgtacatgcataataagagatgtgttgacttatttggcagctttccggtaagcagaagaacattgttcttttcaaggtttgcctcagttatattttcaacattgatgcctgttatagttattggtttaataggtatgattttatcgtttgaacataaagcttttatagccggagcttcaacaataggcttattgtgcttagtattaattggcaacatatgttttatagcaatcatctctctttgttgtggaacaactattgatgttataatttgttatggggcaattaacgtgtgctatcctatagccgtatttttatgtagctattatccaggagaaattttaccgggagttggacaaaaagacctgccgtcatcactttatacgttactttgtccaattatggcattctttacatctgcttttggagacggtttggcattacatacaatatggtggattggatttataatagttgtcacaatcgtttgttatcatttgtgcaaaaagagaaaagctgaaacagctcagaacggatttgcattcgcaattgttgaaataattataaagtttttaacatgctttacatgtggacttgccattggctttataatgtcacagcttggaaatatttacagcagtgttttggcatcttatatttggcttgttgttggaattattattggaatatttgcttctaatattttacttcatttggcatttcacagaggattgtcaatgtttaaaagtagcttagtggaaagtctggttgtttttgttacaacagggatttttatagtgattattgcaaccggaggtcttggatatgacactacaattcctaaagagtcagaagttgagagtgttattgtaaaggaagcagacagagagtattttattattaacggcaaagatattgttaattcatatcaaggcgacgcgaaaagaattaagaagactcttgaattgcataaagaaattattaacaagtgcaaggctaaaaaacaccatggtttttatgcactgacacgacagtctgatgatgattatggttctgtttcggatgaagatgaatatgagtatacaattagtcctacgggaataattatcaaatataagcttaaaagcggaaaaataatcacaagacagtatagaagaggtgaagtgccggttagtcaggaagagaatgttaagaatttggtagtaaatgatttgactatgattacaaagataccggttaaatatttgtcaagttgttatattctggatatgcaaaaaggcggatatagcagtacagataaagatttaaacaaaaaactggtagcggcacttattaaagaccttaataatgtgaaaaagataaaaaaagacgaatatgattatagtatagatcttaactatactgatagtggagacaactataattatagaaatggaacagagataagtgtaaatatttacagcgaatataaaaatacacttaaggttcttaatgacagcggagtacttgcgaagctggaagaatagtagtatattagagaaagcgaccgagtgaaggacgaaaagcctattattcgatatgctggctaaaaaaatatcacacggaggatagaattatggacaagaaaaatattgattgggccaatataggttttggttatgttcagacagataagagatttgtgtctaactttaaagatggtaaatgggatgacggtcagttaactgacgatgcaacagttgttatcagtgaatgtgcaggtgtattacagtatgcacagacatgttttgaaggaatgaaagcttacacaacagaagatggacgtgtagtagtgttcagacctgacttaaatgcaaagagaatggaagattcagctaagagacttgaaatgccggtcttccctcaggatagatttgtaaaagcaatcgaagaaacagtaaaagctaacttagcttatgtaccaccatatggttcaggtgctacattatatattagaccttacatgtttggtagttcatcagttataggtgtaaagccggctgaagaatatcagtttagagtatttacaacacctgtaggaccttactttaagggtggcgctaagcctatcacaattaaggtaagtgattttgatagagcagcacctcacggaacaggtcatattaaagcaggtcttaactatgcaatgagtttacatgcaatcgttacagctcacgcagaaggttttgatgaaaatatgtacttagatgcagcaacaagaactaaggtagaagaaacaggtggagctaactttatttttgttacaaaagataatacagtagttacacctaagtcaaacagtattcttccatcaattacaagacgttcattaatgtatgttgcagaacattatttaggacttaaagttgaagaaagagaagtttactttgatgaagttaaagacttcgcagaatgtggcctttgcggtacagcagcagtaatctcacctgtaggaaagattaatgaccatggcaaagaaatttgcttcccaagtggaatggaagaaatgggacctataacaaagaaactttacgatacattaacaggaattcagatgggtagaattgaagctcctgaaggatggatttacgaaattaaataattaaagataggatagagtatgtggaatagagcagatttaaaagcaaatgctaaaaagatttttttcgggaactattggaaagcagttttagtaacgcttattttgacaattattcttggtggtgcaacaaacacaataacaagaagaatttcaaataatcagtcaacagattggtcaattgatcaggatttttccggtgtttcaagttatgatgaatggtcaaatgatgaaatattgaacattggaaacagttcattgtatggttcagaatatcagacatatcttagaatttacaaccgactgaagaatatacccggatcagtatgggcaatgttgggaattgctgtagcagtaggaatagttgttggtcttttaatttccattttcttagtagcacctttacaggttggatgttacagatggtatatcttaaacagaacatctaatccaccaatgggagaattattaaattcatttagaaatggatattttaacactgctaagattatgttttgcatgggtttgtacacaacactttggagtttgttgtttataataccgggaattatcaaggcgtatgaatatagtatgattccatatttgttggctgagaatcctaatatgtcaaaacaggaagcttttgcaataagcaaggaattaatggatggaaataagtttaatgcatttgtactggacttatcgttcatactttggaattttgtaggtgcattagcatttggtttacctggaatattctttgttaatccttatgttcagttaactaatgttgaactttatgtaaaattatgtcagattagagcagaaagacataattcaacatataatcaggattacaaccagaattttaatcagaatgatttttcaggttatacacaagtataaaattaagtaaaagtaatgaaatgactaataaaataaaaaaaatggcggttttcgccatttttttttatattgtactagacaaagatattataatttgttaaaattataacaatcttaataatattattactagaagtgggaattttacaaaattgtaacagaaaagtcatctgttttttcttgcggtgaaatagtaaaaatggtattatgagagtgtgtgagcaagcaggtgaaattatacataaaacctgttaacatatcaaaaaaatcacggaggatttatattatgtcaaagaaagtagttatcgcaggcgcatgccgtacagctattggaaaaatgggtggagcattaagcacaactccagcaccagttttaggatctattgttattaaggaagctcttaacagagcaggcgttccagctgatcaggttgatcacgtatatatgggatgtgttatccaggcaggacttggacagaacgtagcacgtcaggcagcacttaaggcaggacttccaattgaaacaccagcagttacagttaacgttgtatgtggttcaggtcttaactgtgtaaacatggctgcacagatgattcaggcaggagatgctgatatcgttgttgcaggtggtatggaaaacatgtcaatggctccatatgctttaccacaggctagatttggttacagaatgaacaatggtacacttgttgatacaatggttaacgatgcattaacagatgcattcaatcactaccacatgatgattacagctgaaaacgtagctgaacagtggggaattacaagagaagaattagatgctttctcagctaactcacagcagaaatgtgaaaaggctatggctgaaggtaagttcaaagatgaaatcgttcctgtagaagtaaaacagagaaaacagacagttatcgtagatacagatgaaggcccaagagctggaacaacagctgaatcacttagcaagttaagatgttgttcaggtaagcctgatggtgttgttacagcaggtaatgcatcaggtatcaatgatggtgcagcagcagttgtagttatgagcgaagaaaaagctaaagaattaggtgttaagccaatggctacattcgtaacaggggcacttggtggtgttgatccatcaatcatgggtgttggacctgtagcttcaactaagaaagcattagcaaaagctaacatgacaattgatgatatggacttaatcgaagctaacgaagctttcgcagctcagtcagtagcagtagctagagacttaaagttcgatatgagcaaagtaaacgtaaacggtggtgctattgctcttggtcatccagtaggtgcatcaggttgtcgtattcttgtaacattacttcacgaaatgcagaagagagacgctaagaagggtcttgctactttatgtatcggtggcggaatgggatgtactacaatcgttgaacgtgactaattttaaatataaccagggctggtagtaaaactgccagcttttatggtgttaataaacactttttataattaagtttcaatacttaaaaagttatttttattaaggagaaaaaacaatggaattcattacatatgaacaggaaggattcgttggaattcttacaatcaatcgtccaaaggctcttaacgcattaaacagccaggttcttgatgaattaaatgaaacaattgattcaattgatattaatgaaacaagagcacttattttaacaggtgccggagacaaatcttttgttgcaggcgctgatatcggagaaatgtcaacacttacaaaggcagaaggtgaagcttttggtaagaaaggtaatgatgttttcagaaagcttgaaacattagaaattccagtaatcgcagcagttaacggattcgctttaggtggcggatgcgaaatctcaatgagttgtgatattagaatttgttcagaaaacgctattttcggacagcctgaagcaggtcttggaattacaccaggtttcggtggaacacagagacttgcaagaatcgttggacctggaatggctaagcagatgatttatacagcaagaaatattaaggctgacgaagcttacagaatcggtcttgtaaatgcagtatatccacaggaagaacttatggatgctgcaaagaagttagcagcaggtattgcaaagaatgcacctatcgctgttagagcttgcaagaaggcaattaatgatggacttgatgcagttatggatgatgctatcgttatcgaagaaaaattattcggaagctgcttcgaaacagaagatcagaaagccggaatgggtaacttccttgaaaaggataaagaaaagaaacttaaagttgttccatttaagaactgctaatggtttgtaattgtgctttggcacagctaatattgttttaaataccggattttccggttttaaccgtgggaagaatttcttcacacatatttaaggtaatggtttaatccattacagaataaataagcgacaagttcgcaaaagtatttttggaggaaaaaagatgaaggtaggagtaattggtgccggaacaatgggccagggaatcgctaaggctttcgctcaggttgatggatacacagtagcattatgtgacatcaagcaggaatgggctgaaggtggaaaagacaagattgctaaaggttatgcaagacttgtacagaaagaaaaaatgacacaggagcaggttgatggtattcttgcaagaatcacaccaggtcttaaagaagacttatgtgctgactgcgatttaatcgtagaagctgcttttgaaaatatggaagttaagaaaacaacatttggcgaattagataaaatttgtaagcctgaatgtatctttgcttcaaacacatcatctctttcaattacagagattggaaatggtcttacacgtcctatgattggtatgcatttcttcaatcctgcagatagaatgaaattagtagaagttatcgcaggcgttaacacacctgacgaaacagtagaagaaatcattaagatttcaaaagaaatcggcaagacacctgtacaggtaaatgaagctgccggatttgtagttaacagaatcttaatcccaatgattaacgaagctgctttcattaagatggaaggtgtttcagacatcgctggtattgatgcagcaatgaaacttggtgcaaatcacccaatgggacctcttgaattaggagatttcgttggtttagatatctgccttgcaattatggatgttctttacaatgaaacaggagacagcaaatatcgtgcatgtccattaatccgtaagatggttagaggtggaaaccttggtgttaaatcaggtaagggattctacgtttataacgcagatcgtacaaaaacaccagttgatgctcagtaattagggcaaacaataaatatggaggaaagataaatggattttactttaagcaaaaaacatgaaatggcaagaactcttttcaaagaattcgctgaaaatgaagttaaacctcttgcacaggaaacagatgaaaatgaacagttccctgttgagacagttgaaaagatggcaaaatatggtttccttggtattccagttcctaaggaatatggcggacagggatgtgatcctttaacatatgctatgtgtgttgaagaattatcaaaagtatgtggtacaacaggtgttatcgtatcagctcatacatcactttgtatcgatcctattatgacattcggtacagaagaacagaaaaagaaatatgtagttccacttgcaaagggtgaaaagttaggtgctttcggtcttacagaaccaggtgcaggtacagatgctcagggacagcagacaaaggctgtttttgatgaagctacaaatgaatgggtattaaacggttctaagtgctttattacaaatggtaagtacgcagatgtttatatcgtaatcgccgtaacaggtaaagttgaaaaacgtggtagaatgatgaaagaaatttcagcatttatcgttgaaaaaggaactcctggatttacattcggaacaaaagaaaagaaaatgggtatccgtggttcagcaacatatgaattaatttttgaagattgccgtatcccagctgaaaacttacttggtaagaagggtaaaggtttcaacattgcaatgcatacacttgatggtggacgtattggtatcgctgcacaggctcttggtcttgcagaaggcgctttagaaacaactatcgaatatgtaaaggaaagaaaacagttcggaagatcaatcggacagttccagaatacacagttccagttagcagatatggctactaaggtagaagctgctaagttgcttgtttacaaagcagcaatggctaaggctacacagaagacatactcttttgaagctgctcaggctaaattatgcgcagcagaagttgcaatggaagttacaactaaggctgttcagttacatggtggttatggttatatcagagaatatgacgttgaaagaatgatgagagatgctaagattacagaaatctacgaaggtacttcagaagttcagcgtatggtaatctctgcaaacttattaaaataataggaggtactaatcgtgaaaattatcgtttgtgtaaaacaggtacctgatacaaagggtggagttaaatttaacccagatggtacattagatagaggtgcaatgcttacaattatgaaccctgatgataaagcaggtcttgaagctgcacttagattaaaagatcagtacggcgctgaagttacagttcttacaatgggtcttccaaaggctgaagatgttcttcgtgaagctatagctatgggtgctgacaatggaatcttagtaacagatagagttttaggtggtgctgatacttgggctacatctactacaatcgctggtgcaattagaaatattaaagattacgacatcattattacaggacgtcaggctatcgatggtgatacagctcaggttggaccacagatcgctgaacatcttggaatccctgtaatttcatatgctgaaggtattgaagttgaaggagatagcgtaattgttaagagacagtatgaagatagacatcatatgcttaaagcaaaaatgcctgtattaattacagctctttcagaattaaacgagccacgttacatgactccaggtggaatttttgatgcatgtgatgctgaaatcacaacttggggaagagcaaatcttgttgacgtagaagatggagaccttggattaaagggttcacctacaaagattgctaaggcttctgacaaagttcgtaagggtgctggagaaaaggttactcctgattcacctgatgaagcagttgattacatcatggacaaattattaacaaagcacgttatttagtagagaggagattataattatgcagaacattaatttagaagattataaaggcgtatatgtcttcgctcagcaggtagataacgaattaagcggtatcgcattcgagttacttggagaagcaggaagacttgcaaaaccattaaatacagaagtaacagcagtacttcttggatcaaacgttggaaatttagttgatcagttagctgaatatggcgctgataaggttatcgttgttgataatcctgaacttgaaacatatagaactgaaccatatgctcaggctttaacagcagttattaatgaattcaagcctgaaattatgttagttggtgctacagcaatcggtagagatttaggtcctacagtttcagctagagtagcaacaggtcttacagctgactgtacagttcttgaaattggtgatttcccaatcaacccaattccaggtagagaacagaaacacaatcagcttcttatgactcgtcctgcattcggtggtaacacaattgctactattgcatgtccagatcatagaccacagatggctacagttcgtgccggtgttatgcagaaggcagaaccaaagccaggcgcaaaggcagaagttattaactttgacgctaaattagaaaagaacagcaaatatgttgaaattcaggaagtaattaagtcagttgctgaaacagtagatatcatggacgctaagattttagtatcaggtggacgtggtgttggttcagctgaaaacttcaagcttcttgaagatcttgcagaagctctcggtggagaagtttcatgttcaagagctgttacagataacggttggttaccagtagacagacaggttggacagacaggtaaaacagttcgtccacaggtttactttgcaattggtatttcaggagcaatccagcatgtagctggtatggaagaatcagatcttatcatcgcaatcaacaaagatgaagatgctccaatctttgacgtagctgattatggtatcgttggagacttaaacaagatcgttccacagcttacagcagctatcaaagcagcagaagctaacaaataa

SEQ ID NO: 549 - DNA, 12256 bp, unidentified
  source 1..12256: mol_type = unassigned DNA
ttgaaagactatattgaagaacgagctatagggatagccaactatatcatcgaccacaacgccacggtgcggcagactgccaaggccttcggcattagcaaaagcacagtacataaggacgtgacggagcggctgatccaggtgaatccggcgttggcaaagcaggcgcggaaggtattggatgtgaataaatccgagcgtcatatccgcggcggactggctaccagagagaagtatctgcaccagcactagatattcgatgaggcaaatcattctatacgggaaagtgtcttgaaataccgggtaccaacttatataatggatacatagctatatgggacaaagtagttgggacataagatacaaaagatatcaggacctttgcgcggcaggatcacttatgaggagagaaaaaacgaaatggcaacagagtttctgaatgatgcacggaaagagatcgagggacggacagaagacttctgtggggaattaaaagcattctatcagggcaacggggaagcggaacagaacctgatggagcagacaacccagcctttctggcaaagtctgcgcctgagcagaaaaagactgcggcagcgggaactgacggtggatatggagatgcaggagccggcacgactggcggactatgatggtccctggaaggatggttatgattatagctgccgccgtacccagccggtaaaaatgagacggacttattaccgcaagggaaaaaagattgcgttcctaaagacaccggagattgcagcggcaagctttttgaaagcggatgtgcagggagatatggttatctgccctaactgtggacatgagggaaaactgaccagctatatcgatggctgtgatgcctgcggggcaaagtttctcgtcagtgattttgaaacaaaggtatccggattttctctggaggaggacgcaagacagaaaagtatttccaactttatgaaagccggtgttgtggtgggaattacagcgatttctcttgcggtactggccatctgtgcgggcggcattatgtttttgctgttggcgttgggcaggaacggatacaatgcggtaaaggcagccgcagccatgatgctgggaattggtctggctccggtatttttccggtcgttgttttacatgctcattatatttattgtaatgttgatcgtgatggagactcgcagaaagccgagaattcaagacgaatcgaaagtaaaggccgcaatcccggaattctccacgggtaattttcttcagaatctggaataccagctgcgaatgatccatctggcggatacggcagagcaggtacgctttttcgcatcctgtgatctggatacggtggtggcacggtatcagaatgtggtggactgttgcatttgcggtgtgcgttttctggaggcggagacacggggagagtcttacagaatcagcgtggaagtgaggacccgattgacactggatacaggaaagaagatccggaaccgttatgaggagatccggctggaactggaaggcagacaggatgtggtaacgcagcacagcagggcactccgggaatataaatgccccaactgcggaggcagtgtggacattttgggcggcggagtctgcgaatactgtaataccgcggtggactaccgaaattttggctggctcatcacttcttatacaaatctggggcagccagagaatccttttgcgaaaatactggcgggagcactgggaagttatctgctcattttgcttttgagtctggtactcatggcgcattccgaggatggaaaagatacttttgagatcttacagagtgtccggatgtcaacggaatatctgaaagcggtgcagcaggacattatctatcccgatgctgtgatttcagattgtacggagacagacagcgaagagggaacttttgcttcaataaaggtgtactcctgtggggaccgggatgcagtaaaagaagcctacaaaactgcactgctggaaaagggatttctggagatgcagcagtacccggagggattttctgtctttttgccggaggatccgtcagaatatgccgtggattcagaagaaggaatgttctatcttgtgatccgcgcagaaaatgcatcggaaggaattgcggtgactgcgacactggtggatgagaactgggatccggtacaggaataaaaatagaataagaaaatgcgacaaggagcccggaggagaaattttccgggcccttttagagggaaagtgttcgttgtaagcttattgtgtaagaggaattctgtgtaccaccctgcgatagagtttccacaggatcacggcagggaaactgactgccagataagctgtagataaaagtccggtagcaccgcctacaattgcaatgatcataattccgatattcatattggattcctcgactttctgttgttctgtgaagtattgcacattccaactccacatgccatattatagtaaacaggatctttttggtgaatagttttgccagacccttaacactattttgtcgggttatttacagaatctttgcagcacatttacagaatcttaacagggcgggaacgatcccgggagtaaggtttgcaatcacaggaaatatcaagtataatagagaaaattgactgttacccgggatggaatagtcggagaaaataaaacggaggtaggaatatgagtatgacactggaacaggctaaggagaagcttgccaagtatggtcaggaacatgttctgaagtattacggggagctcaacgaggaagagaagcaggggattctggatcagatcgaaactacggatatgagcattctggaagcttgcaagcataaagaagatctggcaaaaaaaggagtgatcacaccgttggctgccatgcagttagacgaaatcgaagcaaacagggaggaatttaccgcaaccggtatcgaagcgatccgacagggcaaggtagcagcggtccttctggccggtggtatgggcaccagactgggatctgacaatcccaagggaatgtacaatgtgggactgactcatgaactgtatatttttgaatgcctgatcaataatctgatggaagtcgtacatcaggcagacagctggatccatctgttcgtaatgaccagtgataagaacaacgatgcgaccatagcctttttaaaggagcatgatttcttcggatataatgcggaatatgtgcatttctttaaacaggagatggctgcggctaccgattatgaaggtaagatctatctggaggaaaagggcaagctgtccacttcccccaatggtaacggcggctggttcatttccatgaaaaacaatggcatgctggacattgtacacagagaaggcattgagtggatcaatgtatttgccgtggataatgtattgcagcgaatcgcagatccctgcttcatcggagctactattcagaaaaattgtgtggtaggctccaaggtggtccgcaagaatgcaccggatgagaaggtaggcgttatgtgcttagaggatggcagaccttctatcgtagaatattatgaactgaccgatgaactgatgaatgctaaggatgagaagggagaacccgcgtataattatggtgtgatcctgaattatctgttcaaggtacaggatctggaaaagatcatggcagagaagatgcccctgcatatcgtagagaagaagatcccgtatctggatgagaacggagaaccggtgaagccggaggctcccaacggctacaaattcgagagtctggtactggatatgatccaccagatggacagctgtctgcccttcgaggtagtcagaagaaaagaatttgcgccgatcaagaacaagaccggtgtggactctgtggaaagtgccagagaactgctcaccgagaatggtgtggtgctgtaaacatttcgacagattttcacaacataaggttattgaggaatcgatagaattacagtaatctgatactgtaagaaacgaagaaaaaatttcatccggctctgacagatgagagattgtgcagccgccatagtgaacaaatagtattgtcctatgcacggcggataggagagagtgtatgagaattttggtaacaggtggtgccggattcatcggcagtcataccgtagtggaattacagcaggcaggctatgatgtagtcgtattggataatctctgcaatgcaagtgagaaagtgatccccagagtagaagccatcacaggcaagaaggttcctttctataaggcagacattctggaccgtgaagctctggaagagatcttcagcaaggaacagattgacgcagtcattcattttgcaggactgaaggcagtcggtgagtccgtacagaagccctgggaatattatgagaacaatattgccggtaccctgaccctggtagatgtcatgagaaaacatggtgtgaagagcattatcttctcttccagcgctaccgtatacggcaaccccgcatttgttcccattacggaggaatgccccaagggacagtgcaccaacccttacggctggacgaaatctatgctggagcagatcctgacggacatccagaaggcagatcccgaatggaatgtgatcctgcttcgttacttcaacccgatcggagctcacaagagcggtaccattggcgagaatcccaacggtatccccaacaacctgatgccttatatcacacaggtagcagtcggcaagctgaaagagctgggtgtcttcggtgatgattacgatacccccgacggaaccggtgtacgtgactacatccatgtcgttgatctggcaaagggccacgtaaaggctctgaagaagattgaggagaatgcaggactgaagatctacaatctgggaactggtgtgggctacagtgttctggacatcgtgaagaacttcgaagcagctaccggcgtgaagattccttacgtgatcaaaccccgccgtgcaggcgatatcgccacctgctattccgatgcttctctggcagagaaggaacttggctggaaggctgagaacggcatcaaagagatgtgcgaagactcctggagatggcagaagaacaatccgaatggatatgaagaataataaaacaatattgaaacatacaaagggacatggccggtgggtcatgtccttttgtgattcttaacggtgaaaaatctgaagcgcccggaatacctgctctacggtatctgccatattggtcatggcattgtcggtatgcatagcctcatccagggataccacgttccgcagaatcgggaaaaaggcatcaatgccctctgcgttgcaggcaacggcctctttggccacgcagccggaaaaagcaagtaccggtttttcatattttttggcaatcttggcaacaccgatgggagcttttcccataaccgtctgaccgtcaaggcggccttccccggtgatcacgacatctgcatcccggatatatttttccagatgggtttcttccagaatgatcttaataccggattccagtgtggcattgcagaaggtaagaaaagcaaatcccataccgccggcagcaccggcaccgggatatttggcatcggcatgaggaaactgttctctggccagagcggcataataagccagccatttgtccatctgcaggatcatagtggaagtagcacccttttgcggtccgtagatggcggaacatccctgctctccgcagagcgggttggagacatcgcaggctatgcggaaagtacattccttgagttcgggaagcacatgatccgcagtgatggattccagatcctccagtcctttggctccgaagcggatctgatttccgtttttatccagaaagccaaagccaagtgcctgcagcattccgacaccgccgtcattggtggcactgccaccgatgccgacaataaaatgccggcagccgttctggatcgcatctttgatgacttcgcctacaccgtaagtggtggtgttcagaggattcttttcctctccgctgacctgggtaatcccggcggcaccggacatttcgatgatcgcggtatgggtctcgtcgataatgccgtaagggcagacaacggggcggccggcagggcctgtgacctgcacctgtgtcatacggccgtcacagccacttaccagagcatcgacggtgccctccccgccgtccgccagaggacggacggtaatatgtgcatctttataaacacgtttgatccccgtggcggcgctcaaacccgcctgcatggaggtcatacttcccttgaaggaatcgatagctattactacattcataaggttcctttccgctgccgccggaattcggccgacaactgtcgttttcgtatagatttttggaaaacggcataatttctgaggatattatagcaacaccggaacaaaagaggaatggttcccggagaaaaataaaatttagcgtggtacagtggcaaaaacatcctataagatcattgcatctgagaaaacaatccagtataatgaaagaagtgcacatttagatgcacattacgcataagaagtggaataacaggaggacgagcatgattcagttaacacagggcggcgcttacctggtaaacggtacggacatcgtagcggataccccggaagcagccagtcagatacaggcgaagaccggcattacgatctccaaagaagaagcagcgaaaaacaccatggcatatggtattctgcaggagcataatacctccggcaatatggacaagctgaagatccgtttcgacaagcttaccagccatgatattacctttgtaggtattatccagaccgcgagagcatccggactgcagaagttccccatgccctatgtactgaccaactgccataactctctgtgtgccgtaggcggtaccatcaacgaggatgaccacatgtttggtctgacctgtgcgaaaaaatacggcggagtctatgtaccccctcatcaggcagttatccatcagtttgccagagagatgttagccggcggtggcaagatgatcctgggttccgattcccatacccgttacggtgcactgggtaccatggctatgggcgagggtggtcccgagctggtaaaacagctgttgaaccagacctatgatatcaacatgcccggcgtggtagccgtatacttaaagggtgctcccgtgaagggtgtaggtcctcaggacgtggcactggctatcattggcgcagtattcaagaacggctatgtaaaaaataaagtaatggagttcgtaggccccggtgtggcttccctgagtgctgatttccgtatcggcattgatgtaatgaccacagagaccacctgtctgtcctccatctggaagaccgatgaccagatccgtgagttctatgagatccacggacgtaccgaagactataaggaactgaatcccggccaggtggcatactatgatggattgatcgaggtggatctggacaagatccgtcctatgatcgccatgccgttccatcccagcaatacttacaccatcgaagagctgaatgcgaacctgatggatattctggatgagacggaaaagcgtgcgaaagtaagtctggacggtgctgtagacttcactctgaaaaataaagtaaagaacggcaagttcattgtagatcagggtatcatcgcaggctgtgccggcggcggattcgagaatatctgtgcggctgccgacattctgaagggcagatacatcggtgcggatgagtttactttaagcgtatatcccgcatccatgcccgtatacatggagctgatccgcaacggttgtgctgcgaccatcttagagaccggtgcagtgatgaagactgcgttctgtggtccctgtttcggtgccggtgacacacctgccaataacgcattcagtatccgtcactctaccagaaatttcccgaaccgtgaaggctccaagctgcagaacggccagatcgcttccgtagctctgatggatgcaagatctatcgcagccaccgcagccaacaagggtgtgctgactcccgcaacggacttcgatggagatttcggaaaatacaaatatcatttcgatagcaatatttacaagaaccgtgtcttcgattcccacggtgtggcagacgagagcgtagagatccagttcggccccaatatcaaggactggcccgctatgggtgccctgcctgagaatctggtactgcaggtagtatccgagatccacgatcccgtaactactaccgatgagctgattccatccggtgagacctcttcctaccgctccaatcctctgggactggcagagttcactttaagccgtaaggatccgcagtatgtaggacgtgccaaggagatccagaaggcagagaaagagcgtatgaacggcggacatccctgtcaggcagttccggtactgaaggatgttatgggtgaagtaaagaaacagtatcccgatgcaagtcgtgagaacaccggattcggttccactattttcgcagtgaagcccggagacggttctgcccgtgagcaggctgcttcctgccagaaggtattaggcggctgggcaaatattgccaacgagtatgccaccaagcgttatcgttccaacctgatcaactggggcatgcttcctttcctgatccagcccggagacctgcctttcaagaatctggattacctgttcattcccggcatcaagaaagccgtggaagacaaggccgaggaaattaaggcatatgtggtaacaaccggagaaggcatgaaggaattcaccctgaagctgggagagctgaccgatgaagagcgtcagatcatcctgaagggatgcctgatcaactataaccgagtgtaactattcagagacatgtgacgaaccatcgcagatgcgtttcgcgaagagaggctgaatagttacaatgagaagtaaggagaaaaaatatggaatttaacaaaccggtatccaaccccatgatggtgggatccattgaattattaaaagcagaggacaccccggaacacagacagatgttcctggatgaactgcagaaagcaaagttcctgtctccggtcgtgatcgatccggtgcctgtgccagatgaaaacggccgggtgaccatcgcaagagatgccaaagtacagttcccgatgctgtccaccgaggacggtcggaagttcttcatggcgttcactgactggacagagctaaaaaagtggagagatgaggagaaccagcagactttcgccatgaactttgacgattatgcgggaatgctgctgcgcaaagatgcacagggcaatatcagtccggcgctgggattcgtgatcaatcccttcggtggcaacatcgtggtgaccagagaaatggtagccagcatgatcgcagcaaagctgaaagcagccggcagaccggtgcctcccgcacccggaacccctggcgctcccactcagcccaaacagcagtaaattaacactaaataaaatgtccatagcggacgatataagtagcagagaggtgacatggccagtcacttcctgctacttattttttacagtttgataatgacaccacggatggtaatcagacagaggcatattatatgtattctgtttctttaccatcttttttagtttaacagttcagccatgcaatatcatatgttctgcgtgggtgctggcacacaaagcagaacatatgatattgcatgagtggagcgccgcatgtatgaaataaaagatgagccgcttagcggcgtcgactgcggagcaggcgcttttatgaatacatgcagcggtgaactgttaagcgttacaggaagcgcgccctgttggttcgtggtgaggtcggggaaaggagaaaattacagatttgagaattgattccgcaagcataggaatggattccgccagaagctatcacgcttctaagacaagcgtcagacgatttgagataacggattatcaggcaggtctgacagatgtatccactaagggacagaagacaccgaatggtgaggataccacacagaacacggaggaacaggagaacactgcagagaacaccacgatgacagccaaagactggcagagtcgtttgctggtatcttctgccagatgggatatgcgaagcagtgccagtgaacagacattgtctaccatccgggaatatacggtgcgttatatttttgatttattattcccgtccaggaacagcactttgcgggactggatgcaggaaaacggatggagcagcggtaatcagaccggaaacagctggaatacagggaatagcgtaaataatacccagacgaattccggcagcacacagggaaccgcaacacctgcgtcagacgtgttcaatctggtcacgtcccgtgtgaaaatattgaactatgtgagcgagacctggaacatagaacaggaggataccagtttttccaccgtgggaagcgtacggaccaaggatggcagagagatcaattttaatgtaaatgtaaatatgagccgcagatgcgaggaatactacaaagagcaactcaatgtagcagaattcacgctccatgatccgctggtgatcaacctggatactgatgtggcagaagtgtcggatcagaccttttattttgatctggatgccgatggcaaggaagaagagatctccgtgctgaatggcagcggctatctggcactggacaagaacggtgacggcactatcaacgacggcagtgagctgttcggcacccggaatggggatggctttgcagatctggcgcagtatgatgaggatggcaatggctggatcgatgagaacgattccatctggtcaaaattaaaaatctggtgcaaggatgaaaacggcaacgacgtactgtacaaactttctgacaagggtgtcggtgctatctgtctgcaaaacgcttctacggattttaccctgcagggagaccgtaaggctcaggacggcactaccaatgccaatgcgaccaatgctgtggtccgcaagaccggtattttcttatacgaaaacggaaatgtgggtacggtacagcacgtggatatggctgcctatgccgcacaggcatagaataaatataactattcagttacttcgccctataaatagcatcaaatgttcttacgaatgcaaacattcgacgctatttacatggctctgaatagttccaaataaatgcaaatttcatatcgaagacattctgaataaaacccatgaatcgggcaagactataggataaaccagggaaagtggttgaaacgattgtatagcaggcagttgactcagggaacaggaaggatgcggataggatatgagaagaaataaaaagagcggtattaacaaagaacgtattataatgttagcctcttcagcctttgtactggcagcattgaccatgacaggggtctatatgaaggggcagaatgtggagtccagggatgatggttataccttggacttcactgcgcttcccaacaatgcggatgacaaattacaggagatcacggagaatagcgacgaacatcttctgaaggaggacgagaacatccccggactgacggcaaataatacagcgggaaatgagatcgcgggagctcctgtcaccgaggatgatctggactatatgccccaggaggtaggctccggcaacgtagagattccggggctgacggatcaggagaccctgctggaggccgcacagaaagagcagcagaattccgatgccgaccgacaaaaggaagagaccgggggaaagcagacagcaggcggggatgtggtcgttgagaagacactgcactttgcagaaagcgacggattacagcaaccggtgcagagtgatattctgatgcattactctatggacaagagcacttattttgctacactggatcagtataaatacaatcccgccaccattttttccgcggaagaaggtacggcagtgacctcctgtgcgcagggaaaagtgacttcgatcttcgaaaatgaggagatcggcaaggcggtgaccctggatctgggtgacggctatgaggccacttatggacagctgacggagatcacagtgaaagagaattcctatgtgaatcccggcgacaccatcggcagtgtggcagcgcccacgaaatactacagcaccgaaggaagcaacgtatactttgctctgacccacaacggggaaccggtgaacggggaggcattgttccgctga

SEQ ID NO: 550 - DNA, 13696 bp, unidentified
  source 1..13696: mol_type = unassigned DNA
atgagacccttgaaaaccatcgtcgccggaactctggccctgctggcggcagttcccctgtcagcccaaaccagggccgcggaaaataagaaaccgaacatcctctttatcattacggacgaccacgcctaccagacgctgggcaccggcaaagacgattcccccgtcgccctgcccaacttcaacaaactgggacgccagggcatggtttttgaccgcagctactgcgccaactccctgtgcggcccctcccgcgcctgtatcctgaccggcaggcattcccacatgaacggctttgtcttcaacggccagaaaccgctggacggctcccagcccacctacccgaaaatgctgcagaaagccggataccagacgggccttttcggcaaatggcacctggaatcaaatcccaccgggttcgacacgtgggaaatcttccccggccagggcagctactacaatccggactttatcagcctcaagccggacggcaaacgccagacaaagcgttttcccggatatgccacggacgtggtcacggacaaatccatccagtggctggaaaaccgggacaagaacaagcctttcctgctcgttgtgggccacaaggctccccaccgcgcctggtgccctgctctgcgccacctgggcaaggtggacacttccagcatgacgccgcccgccaacttccatgacgactatgccaaccgtccggaattcctgaagaaaaaccagcagacagtcgccaatcacatggcgatttattccgacctcaaagtgcttaaggaccaggttccggaagaaatgcgcaaaagcatcgtttcccccggttacggctgggacctgggcgagttgaaccgcatgactccggaagaaaagaaaacctggacggactattacgccaagcgcaccaaatccctggtggacggcatgaaatccggaaaactgaaggacccgaaagcgtttgcggaatggaagtggcatgcctacatggaggattatctgggatgccttctgtccgtggacgacagcatcggccgccttatggaatatctggacaaagaggggattgcgaaagacacgctggtcatctactgcggagaccaggggttctacatgggagaacacggcatgtacgacaagcgctggatttttgaagaatccctccgcatgcccctcatcatgagatggcccggcaaaattcccgcgggcatccgcaacaacaccatggtgcagaatatcgactacgctcctaccatcgtttctgcggcaggggcggacaccccggaaaacatgaataccttccagggcgtatccctgcttcccaccgctttcacgggcaaaactcccgacaactggagggatgccatttactactgtttttacgaaaatcccggcgaacacaacgccccgcgccacgacggcatccggatggaccgctacacgctttcctacatctggaccagcggcgaatggatgctctttgacatgaaaaaggatcccatgcaaatgaaaaacgtcattgacgatcctgcctacaagactacggtggaacagctcaagaagcgttaccacgaactgcgcaaaacctataaagttccggaaaacagccccggaggcaaaggaacgcctatccccaaattcgacgcttcctggtaaaagccacacgggaaattgcctttccaagcgccggtttttccggcgcttttttattttcgtccatagcaggccggagaaatccgtcacggaggccgaaacaggcaaactccccttccgcacacaaccgtccatcaaccgtaaaacccgcggaggggtctcaagcccgccagcttcatcaatttattcatggctttttcatacaggaaaaacgcctgttgcatgcagcaaagcacgggcattaagggatgctccgctttctttgcgccaagctcttccaaaaaccagtccgggtctttgtcgtcaaaaccgggatgccgctcaaacgcccggcggccttccagatgaatgacgcccttcccggaatacaggcagtccagatgatgttgcgccgccacgagagacagcagcgtctgatcgtgcgtatgagctacaaaattatcgcggcaacggctctcttcttccgtagtggcagaagacaccaatttgaactgacggcacaaatccatccattcacggagaattcggaggctttgttccgattttttcaagaaaaggaaggagccctgaatcaggggagcctgttcaaaagacccgctatccagcttcaattcatcaaaaacgctctgcttgcaccaccgcgtaaggcctcccgtataataggaaatattcacgcccggcatcatatcctgccccttctcccggagccattggacaaacggctccaaggaatgatggaaaagcctccccggcgggcgccccgcatccgtataaagcaggtaatccccttcctccaaatgttccagctccttaagaatgatgaagggtttccatacccaaaacccggcaccctgtaaattcgggtcaaaccatggaatagcctccctgattccttccctttccaggcgattaagattccaacaggacaactccactgaggaatccgccagcctcaggctcatcatctgcatccattgccgcaaatgatagccgcgggtcgcgaaagaacaataacggatagccatactcccagattccggtggaaaccatgtccctaaaaacgggaacacatcttctgcgtccgcacctataacgagttgtaaatccgctgtcaatggaaaactttaacggagaatcatctccgtgcatggaaccacggattgaaacaggatttttttaattaccaaaaaaccattcaacacgataagttatttatagttatttttttataactatatccaaacttttttaaagacaggcggatttacaatcccccgttcaaatacaccacaatgtccagaatttgacttatccccgtgtcatctgctccgcagccagccttttatccaaatcaagggccgcccccatggccgcatccatattgtagtattcccactccgcaaaacggcctaatagataaatgcctttcggttccaggcactcctttagttcccgtatgagggttcggctggaaacatcctgaacgggataggtatattcttcccagtgatgggccagatacacaggggaaaagggaataagctccagctggcgactgatttccccttccgtcatttgctcggaaaattcaatagtcgcggtggtgatgtccccgttattattatttctggaaaaattccccgtgcaaatgatccggtgagaacggtgggatggagagggcatgtaaatccagctgtaatcattgggggaaatccggcaaagcacggaagtggttccgtgagagcgcaattctgaaatccgggggaaaaacgggcgcaattcatccatgcagggaaaacaatccccaagctgcctgacattccccgtaaagacaactctgtcaaacaattctccctgtacgagccatttcccgtccttcgggaggatatttacagcttcctgccgatacctgaccttgaggccgcgagccagcgtatccgccagaaactgggaaccgccgtttttcgcataaaagaaagaactgtgcaccatggcgctttcattgatgtgcccaatattgttcaacaggatttccgccacgctcggcatgggaagcttgtcttccagccaatccatggcaatttggctgatatcctgcctccacactttgttattgtacggcgtaaaataaaggctgttcagggtttttccgaaacggttcagaaaaaactcacccagggagcggggctccgcgggaggattcctgtaaagttccagcagctcatggacgatggaggaacggacggcctcaggaaactggtcgaggtggttctcaatgggataatccaccacagccccgccctccagggaaataacagcccgtctccgggcggaaacaaaatcgcgctccctgtcaaaccgggaccaaaaccagtccagcacttcctgccgccgggaattgaacacatggcctcccacacgatgatacaggttcccctgtacttccgtgcatttaatcaggccgccgggccgggagtccctctcataaacgactacctcatgccctttcttcagcaacattccggccatggacaatccggaaaccccggctccgatcacagcatatttcatcatgggataaaaaaacaatttatggacgccactatctggcgaaacgggacaatttcacgggatggagatacaggtattcctccggaaaggaggcaagcagcttgccgaggtctcctccggaagaggacacgagcccgtcaatgacggcattcatggcttcaaagtgttccggatcctggggaaaccagacgtttcccgacttgtactgcgtgtcctccagcgtagacagctttgttccgggaagaagctgcaacaccgtgggaatagccagctccacaaacatgttccatgcggagaacacttcaaggatacggcagaaatcgtctaatttccctttcggaatgcagacaatgtccgaatatccgaaaacgacaggataggaataccggtattttttaatccggtgcttccagtaattcagcaaatgccataccctgcccttcaacactttccaattcgcatgaatccccccggggctccatttgggcagaaacatgcgtacgcgcgacaattcatcatgccgcatgaggttcctggattttaaaatccgcctggcctcctcataggacggaacgttcctgttgacgctttccgcatcaataccgggaggggttatggaaaaatggtgggcttccgccgttccccggtaacacaccggcagagaaacgtccacaaaaccgtcaaggtaacacgtatcctccccatggattcccagcagggacggcgttgaaaattcgtcaaacctgggatttaaaagaagatcgtctccgatgataagaaaataatcgccctccaactgcctgattctttccctggactgcaaaatataattatagaactggaaagaattcccgaagacggaacatacgtcaggggcatctcccttgtagtagggcattaattgaagcaacccggaaaagcgtcttgaataaagctctctgattaccggaatgttacgttcatactgatggttgaacaatacaacaagagacgttttccgggaagaagtatccatggccgtttgatgttgagaaacaaaccgtacccttcaacataaattattgaaaaaaaggaatttgctctctgagtgcacgcacagtaaaaagagtgcggggcatattacacggattccaaatccggagtcaaggttaaattttgaaagaaaggaacttctgaaaataagcttccccaataaccggaatcttccgtcttcatgattccatccgggtaaccccatcaattcccattccggcagaaacatccatacctgccggaaagtccgtatttcaaagaaaattattgatcatcagttttatttcctttctgcgaagaggctctcctgtcatgcagaaacaaccgcacgcaatctctttttaattacagcggatttggaattccccaatcgaatttggaattcgttatttttagacagtttaaaaaaacttaaactgtttattcgatttcatgatttcagccattcttctttgttacaatcagaaacgttttatcaaggaacagttccgggctattttaaaacaggattatccaggagaatgggaaataattatttcggacgatttttctcaggacggttcttttgaatgcctggaagaaatggtggaaaaagagggagaaggacggcgtattattctccaccgtaacgaaagcaaccggggaattgcagggaatttgcaatgtgccgttcatttgtcccggggggaatggattatcaagtttgacggcgatgacatcgcacgagaagacaggatctcctcgttggcatctctggcggaaaaatatcccggtcatctggtttactgccattcttataatgaaatcgatgaagatggacaacccgcttatggacgcatgttgccagattcagattccgtcgtcgtcaaaccctacagggaatgtatttttgacatttcccatgtttacagctgttttggcggaaatgccatgtaccacaggtctttgttcagcgacttcgaatatttgccttcaggccccggcattgcggacgatacaatgctgtccatgcgcgcctatttgaaaaaatcaggcatggtcgcatccggcaaacggtgttcgtactatcggagacacaacagtaatatctgcaattttaagagcgggaaccccaggacaatcctgatcaagagatcggaattcctgataacaacctggataatgatcatgaaagaggtatacggaaagcataagtccggggaaataacataccaggccgccgatcgcctgatgaggctgattcaggcggaacagagaaggctcctgctcttcccctatgcttcattcgataacagccttcttaccaaactcaaatggttttggaacattctgcaatgcaggccgaggctctggctggtcagcattccaagattgctcccgttttgcctgctgcaaaggtatttgaacattaaagaccggataaaaagtcttcctttttttcactaacagcagggaacctgcataaaaaacaggaaaaaaaataaacgtaccgttatcctgcttccctccatcatcgggaaaacaaaaaagccgttccgccggacaggcctgcgcggaacggccaggaaaagaaaaccttgacaaggttaatacctgtaaaagtccggcttgtaaggaccttccaccggaacgccgatgtagtccgcctgctccggacgcaggacagtcagcttgcaccctatcttggcgaggtgcagccgcgccacttcctcatccagcaccttgggcagcacttccacgcccacggaacggtctttacgggtattccacagttccagctgggccagcacctggttggcgaagctgttggacatcacgaagctgggatgacccgtagcgcagcccaggttgaccaggcggccttccgccagaagatacaggctgttgccggacgggaacgtgtagcggtccacctgcggcttgatgttaagatgcctgatgccgggatacgtctggagcttgtgtacctggatttcattgtcgaagtggccgatgttgcagacaatggcctggtccttcattttttccatgtgttcgatgcggatgatgttgcagtttcccgtagtggtcacgtaaatatccgcccagcccagcgtgtcttccaccgtcagtacgcggtaaccttccatggctgcctgaagagcgcagatggggtctatttccgtcacgaccacctgggctcccatgccgcgcagggactgggcgcagcctttgcctacgtccccgtagccgcagacgacggccaccttcccggcaaccatcacgtccgtggcccgcttgatgccgtccacaagggactcacggcagccgtacaggttgtcaaacttggacttggttacggaatcgtttacgttgatggccggaatcagcagacggcctgcatctggtacaggcggtgcacgccggtggtcgtttcctcggaaacgcccttcagctcgggaagccagcgatggaaaatgcccggagtcgccgcggcaatttttttcaacagggccttgacgacttcctcttcttccgattccgacggggtatccacccagtcggagccttcctccatttcatacccgcggtggataagcagggtggcgtctccgccgtcgtccacaatcagctgcggccccagcccgtccggaaagttcatggccttccacgtgcagtcccagtattcccgcagcgtttcccccttccaggcgaagacgggggtgccggatttggcgatggcggcggcggcgtggtcctgggtggagaaaatgttgcagctcgcccagcggacggaagcgcccagagccgtcagcgtttctatcagcacggccgtctgcaccgtcatgtgcagggagcccatgatgcgcacgccctccaggggcctggctgcagcgtacttttcacgcacggccatcaggccgggcatctcatgctccgcaatatccagttccctgcgtccgaaatccgccaggccgatatcgcgcaccttgtattgttccgtttctgaaaacatgtctgtaagcgttgtcgtaggaattaatgaagaagttgtttcagggaggccaggcgcgtttcgtccagctgttcccagggcagctccggattggtgaaatgcccgtagtgcgtcgtcttccggtaaataggccgaagcaggttcagctgttccaccatatccgcaggcttgaaggaaaagatgttttccagcgcatgttcaatggatatttcctccaccttcccggtaccgaacgtatccacccggatggaaaccggagcggggtagccgatggcgtaagccacctgcaattcacatttatccgccagtccggcagccacaatgtgcttggcaacccagcggcacatatacgcggcggaacggtccaccttggacgggtcttttccggaaaaggctccgccgccgtggcgccccatgccgccgtacgtgtccacaataattttgcggcccgtcaggccggaatccccgtggggaccgcccacgacgaatttcccggtggggttgatgaaatattccgtcctctcatccagaagctccgcaggaagcacatttttaatgagtttgacgcaatatgagtaaatcgtgtcatggtccacgtcttccgtgtgctgggtggaaataactacgttttcaatatgcgcgggacgcccgtcttcgtcataggccacagccacctgggacttgcagtccggacgcagccagtccacatgcccgcgtttgcgcctcctggccagctcaatgagcagtttgtgcgcaaacacgatgggggccggaagcagctccggcgtctcattcgttgcgaagccgaacataatgccctggtctccggcgccctgctccgcatggcccttgccctccgcctcccgggcgtccaccccctgggcaatatccggggactgttccgtgagcagattcgtgaaaaagacggtatccgcatggaaaacgtcgtcgtcctgcctgttgcagtacccgatctcccgaatggcctggcgggcgattttttccggatcgatcaccgccttggtcgtcagctctccggcaatgatgaccatattgctcttcaccaacgtttcacatgcaacgcggctagttttgtcttgagccaggcaggcgtctaaaatagagtcggaaatgtagtcggccaccttgtccggatggccttctccaacggattccgacgtaaagatgtgaggggtgtttctgctcatatcgataaatctcgatgtgttgatatattattccgctatgaagtcaaccctaaaaacgctcaaactcctggcagatcccacccgcctgcgcatcatcaacgttctgaatgaagaatccctgagcgtcgcggaacttcaggaaattctcggcatggggcaaagccgcatctccacccagctggcccagctccggcaggaaggggtggtggaggacgcccgttccggcaaaaacgtcttttacactctttccctggcaggcgatctgcacaacgtagccctgaaagcctgcgaggaattgccggaggcggaaacggacaaaaaagcccttcaggttatcctggacaagcgcaaaaaccgcacccaggcctattttgacgaagtagtgtgccgtctgggcaagaactacgcgccaggccgttcctggaaagcgctggccggagctctcctccgcattctgaactatgacgtagtggcggacctgggagccggggaaggtttcgtttcccagctcatctcccccagcgccaaacaggtgatcgccgtggataactcccccagcatggtggagctggggcaggagctggcgcgcaaacacgggctggacaatctggaataccgcctgggcgatatcgaagcgccgcccattaaacccggcacggtggatctggccctgctcagccaggccctgcaccatgcgcaaaaaccgtccagagcgctggaagctgcgtgggatatcctgaaatccggcggttgcctggtggtgctggatctgctccagcatggacaggaggaagcccgtgaactttacgcggaccgctggctgggcttcacgcccgccgccctggaaagcatgctgaaggaagcgggattccggaacatccacacggatattgtggacagggagccggacccgccccatttccagactctgatggccgccgcctggaaaccctgacgtacagccgtcttaatccattttccttccggaatagccggagcggacttccggcatgcctccacaagattcctcacggtaccggcatgccatccatgaaaagccgctacatcccggaaaccctgtcttccggaggcctttccgctggaaaggggcggcttccggattgcagggcttcccgcattccccggacaatatccatcatctgtcctgcagacagctcctccttcccctcaatttcctcatccaccatcgctttcatttcctccagcagatgctccggttccagacggtaagtaagcaacacccggaacagttcccttccggcagcctgcaaagggaccgcaggaaaatccgcgacacttttcaaatctttttcttcaaaggaattcaggagctttgcataccgcaggaaagcgcgcctgaattcctccgggcatccgtccatatccactgaagccaaataccggcggaaggaaatctccgccgccagatgcacggcctcatcccccgtggattccgccagccacgtttccttttgcttcagatgcacaagcaggaggaccttcctcatggcctccctctgtctgcccttggggccacttttcagtttgaccaggtccaaatccagatccgcggcatcggggctcgccacatcctgggcgggagacacacccagggaagccgccattatgacaaacggcagccacctcctcatgcattcccgaatatggaccattgcggtcagccattacatgaaaaacgccggaaaatcaacccaaatccagcgcctccggcatgaagaaaatccatgccggaatgttgtgcccgcccagaggaacacccggaaccgcagatcattccgacataagcgccatcccaccgttttccaagcgttccgggcgggaaaagaaggaaaaaacgatgtccgcatccgcacccggctgttggccgggaaggacggcttcatgccagccggagagattgacggacacacgggcatatgagaaaaagccgtctatgctattcgcagtagtgattttcctttccgtggtcgtgctcggtgtcattgccgcgctgcgtttcaccaaaggcatcattcccctgcgcacctacgaatcccgggaactgcccggtttccccggcccggcgggattaatccaccgcctggacggtgcggaaaaacgccagcggaaactggagaaagcccggtttcccggagtggatgaaaacggattcatcagccttcctccggcatgggaaggcaaggtgaccgcaggccggctggcctgcgtagcccatacctgggccatgagcagcctggtccgggaagacccggaggcggcaaaagcccgcaaaaccgcctctgcgcgcgccacgatgattccctttttcacagctcttatcctgctgggaatgctggcgaccggactgttgaaattccagatcgcgctggccatcgggctggcctgctgggcctttttcactttctccgcccttcccacccagttccgcgaatggaaagcggcggaaatagccaaatcagggctgaaggaagccgggctgtggcccgtgctgccttcggacgccatggctgtggaacaatgcctgaaagcgctgtcatggtgccacgtggcaggcttccggcgtatcttgcccagatagagggggtttcctggcggtgaagcgcatttttccggtcaaaccggccttcgggagaaaaaaatcttgaaacggggatgcgtgtaacccactctttcaccgtcgtcaacttttccttaccgcttccatctctccatgaatgagtccgcaaaccccatcctcaaatatttttcggaattcaaaatcctgaaaaccgtatccaaggatttctggcttaccaacgtcgtccagttcttcgacggaatggcctatttttccatgattacggtattcgtcctctacctgacggactattgcagcttcaacgatgcggacgccgccctctgggtaggcctgtacacccttttcatctccgccttcgtcttcgcggtgggttccatctgcgacatcatcggcatacggcgcacttacctgatcggcttcatcatcctcattgccgggcgccttatcatgggcttcggtccggacctcagcccgaccgtggactccggaaggctggccgtcatggtgggcattctgattatgtccttcggcacggcgttcatgtcccccgtcatccagacttccatccggcgcttcaccccgctgaaagcgcgttccacgggcttcaatatctactacctgctgatgaacatttctgccgtcattgcgaacgtgttcctgattgaatttttccgcaagcacttcggcgccgtggacggcgggtactggatcatcaacttcggaacgctgatggtgctgctgggctgcatcaccacccgttttattaatgaagacaactacgcggaacccagcgaacgggaggcgaacatcaatgcccccctccgcagacctctccagctcttcatggaggtatggaaggaatccgccttccgcaaacttatcctcttcctggtgctgaccatgggcgtgcgcatcgttttcacgctgcaattcctggtgatgcccaaatactacgtgcggacgctatatgacgatttcgccataggctccatcaatgccgtcaacccggccatcatcgtctccggcctcatcctgctcattccggtgctgggccgcttctctaccgttggcctcatgattgcgggcatgtccatctccgctttctctctcgttttcatggccattcccattgaatggtactacctggtgcccggcatcgaaacgcgctcccaggcgtatctggtagccattgtggcgcagatcctggtattcgcattcggggaactgctcttctctccccgcttctccgaatatgtggcgcgggtagctccgaaagacaaagtggcttcctacatgtctctggcggcgcttcccatgttcatcgccaaacccatcaatggcatcatcggcggcctgctcgtcgcctacctctgctatgacggcatctgcgccaagatggataccgggcacatcggcttctgggactccccggaattcatgtggaccatttacctggccatggccgtaatcagccccatcgccattatcatgacccgcaggaccatcacctcggaccatcccgaggaagacgcggcatcgccacccatcagcgccattgaagcggaaacggatcccgccctgacggcggaagaacttacggaagccaactcctga

SEQ ID NO: 551 - DNA, 28132 bp, unidentified
  source 1..28132: mol_type = unassigned DNA
gcatgctccgggagttcgtggattttgccaatgtatttcactaactctcaatttatttctcttccaccggaatctgcttcagattctccacgggttccaggatctcattactgcggatgtcgatgatggggccgccggttccttcaatgtactctctggtaatggtaacccttccgatgttatcatccttcgggatctcatacatgatatccagcatgaagtcctcgatgatggagcgcagagctctggcaccggtatcgcgcttcattgccttctcggcaatggcatccagggcatcgtctgtgaactccagttttacctcatccagctccaacagcttctggtactgcttaagaatcgcattcttcggctctttcaggatcttcaccagcatatcctttgacaatccctgtaaagtacaaatgatcggcagacgaccgataaattccggaatcataccaaacttgcggatatcctccacagtcaccttggataaaatatcggtatctttatcgtatttatccttcagttccgagttgaaaccgatggatgcggtcttggtcaggcgctccttgatgatctcgtccagatccgggaacgcaccaccgcaaataaacagaatgttacgggtgttcaccgttgccagaggtaccatggcatttttgctgttggcacctaccggcacctccacttccgcaccttccagaagcttcaacataccctgctgtacactctctccgctgacatcccgggagttggtgtttttcttcttggcgatcttgtcgatctcatcgatgaagatgatacctttttccgccttttctacgtcattgcccgccgctgccagcaatttggataccacgctctcgatatcatcaccgatataaccggcctcagtcagagaggtggcatcagcaatagccagaggcacatccagaagttttgccagtgtctttaccagataggtcttaccggaaccggtggggccgatcatgaggatgttggacttttcgatctcaatctcatccatagtgtcagtggccactctcttgtaatggttgtatactgctacggagatgaccttcttggctttttcctgtcctaccacgtattcatccagactggccttgatcttatgaggtgccggaatgtccttgatattgaatacaggtttgggaccttccgccttctttttcttcttgagtttctgcttgttgggaataccgccgtctccctgaagatccgccagattcacaaaactgatgttggggaatccgttctgtccgttaaactggttgaaatcattgggattgttcaacattccctgataatcgaactggctcacagtctccatggtcttgtgcatgcaatcatcgcagatgcagatatggttgggcagcttgaacattctgccggctttgctctccggtctgcggcagataaagcagacatcttcgtattcgctgctgtcctttttgtcctctgactttttttcggtggaattttcttttgcagtatccgccacctgtgtgtttccattatttttttcgttatcctgagtttcactcacatcggtctctgttttttcctcctcagggatcacttctctataatcatcattataattatctgtcatgttattctcctctttgtttcctaccactattccgcagtgtatctcggtaacacttcgtgttccctcgatatccgggcttcgccctatcatccccggctccaaagcatcttcgcagtgtatctcggcaacacttcgtgttccctcgatatccgggcttcgccctatcatccccggctccaaagcatcttcgcagtgtatctcggtaacacttcgtgttccctcgatatccgggcttcgccctccccgtctcgtgccttacacaatcccgtctgcaagcagccagattgtgtaatccccgatccagtcacttctcattgcctacgcttattatactcaatgaagtagcggggcacaagttaagtttttctaaaccatttataactattcatattttggtaaatattacaagacccgggcaaaaccatatgtctcgcccgggtctctttccatttccttttatttacctgttatttctttatttctggcttgcaggtctgctgcccagtgtcagattcagctcgatggatacatattcaccgttctgaggtctctgtaccgttacggttacggaatcaccggccgcataatactgtaaagttttctgcagatcagagtaggaagagatactgctgccgtcaaatttggtaatgatatcacctttcatgataccggcattggctgcagcgctgccttcctctacagatactacatagataccttccggcatgttgtacatctgggagatctgggaagttacttcccgcagggagatgccgatgtaaccgacttcatcctcagctaccttggttctggtctgacgctccatcagatctgcaatgataggacttgccgaagtaatcgggatagcatatcccataccttctacggcagtaccaccgatcttgttggagttgataccgataacctcaccattcatgttcagcagtgcaccgccggagttaccggggttgatggctgcgttggtctggatgaaagtaccggtagagccgttctccagaccggtagagccgttctccagagtgatctcacgattcagggcacttacaataccgttggtaacagactgaccatagccaagggcattaccgatagcgatgaccggctcaccaagcttcagatcatcactgctgccaagtgttgctactgtaatagcattcttggtatcatcactcagatcatttaaagatactgcgatcactgccagatccatgtcggaatccagtcctttgacctgtgcctgtgcttcactgccatcgataaaagtaacggtcagagtatctgcactctctactacatgattattggatacgatcagcagttcatcatcggtcttacctacaatgataccggaaccactggctgcttcttcctgtgtgtactgctgtccgaagacattggctgtctcggtaaagttatttacgatggataccatggcaggcattactttttctaccacattggatacatcggactctacataagtaacattggtagccagctgtgcactctgggtactttctgtcgttgcctcagaagcgatctcatctaccactgcggtatctgtgctggtcgtaaacatcccggttccctgctgtactgcatagaaaccgattcctgcgaacagtccgaagaacaatcccaggctgacacttaccattgccttccggaagtaaccgccatgtttttgggttttcttaggctccgtattgttgctgcctgtggttccgcccatctgataagtggtgtaaccattcgtgcttcctgctgcactctgggtagtactatgattttcatagccataactgttttctgttcttgtctcattcagatctgctccactgaatgtaccggttgtattttcattgccggttccgtaaccggaaaaattatcattctcatacatattgcttcctcctatcctgttgcaagtgagaaactctttttaccattacctgtttcatttcttcctctcaccttatgaacacagtatatccgtcaattgtgtccgaattgtgataactttctgaagcaattatgaatcctgaaaaaacagagagtctgttctgcctgcaagcagtctctctatgggtaagttattacactctactcaacagtaacggattttgccaggtttctgggtttatccacgtcacagccgcgtcccactgccacatagtaggagaacaactgcaaaggaatgattgccagagaattggtaaagtacggattggtctcggggatgtatattacataatccgacgctttctcaatggccttgttgccttcaatggtgactgccataacaaaggctcctcttgcttttacttctaccatattactgatggtcttctggaacagatccggctgggttgccaaagccactaccagcgtaccatcttcgatcagagaaatcgtaccatgcttcagttctccagctgcataagcctcggaatgaatataggagatctccttcagtttcaaggatccttccagtgaaatcgcgtaatcaataccgcgcccgatgaagaagatatctcttgctcccacgtaacggttggcaaaatgttggatcttctccttctgtcccagaagcagttcgatctgatccggcaggcatcttaaatctgtcagcataccggcgaacttctcctgatcaatagtaccacgtaccctggcgaatttcatagccagcatgtaaagtgcagttagctgtgcactgtaagccttggtggtagccactgcgatctcgggacctgcccaggtatacataacactgtctgcctctctggcaatggagcttcccaccacattgacaatgcccagtaccttgaagcccctttccctggactctctcagtgctgccagagtatctgccgtctcaccggactggctgatgacaatgaccatattacccttctgaagaatcggatcacgataacggaattcactggccacatccacttctaccggaattcttgccagaccctcgatcacatattttgcggtaactccggtatgatatgcggagccgcaggccacaatatggatcttcgtgatctctttgatctcttcatcactcatgttcagctcttcgatcacaatatcattatccttgattctcggagagatggtatcgttgatggtcttcggctgctcatagatctctttcagcatgaagtgctcatatccagccttttctgccgcattggcatcccagtcaatggtcaccggctgcttctcgatctcttcctcatccacggagaagaaacgcagactaccctgctgtaattccacaacttcctgattgtctacataatatacggttctggtatatttcaatatcgcaggaacatcggaagcgataaagctgccgttgtcgctctttcctacgatcagcgggctgtccttgcgggctgcaaaaatcttatccggctgatctgcaaacatgattcccagcgcataagagccttccacacgatgaagcaccttcgtgatggcttccagaggatttcccttgtaataatagtctaacagatgtgccaatacctcggtatcagtctcggatacgaactgataccccttatcctgcatctttttcttcaggggaatatagttctcgataatgccgttgtgtaccacggcaatggttcccgcattgttcatatgcggatgggaattgatatcgctgggagctccgtgagttgcccaacgcgtatgtccgataccggaggttcctttcatattctctccgccgtgggtcaggttctccagaaccttaagtcttcccactgcctttctggtgttgatcttctcaccgtcaaaaatcgccatacctgcggaatcatatccacggtattccagcttggacagaccgtccagaatgatcggtgctgcctgttctgttccaatataacctacaataccacacatagtcatacatcctttctgttctgtttccagtattccttgttggaagtaaaagcaagtacccattttttcgggagcctgcgatagttctttcccagtaaataacctgcatatttacaggcgcattgcatataaaaatggggcaatccggcagacatatggttgctgcgcaaatataccgtcacatctttcaccattcgttttccctcggactccgaaggatatgctgcaaaaatctcgggatgctctgcctgcgatactcccaggtcaaagtttctgtggaactgctgcccgttggtataattatgagaatgcaccacctgcgcatccgccgcataagccacagagtatcctgcttccaccgcctttgccgcatagatcatatcttcattaaatatcgtatgtctgacgaacccgcccagttcctcatagatctcccggcgataggccgcacagacattggagcagaaaaaggtcttgatccccaggctgtccaggtctgctgccgatttgatccgggactttgccggatagttaaattctctggtatagctctccaccggtgtagaatcctctctgggcagctgtctcgcataggccaccgccacttccccctgcaggggttccaccagtttttcgatcagcctgtcatctttcggcatggcatcctgtgtcatcatcacgaagacatccgcagaagacttttttactcccatccgtctcgtaccgccatgatcgaactctcttttggatacatggtataccttgatattctgataggtttccagaaatctgattccgtagatcagctgatcaaaatatttttcttccgtattcagaagaatcacctgatgtaccggtacgctctgactgcccagtttatccaataatgtaaataattcttttcccggcttatacaggggaatgatcacatctatctccatgtcagatcgctcctcacttttccaatctctggttcattatactttaactcttattgcggcacaagccttttcctactgtccaagaggattataaccttctgggtaatgcacaagggagccccggcagattccggaagactcccttgtattcctgttgctttactctatacactgtttcttacttattcatataaggtgatgtgtcagattcaatcttattgctgtattccttcacgttgctggttacggaatagttggcatcatcaaacaggaactgatgcagccatactacattgctttcgagatttaccggaataacacagcttccctttgcaccgatattgccggtgtcacgcatggtctcttcggggaaacctccttcgtccactatgcgataatttgaaatattgctcagcagatccaggatgtccttggaatccagactggtgtaaatgtcgtcgatggcactgttgaataccttggacaatgttgcataatctgctttctttgcctgatcttcgattgcctgaatgacttcacgctgacgggcagcacgcttaaagtcgttaccagcggtataacggatacggcagtaagcagtagcctgcagaccattcaacagctgcataccggtctcagttaccggtgtataatcgcatttcaaaacttctgcaataccgatctgatagttgttgatatgcttgatctcctcagagtccacatcaatatagataccgcccagaccgtcgatcacttcgctcagtcctttatagcctacggtcacaaagttcgtaatatccatatccagattcatgttcagcatcttaaccgcctgctctgctccgccataggaataagcggcattgcatttctggtaggaatccgtaccgatattcaggtacgtatcacgatatacgctgaccagtttgatatcaccggtatccatgttgatgctggcgatcatgatactatcgcttcggctgcccttgtacaacaggctttccttggtggcatccacaccgaacagggcaatgttcatatagcccttcatagtttcatcctgctgcacctcttcgggaatctgaagttcttctgtctccagaacggttaccttggggccctcattgctggtatgagtcattaccagatacaatactgctaccatgaacaggatcactacgatctctacgccaaagatgataacctttcttctcttcttggctgcacgctgtttggcagacattctcttctgtccgttcgcagctccggttctctgtccactgccggcaggtctctgaccgcttccggcgggtctctgtcctgtaggtctctgtgcgcttccggaaggttttcttccgcttccggcaggtctctgaccattgccgccattgttgttagaatttgttgccatcttgtcttctccttgtactaataagcatttttattgataaatcctgtaaagaacgtcataagaatgatcttgatatcaaatccaatggtccagttctcaatatagtaaatatcatattcgattctcttcttgatggaggaatcaccgcgcaagccattcacctgtgcccatccggtcagtcccggccgtacctgatgttttaccatgtaacggggaatctcttccttgaacttttccacaaactgcggtctttccggtctgggaccgaccagactcatatctccttttaagatattgaacagctggggaagttcatcgatactggtacgtctgagaaccttaccgataccggtgactctggggtcattgcgtaccgtccatccctttttctcttccgccgccgtctgcattgccatgctgcggaatttgtacatataaaacggcttattatgaagtcctacccgttcctgcttaaagatcaccggtcccgggctggacagctttaccagaattgctgatatgagcatgatcggtgaggtaataatgataccgaaaatggaaccaacgatatccattgcccgcttgatcaccatattgcctgtgttcgtcagcggtacataccggatattgatcaccggtaatcccatcagatcctccgtatagggtctgctggggatcagactgctgtaatccggaatgaatttggtgtgcaccccggatttctcacagatatccaccacaccttccagataatcataatccttcagggaaagtgtgatcgcgatttcatccagcttgttctccggaaggatgtattccagattaccaagcgttcccagtactttcactcccttataggtcgtgccgcccgggatgtgctcatccagaataccacacactacatatccccattggggattgctgaggattctgtcgatatattcctccgccgctcgggaataacctaccagcaaaatgtgcttcaggttgtacccctttttccgtatggaacgcaatgccttgcgcatgatgatacggaatacggaagtcagaaaaacattcaggacataaaaaattgccatgacggatcgtgaaaaattgatctcacggatgatcatatataaaataatgatcaaagccgccaggccaatggtattcgcctgcaggatactgtatatctcatgtctgcggcgaaccgtacgcttcggggaatacacactgcaccggtaatacaggaacatataaccgggtacaataaagggaagcagcatataataatcctgcaccggcaggacaccgatccccggaccgtcatttaagatataaaatttgatataataggcaaggacaaaagatactgccgtgatcagcgcatctattatcacaagaagcctgttaaagactttctggttgtcttttatcatacgggtcacccaatctttaagtccgaaaagcttcttttcaacgatttcattctacaataacggtggttttttctcaacttaagaatttatgaagcgatttcttaagatttcataagaattcgaaaaacattcaggtataattgccattgaatcttcacataattccatagatgactccattgaaagcgcacttttgcctgctttcccacaggacccacagtacgtttccacccttctgccagtccctttaaatatagttttcccattctcttcttgcaaaaaaacagaaattttatgccaaatccaagcaaaaagaacggcagattcagtatccactgtagtagcggcatatttttgccgatgacatagatattattggaagaagaaagttccgttttccgggaattgtagcgggatcccgtagaagcactgccgtaatgcagaacggatgccgtcggctcgtaccggttctcatagccgtagatccgggcacggtaaccgatatccagatcttccagataagcaaaatgcgcttcgtcaaaataaccgatctcctcaaatacctgacgtctgtaaattgccgctccgccacaggctgagaatatgctgacattcttgtcataatccacagcaggccggccttttccccgggaatatgcccatcccagaacgcagtagcggtctcccgcatcatccagcagctctggcttatcccacataagcattttggcgctgacggaaaagatcttttcatccttccgaatggcatcatacaatcctttcacaaatccagcttctactctggtatcgttgttcaacaggatcacataggggcttcgtgcctcccggattcccagattcaccgcatgacagaagccagtgttctccggcagggcgatcagacgcacctgcggttttcccccctcttctgccggtgcctcttttttgtgacaccattcgctgtccagatattccacgctcccgtcagcagaaccattgtctatgatcagcacttcatattccggtgcattttcctgtccctgacacagggaagccatgcattccggtaaatatttcattccgttgtaattgggtataacgacggttacttccttcatagtctctcccatttctccggatactccggcagatacagcagtcttccccgttttcgtaatgcttccgataattgcagacttaaaagccggatatctgccccggcaggcagtgtggagctgtcaaataccggctgttgttccggacctcttactacttccgtataaggcactcccacgattttttcaaacaattccctgtcagctgaccggatcctgatgcagcgaaggtctaacgcttctgcatcctgggacagctccgcccggtgaagataaccgccaaagtccttcggcagtccctcgtagaacacctttccgtccgcagtcattctgccgccggcgatcctgccgcggtttttcccagacagcactctgccacctacggcagccacatccggtctctcctgtaatacctctgcatattgtaaccgataaaatcctacatgtctggtctcctctgcctttgccgggatcccacgttctgccgcatgatcctgcagtgcacgcagccccgcttcgtaagcatatttcttgctgtggggattggctgctgtagatgcttcatggcatctccagtgatacagcactctgggaatatgaagaattctctcctccccggagcggccatctgcagccagcacctctgacactgcccgcagcaccagatcatagtcctgggcaccgtcgcattctggccggaaggcaagtttcttcatcagatctgcatccatcaccagaaaatggcagatatagttattactcaggattaaatcgtaattaaagtcttctttatggttgggatcgtaatattttgtctcatccccgttgcatttgtcttcatccgaataagcgaatgcaactctgacacctctgtcatttgctttggtaatagcatctgccatctcatacagagcatccggtgtcaatacatcatcatgatccagcaggccgatatattctccccttgcatagggtaatgcctgattggtattcgccgcaattcctgcattttccgtaaggtgtatatagtggatccttgcatccgctgcaatagtttccgcattttccgggagccgttctgtcaggaatccctggtttgtcaacgtctcctccacactgtgatcctctgtggcatccgccagaatcagttcccagtgaggatagctctgttgcataacgcttgttatcattctgttcagatagatttccggggtacggtacaacggcaccacaatgctgagtgtaaccggattatcccattttctgcaactttgcctttccagttcctcttccggacagggcacataaaaatagcggtctgtctctgtcaggcgttcccttacagagatccaggtttccctcaggccgttgcgtcgcaaataatatagagttttcttaaggtttgctatgttcagctttgccacggatacctccacttttataaaagagcaaatcgcccttcccgggcgattcgctcttaaaaataacattaactattcagaaccccattcgcaaaatcgctcttccagagctttcctgaataacatacttgcatgctatttgctcatagtggttacagtacagcctttacatcctcggtcagcttctctaccttggcctgtgcatcctctatgctgttacctttaacacccatgtagaacttgatcttgggctcggttccggaaggacgggcgcagcaccatgcattgtcgggaagttcaaaatacaggacattagacttgggaagtccggtagtagtcttctcgccgctctccatgtcgatgactacatcgttcagatagtcacggaatttctccactttcaggtcaccgaatgccttgggcggattcttacgaagcttatccatgatctcggcgatctgtcttgcaccgtcgatacccttcatggtaatggtgtactgggtctccttgaagtaaccgtatttctcatacatggataccatcatatcccacagagtcatgttgtgcttcttgcagtaagccgccacttcacacagacacataactgctacaactgcatccttatctcttgcatgagtacctgccagacagccgtagctctcttccagaccgaatacataattgttgctgccggtctgctcgaagaacttgatctgctcaccgatgaacttgaagccggtcagtacttcgatcagctttacaccataagcttcggtgatgggcttggtcatattggtggtaacgatggtggttaccagtgcgggattctcgggcatagcgccggtagcagtcttctctctcaggatatattctgctatcagcataccggacatgttaccggtaaatgccacatactcgccggtcttggtatccttggcatacacacccagacggtctgcatcgggatcggttgccagaacgatgtccgcatccttctccttggccagacgcagtgcgtatgtaaatgccttgggatcctcagggttcgggtaatccagtgtggtgaagtttggatccggattctcctgttcgggaactacatagacgtgcttaaatcccagctcggacaggatacgtcttaccggcttgttaccggtaccgcataacggagtatatacgatcttgatgtcatcagccatttcctgaataacatcgggatgaatgatctgcttcttcagctcagccatgtacttgtcatcgatctctttaccgatcacctgatagaggcctgctttttccgcatcttctctgctcatggtcttcacggtatgataatccttgatggcctgtacttcggtgatgatgtccttatcgataggagcggttacctgtgcgccgtcctcccagtatactttgtagccgttgtactcaggagggttgtggcttgcggtcactacgatacctgcggtacatcccagcgtacgaagggcaaaggacagttccggggtaggtcttaaagattcaaaaatgtatgccttgatgccattggctgccagacatcttgctgcctcatcggaaaactcgggagacatgcggcgggagtcaaatgcgatagccacacccttgctctgggtgccgcgcttaatgatataattagcaagaccctgagttgccttacgaacggtatatacgttcatgcggttggttcctgcaccgatcacgccacgtaaaccgccggtaccgaattccagttccttgtaaaaacgatcttccacttctgcctcgttgttgcggattgccagaagttcatccttggtcttctggtcaaaataatcatcattcaaccagaaattcagttcgtccatataactcattttcctatcctcctgttttatcgctatctttatctttcttcagtaaacgctctccgccattattctaccatagattacctttactgaaaagagcaatttaacgtccgctaaccggatctctcagcgcgtagtcactgcgatccagagagaaattcgggttgtaataggggtctcctgcttccagctctgccttccatttttcacggaaatgctcggattctttgttgtaacgctccgccttctctccctgatcatccagacctctggaaatagattcataatgatacagttccgcaaaaggggtccatacattcagcagtcccagtttgcgcagtttcaggcagaaatccacgtcattcagagagatcacaaagctctcgtccagtcctcccacctgctcatacagactctttttcaccaacagacatgctccggtcactgccgtggcattctgggtataacacaggcgtcccatgtagccgaggttctgtaccggaatacgataatgggtatgtcctgcggtgcgatgtgcccccagtccgatgactacaccggcatgctggatcgtcttgtccgcataatacagctttgcacctacggcacccacatcttcccgctgtgcatacatcagcatctcttccatccagttggcagtgatcacttccgtatcattgttcagcaaaaggatataatctccggtggcataggatactcccagattatttacagcagaataattaaagtcaccatgataggtcaccacagagatccggccgtcctcgctgtgcagaatcccgccgtcatgaccgcagacggtatgcagcttgcatctctctgcgtaggaatcattgccggacaatcccagcagctgggaatagtaatcccggatttccggtgtggtgctgttgttctccaccacgatgatctcgtagttgctccaggtgctgttcttctgaatagaagtaatacatctcttcagatcttccacgtgatccttgttggcgatcacgatggagatcttcggatctcccagaatctgatagcggatccggaaaattgtggcacaggctctggtactggtgatctgaaaatgtttgaatccatgctttttcagatgatccgccacggcaccctttgccgcctcgatggcatagggctttgcgtcaatactggcggcggtactgcccgcatggcttctccagtaatacatcagtctgggcacatgtacgatcttttgtgctctgtccgtcagacgcaggatcatatcgtggtcctgcgcaccgtcaaaagccgtacggaacagttcctcgccttccagaagttttctggaaaagacgctgaaatgacagatataattgttggcccgcagattatccggtgcataatccggcttaaaatgcatggtcagcattttattaatattgtcctcctggaaggtggtctcatcacagtacagataatccgcaccctgttcattgatttccttgacataggcatacaatacggaaggatgcagaatgtcatcctgatcgaacagtccgatatagtctccggtggccagcttgtaacactcattggtgttgtaggaaatacctccgttatggtccaggtgcttatatacaatacggccatctgatttcgccgcgtactccttgcagagttcttcgatgtaagcatgttccgcatcggaaccgtccgccagacacagttcccagttctgataggtctggttcatgacgcagtccagcatctgtatctggaactctctcttgttattccacaacggcacgagaatactgatcttcggcatataggggaataccgtttcttcctctttcttcctctgctccgcatcgggaaagcttccggtaccgtaggattccatcaggctcttctggtgactcttgttacggatcttccgcaaaatatctttgggaccaccgcaatgagacagccgttccttctgtctctgggcaaaatggatcacacttctggcaggtcctgtagccttccagaatttatttttcttgattcggtccagtttgaactgcagatcttccttctccgattccagtactacgatcttgtccgccagatccgcacatttttcatgctctctctcgtaggcttccttataattgatctcggtgttgctctctgacatatgtctcctccgtgatgctttcaccgcattttagcggatcatgcatctgttttattcttttgctgccggaagctctacggtcagatattttcccgtagtattccaaagtttcagcttgctgacacgattcaccacaagaacagcgatcgtatagtttcccgccggcagttgttctccttctctgaggacacaaaagccgcccaatgccacatttttctgatccggaagattttcctccagttcctgtcggtaggcaggcatcaactgcatggaccacacatcctgtccttctgtttccccacagggaatcagcaacagatgtttttcatagcaggcattatcgtctcccagaattacactgtatccctggatccgttccggtcccgctgtctctactctggccatcagacagttatccctgcggatcttctgtaattcctctccgccaggaagtccccttttccagaaaggctcctgtaaaacattccgatctgtcagatatgccggaaccacacggctgtccagtccctcccggttcagccccttcgggtaaaaaggatcctctccccggaactgtggatgcatctggtagagcagttctctctcctgtaccagacgctgcattttctcaggactttcatcgcttccccggctgagagattcatggtgatatgcaaagcggtcgttccacaccacattgtagtatcccatttccagaagccggaagcccagttccacatcattataggctacccgcaacacttcccggaatcctccggcctcccggaacacctctgtccggatcaggagacaggctcccgtcacggccacacaatcctgtgtaaaacggttccgtccaaaatagtagcttctgtcatcctccataaattgtagcttatgcaccggtcccaccggcagattgacaatgccgtcatgctggatcttcacggaatccggataataaagtttcagtcccacactgcccacataaggctgcaaggctctggacaccattttatccagccagtcattctcacataattccatatcatcatttaagaacagcagcagcttgccatctgccagttctgcgccacgattacacatggtggaaaaattgaactccgcaggctcatatacataccggatcggtgttccggctgtccggatttcttccaccagctgttctgtttttttcctgttttcctcgttacttccgttatctatcagcaggatttccaccggaacactgccctccgggcgttgcgtcagcgaccgcagacattttcccagtacggaaggattatctttggaaggaatgatcacagagaccctaagctctctggcgaacagttctctggcttcctctgccgctttggccgccagttccacggacagttttgcggattccgctgccgtccggtactcttcccaggggttctgctcatcttccgctttctcccggctggtttctgccggtccctgcagtccgattcccgcagtaccaaaagtgccgtgaaacagcacttcttccagatgtccaatggtatgacagcctctctcaaatccaccggccgccagaaacagccggtccatcaggggacggatctcttccgctttcgaaaatactatttccctgccggtgctctctccttctgtcacagccccgggctcccccagtttctgcaacagtctgctccgcactgccacgacgcttcccacatagaagaaagcccggtaggtatccggagcccagcaaggcttaaaccaggggatcacacgctctccgttctctgacagcagatcttcatctccatagacgatctctgcctccggatgcttcacaaaatacgcattgatccgctccacagcattttccgccagctgtcctttctgctgcctgtagatcacgaattccgcaagaccggctctttccccgatctctgtgaccactgtttccgcaatctttttttcctgctccgcagcccattgcgcgtaggtcacccgcagctttgccagttctgcttcatactttttatcctgttgtctgacaagcatctgctttactgacgtccgaatgctcaagtttcctgtctccttagaaaaattttttcaccgctcccaccatgtcacttgccacagcaaggggaatctgcacgatctccattttcacagtcaggatgttctctgcctttctgtccaatgcatccacacggatcgtcagattcggatcctccgtgggaaataccacgctgggatgctccgcaccgtctgcggactttaagatttttccattggtggtaacgatctttttgtcctgcacaggaaccggctgtccgttcatggtaagctcccggattttacacacgcaggcgcacatggccggatccagccgtaaataatggacatttccatcgaaattcaccgtaaattccgcctgtttttcctctgcatagacgttctccgggaaataggaattttcttcggaaaatccctgtcccttgtcctcatagatctgtaccctgagttctccctccgtctgacggaaccgtccgatccattccgtgggcttataaatttcgccgcctaagagattgcggatctcacccatggacaatttctgtccggtcacatatttctgaaattccatctcctgctctctgtactgtctggcttcgttttccgtgatgcccagacgatccagaatacgatccagttccagtgcattacgtctttcatcttccagtacataacagtatacagcccggaaggccagagctctggtctctatgggacggtcaaaagtccattcataatcaatcagtgtccagtggtcaccatccaccagaatattggcaaagatcagatcaaagtccgccaccggcacatcctccccgtagcccactctctccagatattctgcgaacaggttgtgaaattcctccacatcctgtctgtccaggcattcgtccatcagttccgacagcggtctgcccggcacgaactcaaattccgcataaggtatgccgttctcttctcccagatggcagacattgacatccagactgcttcccacataccgttccttcaatttttcataagcctccggcatatgacgcacatgggcttccgcttcttttgtcagcggatattttcggaccgtcttacagccttccttgtcccgcaggatctcggtgcggatccggaagctttccgcacggtcattggaatatctggcatatttcagatccagaggtgctccgatcaccgccatataggaattggaaaaaacggaaaacaatccttcctccacaattccgtcaaaagcactcttctcatcgaacaacagcattctgtcccggtcaaaattccgcagattgttggacagctctccacgtcctggaagataagcatcggaatagactgtggtcataaatttataatcgggatacggataataaaaactgcgttctcccacaccgcaggcatcgaaaatgcgctccagctttttccgggaaaacgtgcgtaccacaccgccctccggataattttcaatgccggaaaaccagctgcccagatgatcttccttgcatccggcaaaatatttcaatccgtatttgttctcaatggcaatcacgatcctgccgtccggtgccagatgcttctgcaggatcttaaggaaatcctcgtaaggcgtcttgccgcctatgtaagcctgtccgtactcaaaaacaccgatcagacagatatagtcatagtctgcgggaagttccggttccacatccgtgaaattgcccacatggatcgtcacattttcacattcgctgtggcggtaggcgttgatcaggctgcgcttcttcgagagatccacacaggtcacttccccggcttttcttgccagtgcacccgtgatggctccgcatccgctgcccacttccagcactttctctgttttctgtatgggaaggaaatccacgatattttcccggagagcagacaaatgatacaggatcggccagctctttcgctccgcaatgatcctgtcatattccaccgtactgtatttttttacaatgtctaagatctcgtcctccacactgccgtcgcaataataatcctcgccgggatatttatcaagattcagtgtgatcttcccgatggtctctgtcattccttacttctcctccgcatcccatacttttgtttcggaatccatatcataatatcctacagtgttcttgtccgataccaccgtaatattcaaggcatcatacagtctgtgatatacctcgaaggtatcctgattgtagccggtcactcccagagacagcagatactcaccaccctgtaagttcatcttctgggtaaaagtcacatttttcacctctcccggctccacgctgtccagaaaagccttttcaatcatggtatttgtaccggtgatctccacaccgatgacgttttttacagaaaatgcaaaaatgggggccggaatatgatccataaaacgaacccgcatatggatggtaaacatactgcccttcaggatcgcattggtgggaacccctctgtcatccgtaatgtaaaattcctcaatctgtgcctgtttcgtaccgtattccagggcattgggattctgccccttggcctccatggaagcctgggaagcatcggtccccttctcatctgctttttgggcagctgctctctgcaggtcttcatcatccagcagactggcagtctcttctcccacactctccgggccgtcatactgtcccaccaataccctcttgtaggtgtcgatcatagccttgggactgccttcgcccaggatatttccctgattcagcagatatacacggtcacaatatttgctgatactgctcagatcatgactgacgaacacaatggtcttgcccatcttcttgaattcttcgaatttatgataacattttgcctggaaaaatacgtcaccgacactcagagcctcatccacgatcaggatctccggctcgatattgatggccaccgcaaaggccagccggacgaacataccgctggaataagtcttcaccggctgatagacgtaatctccgatatccgcaaaacttaagatttccggaagctttgcctcgatctccttctcggaaaatcccatcatcgtcccgttcagatacacattttcaatgccgttatattccatattgaatccggcacccagctccagcagagcggaaatacggccatttaccagcactcttcccgaagtgggattcaatacaccggtgatgatcttcaggatcgtggatttaccggaaccgttggtaccgataatacccaccgtttctccctgatagatcttcatgtccacccccttcagggcatagtgaagcttatgcttcttcttttttccgaagccgaaagcctccttcatccgatctgagggcttatcatatagtttatagatcttctggacattatcgacttcaatggccagctttttcttttcctgcatcaattttaatcctcgcttatcagcgttacactgtctttgtcataccatatggccagagaacggttggcctcgttattttcatcctccgagaggtctcccatgcacaaaaaccagggcttgtagtgataaggttgcagctgtacatcatcctcatctcccaatagcttctccacccgttccagatattcctgatggaaattatacgcttctccggtatgcacatagtaataggccccataagccgaataatgtcctgcctgattgggtgacacttgaaagatcatgataaattccagacccataatcgcataaaaccaccacactgcggctccgttccagttcgtcagccatcttgccgtgctgcctgatgccttcttctgcagtctttgctgcagccagccacaccagtatatttcgttcaggaacaacagcaataaatatgtgatcttcaccgcattcagagttctggacaatccggcatgtccgagggaatacaggcttggggtgtaaccggtggcatacaggcagaaggaccacagaagtacgactcccggataccggaaacgatactccgtctccttaagtgcctgccagatcaggggtaacagcatcaccattaccataagaacaatagatcccgtaaactctggaagatgttttactccttccagaaaagatctgccgatggactccaggggactgtatccccagccgacatagctgcgggcccgcacggaattgcccggtgccgctacattcagcccaaatcctataatgtataccagcgtagcaggcaacagccacagtccctttttccggtgttccactaccacacttataaacagaatcgtcaacagcgataagagtccctgcaatgccgtgacaaaattgcttccggccgtgatcatggaaagcagtaccgaggccgtaaatagcagcccggcagcagttcttccttctgctctctccaggcagattgccacagacaacatcaacaatccaaagccgtgcattcccacgtaatgaactccgccgttataccagtagaagccactctgtgcggaataaataaacataaagactgccactgtaatcactgcctgtgctgccaggccggtccacttctccatgcccagtactttccgcaggatcacatgggtaaatgtcatggtacccgccagcaatagcagcaggatgaacactggaccgaggaaataatactgttctccccagattgccggcatcaatgccataaagaaaatagaagaataggttccctgccacgcataccactgcgttctggagcaatccagtgcaccggagatggcagcccattttgactgttcctgctccatggcagctctggcaaatcttccgaaattgtaatcatcataatacggaaccgcatagactgtcagacgaaacaatggaatcagcgtcaacagcagcagtccgcagcatcccacggccagcaggatctttcccggcttccataaccaaaattttctaaatttttcacgagcacccttcaattactttcaccctttctgttttccccacaacagttttgtaatgcagctcctccccacaaggttcttcatctataaaagttttgctatgctctgttttttataatacgatttctccgttcttcgaactctcgaaatcgtaacaatcattcgtattatagcacgtctgcgaaatgtaccttcaatcgtttgaaaataacggctcccaacccgaacagtactaccgttacgatccagaaatacatggtggaaaaaaaatcctggaaaaaccattccttctcataaatagcacttcgataaccgtttacaatatacaccagcggattcagcttcagaatcgtgatccaattgccggacagggaatccagattccacaaaataggagtggcccacatgccgatctgcaatccgatactgatgatctgagacagatcccggaaaaatactactactgcacaagtcgtatagctgagtgccagtacaaaaatgaacaggcagaagctatagtatacgatctgtatcgtatatatggtaggataatacccgtaaattgctgccacaatcaacagcagacacacaaaaaatacatgaataaaagtggctgcaataatcttgatgataggcaggatactgatcttaaatactacttttttcaccagatagttatattccagcagcgcattggttccattgtttaatgcctcactaaaatagaaccaaggtaccagtcccgccgtcaggaacaatacaaagggtacttccacaccctcccgcaggggagtactcgtattacccatgatcttatcaaaaacaacgtaatacatagccaccgtgaccaccggctgtgccatagcccataccgcacccagataagatcccgcatatctttttttgaaatcatttttggccagtttccagatcagatgccggttctggaacagctccaccggcagtccggtgaatttatcataccagtgaataaaagcaaagcatgccgctgcaatcaccacacaggaaatgatcttcttggccagttcctgtcccggatctaccgcaggtcccggattcttatggaatacaataagtactgccatgatcactgccgttgtcacaaacagggcaatgcccgcttttttacttaccttcattctctttttccttcacgtactcttccaatgtgccccacttggtatccttctcggaaagcgtcagttccatgccttctggaatcggccatttcacaccgatatccggtgtgttgtaagcgataccgccctcatcatcgggatgatagaaatccgtacatttatagcagaattccgcataatccgacagtaccagaaaaccatgtgcaaaattcttcgggataaagaactgcttcttgttctcttcagacaaaagcactccgtaccactggccgaaagtcctggaaccttcccgcagatccactgccacgtcatagacttctccgcggatcacgcgcaccagcttgtcctgaggaaaatgtttctggaaatgcagtccacgcaatacacccttcttggaagcggactgattgtcctgtacgaacacctcaggaattcccgcagccttgaaatcgttataattgtaagtctccataaaatatcctctggcatctccgaataccgtaggagtaatgatctttaatccttcaatttcacaggtttctactgttattttacccatttatttcgtcctcactctttatttttattgactattcgtaggtgatattcatgtccacacgaccttcgatgccgtccacttttcccttggaggtatactgccaggtcttataatatccctgatataacggaacactgcgatactctgccagccagatatgatagttttccagtcttgctgtctgcagattattgttgtaccagttacggctggcatagacacccgccgtgtatccggcattttctatggtcctgcagaacgcttcacataccagtgttctggtctcagcatccagactgtccgcacggccgttaccgcccgcaccttcggtatcgataaataccggatagttcagccggtaatcccggatcagttcgatcaccgcggaagcctcttccacagcttccttctcatccacagcctgggtgaaaaagtatacgcccaccggaattcctgcggcctgtgcacccttcatgttcgtcacgaacatgggatcttccaccaggcttccggttaccgaaccgcggtatccggcacggataatggcaaactgcactcctgcgttttccaccttatcccagtcgatctccttgttccatttggagacatcgataccgacctttgcgttaccggacgtggtctgcagcttctggatctctgtcttgtccgcatctgccagagcacctgccacggcgctgtcctcggcttctgcatccacttcatcctccgtcttgatcaacagggaaatatcgtcaatggccagaaactccactttatccttgacgtgaactcttgtctcactgaccggaaccttatatccctcaatgggaaggagctcaatataatagtctccggaatccagatctccaatgtaaatgataccgtcctgatccagatccttgtaatctcccaaaccgtccagtcgtacgtagaagctctccccggtcaccggacttccttcgttgtccacgatctggatccgcagatccttttctatggaggtggctaccagagatagacggttgctgttatcctttgcagcttccagaattggatttacttcctgatcaaaaaacgtattatcttttaaaaatgccttcagatcattgccgatctgaccatccggtgagaccgtctcttctgcctgatcgccattttccgccggagatgcactgtcacccgctccggcattctgagtgccggatgccggcggtccggaagctgccgtaaactgctccctgttgacatacatgaccagcagtgccaccagcaggatcaccgccatggaggccagaatcgccattttccgcagcttagagtccatttgctacctctaccagatattttccgtagttcgtcttaagcagcggctctgccagagcaagcagctgctctttgtcaatgaatcctcgcttgaaagcgatctcttcaatacaggaaatgtacagaccctgtctcttctggaaagccgccacaaaatctgccgcatccagaagggcatcatgattgccggtatccagccatgcaaagcctcttcccagtgtctctacctgtaaactgcctctgttcaggtactcgttgttgatgctggtgatctcaatctctcctcttgcagagggctttacattctttgcgatctccactacagcattgtcatagaaatacagtccgggaaccgcataattgctcttgggatgctccggcttctcctcgatggaaagtgccttgccgttctcatcaaattccactacaccgtattctctgggatcacgcacataatagccgaaaatagttgcgcccttttctctggcagctactctgcgcaatactgcggaaaagctctgtccgtagaaaatattatctcccagtaccagtgccactctgtcattaccgatgaaatccgcaccgatgataaaggcatctgccagcccgcggggctgatcctgcaccgcatattccaggtgcatgcccagctggctgccgtctcccagcaattcctgaaataccggaaggtctcttggggtggagatgatcaatacctctctgatatctgccagcatcagtgttgacaggggataatagatcatgggtttatcgtacaccggcatgatctgcttggaaatcgcttttgtcaggggatacagtctggttccggaacctcccgccagtataattcctttcatttcgtcctccgatccgcccttttcgggcttctttttacttgttttttaacacaccgaatgggaacgacgttcatcgttcccatttaacaggtattctttacttttcttcgtacatctcattgtagtacttctggtaatcaccgctggtcacattattcatccagtcttcatgctcgaagtaccaggcgatggtcttgcggatgccttccttgaacatggtctcgggataccagccgatctctgccttgatcttgtccggtgcaatggcatatcttctgtcatgtcccttacgatcctccacgtaagtgatcaggtcgttgttaatatgtgccttgcggggatcggaatccggaagcatctcctgcagagtctcaatgataatgtggatgatctcgatattctgcttctcattatgtccgcccacattgtaggtttcgaacagtcttccctgttcctgtaccatatcgatagccttagcatggtcttccacatacagccagtcacggacgttcttaccgtcaccgtagaccggaagctttttgccatgcaatgcattattgataatcagagggatcagcttctcagggaactggaaaggaccgtaattgttggagcagttggtaatgttggcagggaaatgataggtatccatatatgccttcaccagcatgtccgagcttgccttacttgcggagtaagggctgtggggatcatacggagtggtctcatagaagaatgcattgtcatcatcgggaagagatccgtagacctcatctgtagatacatgcaggaacttcttgccttctttgaagctgccatcgggaagctcccaggctgccttggcgcagttcagcatcactgcagtacccaggacattggtctgtacgaagatctccgggttgcggatacttctgtctacatggctttctgccgcaaaatgtaccacacggtcgatatcattctctgcgaaaattttgctgatggcatccttgtcacagatattagccttgacaaaggtgtagttctcacgcttctccacgtccttgagattctcaagattgcctgcataggtcagtgcatccacgttgatgatacggatttcattatcgtattttttaaacatgtaatgaatatagttggaaccgataaaaccggcccctcctgttaccagataagttctcattttttctccgttctgcgcacagcgcacattttttgttatagatagggatattttaccataaaacgagcaggatatcaa

SEQ ID NO: 552 - DNA, 14221 bp, unidentified
  source 1..14221: mol_type = unassigned DNA
tatttgtttttcttcgacacttttagcgttttaatactcgtgtttttaaatgccgtcggctcaatccatttcacgctttttggtatcgtaattttctttgtatccggcattacttgaatcaatgttttttccgtttgattaataaccatattaccggaaaatgtaagcgtatcattttttaaatatttagtttcatgtgcaagccctggcagcccatcacagtagccaaaaacattcgcagcctccactttaaattttgccggaaaatcaattttcttaatatctttgcttccgaaaaatgttccatttttcaaacttgtaagtttgtctgacaaatgaatatattttaagtttcccattgcaccaaaagtacaagatcccatctcgcgaattgcatcaggcatcacaacggatttaacattaagtatttccaaagtcgggcggctgtcggcatcgcaataatcaaacattgtcacaccaaataagttttgtggccacgcagcttcttccccctgatataaatctgcactatatcccaatctcacaaccggcgcattttcaattttttgaggaattatgatatctagcattttctttttgtccaataaatccgccgtaaaaatccagctctcttttttgtcctttgacaaatacgcatgatatcgtatactgttttgctccacagtatattcctttgttaaatcccaccggttcagcgcatccgtttccgctgcatttgaaacattcgactttagacacagtaccaaaaacagcaaaaacatcgacaccaaaatctttttcattttcataaaatcactctccttactttcatttacacgtccattaatcatgtaccttgtacttatataacgaatgataactggaaaatgttgcaaaagtaaggaatttttttacgacattcccaccagcaaaaccgccaccatcgccccggcaaaagttgccaccaatgcaccggtaagtgtataacgcgttttggtcacgcgcgccgtcataaaataaacgctcatggtatagaaaatggtttccgaacagctcataagaactgacgctaatgtaccaaggtaagaatcggtcccatatgttttatatatatcaagcaaaagaccggttgccgccgaggatgagaacattttcacgataaaaagtggaagcagttcgcccggaaaatgaaggatatttacaaccggtgcaaatataccggcgagccactccataaaaccggactgccgcaaaattcctacaccaatcatcaaaccaattaacgtcggcagaattttatagaccgtcaaaaatccatctttggctccctcaataaacgaatcaaaaatatccacttttttgcacatgccatagccgacaagatagagaatcacgaatggtatcatgcaatctgaaatataataaaggacttccatttaccgctccccctttttctttgatacttttcttgctattacagaaaaaataacaccggctgccgtcgacacaattgtagccaccagccccatgccaagaatggaagcaggcgaggcagaaccatactggcttcgatacgctataatattaaccggaatcaattgcagagaagaaatattgataatcaaaaaagtacacatatccgcactggcaatgtggcttccatgatttaattttttcaattcttccattgcctttaagccaaccggcgtagccgcccatccaagtccaagaacattactaatcatattggcggccatatattcatttgccttatgctcttttggcacacccggaaataaaaaggcaagaaccggtcgaagtgcttttgtaagcgcatcgataattcctgccttttttgcaatattcataagtcctgtccacatggacatgatgccaagcattgtaatacataaagtcactgcttcttttgacgaatccagtgctgctgttccgatttctccgattttgccggttgccgccgcaaacaaaatcccaatgagaatcataaatccccaaagtttattgagcatacgcacacgcctttttcttttattgtatgcggcaggaaaataaacattcccacaaaatcaaaaatcactgttaatgagtggggttccaaacacaacttttgtaacatcttctttttcatcataggaaaatgcagccatcatatttatgcgtctgccatttacctttttggaactttcaaatccgcttgtatagccgtatgcgacatagtaatccgaactgctatcggaattgctgttcattacttctccaccgccaaactgacgaaaaagtttgtccgccattgtttgctgctccgatgcattcagcctgccatttaccacaccttccatcacacgattgtcactatttgtatttcttgtatcagcagccgcctcctgagttgatgctttcataatatcactttttgcaaatgcctgttcaaacgcagtctgcgaaacataccatctggttaatacagtctgcaaaatcacaatagcccacaaaacaaacgctgcaaaagccgctgcaaaaaatttcttcttgcccaaataaaatcatcctttccaaagtcatccacttgtgactttcttataggatttccgattttttgaaaaatatgcaaaaatttcagttgtttttttatctgttacaatgttttttaattgcaataatcaagcggaatcttttgcgcatcatgggcgttttcgctcattgagctgcgtaacagcaggggcattgactcgcttgcccgcataaggaattcctcttttgtcaaaactaattatgatgtaatgagaaaaaagagacggttaatttcaccatgaggaatgttgaacaccgccggtgcgcagagggcgtagtctgccctcacgcaccgctgcgtgtgttctctcagcggaagcgattccgaatgggaaattaaccatctctttttattaactattacatcataattatttatcactcgtagcggcaaaaaatcacacttgaattctgcccgccaaatccaaacgaattactcattgccacacgaacctctttttcaattgccttatgtggaacataattcaaggatgcacatttttcatccaattcatccaaatttaatgttggtggaacgacgccggtgcgaatacactggatacatgtaattgcctcggtaataccgccggcacccatcatatgtccggttgcgccctttgtcgaagtcacagccatttcgccggcatgctctgaaaaaagttctgcaatcgcattcgtttcaatcggatcacccataccggtagaagttccatgtgtattaatataatctacagattcttttgtgatacctgcatgctcaattgctttttccatgcagaataccgcaccaattccttccggatgcgggcttgttacgtggtagccgtcggtgcagttggaaaatcctgcgagttccgcataaatcttagcaccgcgttttttcgcattttcttcggtttcaataatcagtgcgccaccgccttcgccaatgacaaaaccatcacggtctttatcaaacgggcggctcgcctgctgcggattctcgttattggtggacaacgcatgtgccgaagccaatccttgaataaacaatggggataatgcggattccgttcccatcgcaagaacggcatctgcctgtccggacatgattaacatgcaggcggtactgattgcgtcaccgccggaagaacatgctgtgctcaccgtcagacttggaccacgatagccttttgcaattgccacttgggctgctgcctcattgccgataattttcggtacaaagcgcgggctgacttttttatgctctcccttgcttaatccatcctgcacctctgcaatcggtgaaataccgccaagtgccgtaccaacgacgatacccatgcgctccggtacagtaatttcctctccggcatctgcgattgcttccattgctgctgcgtaaccatactgcataaacacgtccatttcacgcgtcagtttctttggcataaagtcttccgcattaaaatctttgacctcagctgcaatttttaccggcagctctttggtgtcaaagcgggtaatcgcttccacaccacattttccggccacaagatttttccaataattctctacgccaattccaatcggcgtcacagcacccattccggtgatgacaagccgactattcgttgtcttcattttcattccagtcattctccttgatttcttttctacgaatcttaccacttatagttttaggcaattccttcgtaaagtcaagtatttttggccatttatatgacgcaatattctttttcaaggatttcataatctcactccgcagtttatccgttccctcttcaccgttggcaagaacgatacttgccttgattgcctgaccgcggattggatccggcacggaagtaacagcacactccaaaacgtatggaagtttcataatttcattctcaatttcaaatggtccgatacggtagccgctggacttaattacatcatcggtacggccgacataccacagataaccatcctcatcaaagtaagccgtgtcaccggtgtgataataaccatcatgccatgcattctgtgttttttcctcgtcaccgtaatattccataaacaaaccatttggcgcaccatcttctgtgcagataacaatttcgccctcttcttccggaccggcaagtgttccatccggcagcataatctgtacatcatactgtggtgtcggcacacccatggaacccggttttggtgttgtaccaacgaggttaccaattgtcaatgttgtctcggtctgtccaaatccctccatcagggtaagtccggtttttgccttaaacttctcaaagatttccggattcaatgcttcgcctgctgttgttacattctgcaaagaagacaaatcgtactggtctaatttcaaatgtaccattacacggtaaaccgttggcggtgcacaaaatgttgtaattttgtatttctcaatcatatgaagaatttcttttgcatcgaaattatcaaaatcataggtaaaaatacatgcctcgcacagccactgaccataaattttaccccacaaagcttttccccagccggtatcggaaatagcaaaatggatgccgtccgggtcaacctgatgccaatatttcgctgtcacatagtgtcccaaaggatacttaaagttatgggttgtaattttcggatacgatgtcgtaccggaagtaaagaacataatcgatgggtcatcaccatggattgcattctcaccatgtggtctgcggaaatgacttgaaaaatattttacttccttgttaaagctgcgccatcctttgcggctggcaccaaccatgatttttactttcagatttttgtaactgcggcacgctttatcaacctcacgggaaaccgggccgtctgccgtacaaagaatcgcatctacattaccggctttaaaacggtattcaaaatcggatttcagcaaaagatttgttgccggaattgctactgcaccaatcttgtgcagtgccaaaatcgcaaaccagaactggtagtggcgttttaaaacgagcattacgcggtcgccttttttaattcctaaaaactgaagatagtttgccaccttagaagaataacgtgccatatcataaaaggtaaaggagcgttcctttccatcctttgaaatgtgaagcattgctactttgtccggatctttctttgccatcttatctaccacatcataagcaaagttaaaattatcatcatttacaaatttaatgtcctgcaaaacaccgttttcatcttccttaacctgaataaatggtgctgcaatatcgccttttgaaaatgccatttgcgttcctcctatatcatatcctgcaaattatttttatgttccatgtagttttcaaaaccacatcatattgtaaacaatacatcacgctttccctattgtcaagaaaaacaacgtaaaatcgtgatatttaatatattttttacacttccagaagaatccgtttgaatttacccttataatatgatagaattgtgttgacttatgtacacagatgaatggaggattttgtttatgttcaaaattgttgaaaaaaagtccctgaatcctactgtcagtaaaatcacagtagaggctcctttgattgcaaaaaaggcagagccgggacagtttattatcttccgcgcaaaagaagatagcgagagaattcctttgacaatcgcggattttgaccgcgaggcaggaacggtcaccattatttatcaaattgttggtgccggtacaatggaattagacaccttaaaagaaggtgaatacattcacgactttgtaggtccgcttggtgttcctacccacacagagggattgaaaaaagtagcagttgtcggcggtggtgttggctgtgccattgcttatccgattacaaagaaactgcatcagatgggtgctgaagttcacgccatcgttggattccgtaatcaggacttagtaattcttgaggacgaattcaaagcagccagtgacaagcttgtcatgatgaccgatgacggaagttatggcgaaaaaggtctggtaacagacgcattggaaaaattaattcaggatggaaatgaatacgatgaagtcattgccatcggaccattgattatgatgaaattcgtatgcctgacaacaaaaaaatatgacatcaaaaccgtcgtcagcatgaacccgattatgattgacggaaccggtatgtgcggcggctgtcgtctgacagttggcggcgaaaccaaatttgcctgcgtagacggtccggatttcgatggacacctcgttgatttcgatgaagcaatgcaccgtggaacgatgtacaaagaatttgagacacacgcccgcgatgaatattgcaatctactcaagaaaggggaaaattaatcatggcagagagaaatatggatatgaataaatgcccaatgccggtacaagacccggatgtccgtaataaaaactttgacgaagtagctcttggctacacctatgatatggcagtaaacgaagctcgtcgctgcttaaactgtaaaaacaaaccttgcgtcagcgcctgcccggttcagattaacattccggcatttattgagcgcgtagcaaatgaagatattgaaggtgcttttgcgattctttcagaatccacttcccttcctgctgtctgcggccgtgtatgcccacaggaaaatcagtgcgaaggcaaatgtgtccgcggcatcaaaggcgagccggttggtatcggacgattggagcgtttcgttgctgactaccacagagagcactgcacagacgcaccggttaaaccggagccaaacggtcacaaagttgctgttatcggtgccggcccaagtggtcttaccgttgccggtgatttggctaaattaggatacaaagtaacaatttttgaagcacttcaccttgccggcggcgttttggtttatggtattccggaattccgtcttccaaaagcaattgtgcagaaggaaattgataacttaaaagcaatcggtgttgatgtagaaaccaatatggtaattggtaaagtattaaccatcgatgaaattttcgaaatgggtaacgaagcaatcttcgttggttccggtgcaggacttcctcgttttatgaacatcccaggtgaaagtttgaaaggtgtttattctgcaaacgaattcctgactcgtattaacttaatgaaagcttaccgcgacggaagcaaaacaccaatccagcacgcaaagaaagttgctgttgtcggtggcggtaacgtagctatggatgcagcccgcagtgcaaaacgtcttggtgcagaagaagtttacattgtataccgccgtggtatggaagaacttcctgcccgtaaagaagaagttgagcatgcagaagaagagggaatcatctttaagacattaaataacccggttgaaatccttggcaatgacgagggtatggtatgtggcatgaaatgtgttgagatggaacttggcgaaccggatgaaagcggacgccgtcgtccggttgaaaaacctgacagcgaatttgttcttgatgttgacagcgtaatcatgtccattggtacaagtccaaacccattgattcgctccacaactcctggtctggaagcaaataaccgcggatgcttaatcacaaaggatgaatccggtttaacaacccgtgataatgtatacgccggtggtgacgccgtaacaggtgccgcaaccgtaatccttgccatgggtgcaggaaaagctgccgctaaggcaattgatgaggcattgagagggtaaataataaggctattcttacgataaaaaaggaaaaactgcaaaccgactcgaaacagagaattcgctttacgaattatgtgtttctcgctggtttgtggtttttccttttttaggtaagtctagcttattgtattcctaactctatcacccattccacccgctcccagtcctaacagacaccagaacacaggcgctgttactaccatagaatcattaaacatcccggcaaagagatatcctaatacagaaatcaaaattgcccgtataaaatactctttttgcgtatggcactttcctttggctgccgcaaagccacgctttaaaaaaatcacaaaaaatgcaagcatcagaacaagcgagaggcaccctgtctcaattcccatctgaagataataattatgtggctttttataataggttgtcaacaaatcatactgatatctggcaacataatcattatgcgggaacacaaaaccaaactggtcgggccccgcgccaagcagcacataatcttttaacagcggtatcgttcttgaccacacaaaaccacgaagcgatgccacctcgttcatccacgatggcagtgccgtttcggcgtgaatacacaaatcccattttccgtttgcattgagataataatacttcccatccccacgctgattggtaaaccgccagacactctttttgtacttcatttcatagccataaacggtcttttcaccgtccgcaaatgctttcttttcaaatgaaaatgctttccactttctatccggtgtctttttaagcgtgatattttcaccacttccctctatgacaaaagaataatttttatttttatagcggattttcacatggttatccttcgtttcaatataagataactttttacttcctttggtagaaaagcgaacctgctgccattttccaaaaatatcccctgtgatgtaccagttgcagaaaaataaaattgcaagcacagaaaccaagacgcatagaattgttcttttgtactgacagactttgttccgatattttacgccgccaatgcaaaacgaaaccagtaccgcaagcgtgccggtccgcgactgggaaccaaaaaggcagaaaatcagcagataaaaaagcacgaaccaaaaagttctctcccgctttttacccgcctcatggaaataaacaatcattgccaccggcaccggcagaagaagcgatacatagcttcccacatagttccaatggtacaaagttaaatatataaaatgtgaaactctcgcctttctcccacctagaaactctttcacaaagcccattgacaataaatcaaatccaaagaactgcgaaataccaatcacgccaaggattccaattgagacaccaagtatttttatcagtatggaaatattttctgttttattcacccaaaaaaaactgtaaaagaacacaaccagatacgaaagtattacgaaaagcccctgcatattgccggtcatcccccgcacactcagaaaaggatgatttgcatgcagagaagatgccattgcaaaaccaccatataatataggtagaagaagatattttggcatctcgtgaatctgccgccaaaaacgcatacgaacaaaaagcacaatcataaaaaggcagcaaaaaaacaggacaaacaatttaccatacaaaaagaaatctgactcaaccgcatttgcgggaagccacggttcattctctgtgtatgttttactgtttatcctgcctacaacaaggggcagaaacgcaagcaccaaagcaattggtgctaacgttatccatttgtcccattttttcatcatattccttactgtgcagcttcagtagctccttcttcaacagctccgtcagtctgagtctgagcgtcctgctgaacaggtgtcatatcagcttttcccttttccaaaacaacttccattgtctgtccatttcccaaatctaatttgtatgtgagcgtcttcttgtctttgtcatatgccatggacatgtaaatttcatctttaccttccattttaacttcaattccgtcagaacgtctctcataatcaaattttgtctcaccgtttgcagttaccattgtcattttatcatcttctgtaatatttacatttacagttgcctgactaggatcaacgccaagggatgctgcatattcatcaatcgtcataccattgattgtctttgctgtccaatcacctttgatgtcgtcataagaaataccacatcctgccaaacttaacatcattacaaatactaatactgctgatacaatctttttcattttctaaatcctccaaattttaattttttattaaatattgttatttactttcatttgccacaacaagcataattccttttgtaatcgtatcggaataaagatttgttcacctccccgtaaaataatttctgttttggtaacatctttaatatagcccgcattgatgtaataacttttcccgcaggtaacaaaatcaccgccatctggcattttttcttttgccctcgtgagcgaacaatttgtccgaaaatccccatgcagcgtatgtatcatcgtcgcatgcccacatgtttccatgtaaatgatttcgtctaagcaaaatcttttcattgtgcggtctaccataaatgatatgttttttttcatttgataaaacatattctgaaaacggttcagcgcacaatcaacctgctgctgcacaaacggctttatcaaaaagccatcggcatatacggaaaaggcatccattgcatagcattcagatgctgctgtcataatcatcttctgattactctttctcccctgaagtttttgtacaatcacagggtcttttatcttttgctccggaaggtttacaatcataagactcggtttgtttaccggaagttcagataacatattttcgaccgagctgaattcctttatgcttacttgataattgccacgcagatatttatctacgcacttttttatcgctgaccgctcttttgcggattcatcacataaataaattctcataaaacccctcctcaaaagattccgtgctcccaaaatatcatactttgctgataaatcctacgctttctgtcaaaacggcaaaaaaaatgcagaaacggtgaagtctctgcattttttataaattctttttacaactccggcttaatctcgccatttttcaaattcaggaaggcaacgtctgacatcgtgctcttaccggtaatatccgttacttcataagtaaaggcatattttccatccggcaaatctttttccttaaactggtaactttctttccagctaaattcctcatccggcatttcctgaatttcatcatcgccttctaaactctgtgcgtagtagacaatcgataccttgtcgccctttttcagtggacgcatatcttttcccgcctgtccggattcatccacaccggaagtcgcaccaagaatatagaagtcttttgcctcataatcataggcaacacttaaataactgtcttctccatttaatttaatcggaacggtatacaaattataatcatcgccctcataaactaactccatgtaacattctctgtcattaatagaaccccagacgccacggaagttatcctggaatacacctttttcccagtcgcactctaagtcgttatcttttcctaaaaagacaattgcttttccgtcgtcactgatataagcaaaattgaaagcaatgctttgaatactatctaattttgccgggtcaatgttcaactggatgtaatcattttcattaattgacatctcaaggtcaccgtcaaatccgcttacttcctgtacttcgccgacaccactttcactcaatgcctcatcggatatattggcaccgatggaataattgacaaaggaagaataaatattctctgcggcaatctgctggtaacgggctgctgattcctggtcaccgtcataggaataataaaccgaaagtccacttgcatgacggcggtagtctccgtttattttataaacaatcgcatcggaaagtgctttttcaatctgcgctttgctctcaccaatcagcccttctgcattctgtgccaaatgccctaagtcaaccatgtttgtgtatccttctttatcattgttaccaccataattttctgccttcgtggcacttctggcaaattccgcgcatacagaagaatctttttctgcttttttcaaaacgaccttacccatattctgcaaggcttcaattattgccggtgtcttggacaaatcggttacggaaagtgtaatttccgcatctgttcctgcttgtttacaaccttgtttaaaactgtcgcagatttctttaccaagttcggcaccgttcatagccggattttttgcaagtttagaaagccatccgctgtacagccatccatttcccggttctgtctcctcagacgctaccatgtaggacgcataattctggaatacattcgcggtatctaccgttgccatcaggcaggtatcaaaaccaacaacctcaaacggctttttgtcaccgtagacatctttcataacagcagaaagttcgtccaataccaacgaatccatctcataattttcatcaaaagatacaccgcttacacttccgccaccatgattccagaacaacatcatcttatggtctgccggatagttctcctctgcataattgaggaatccctttagcgtctccggatcacccatgcttgcctgctcagtttcatcttttaaagtaagtgtatctccactgtactcataacgctgaatccggtcagtttttacctgatcattctgccactttgacgcaccacccgtctgaattaccacttttacgttttccggaagcttaacctgcatcatttcatttagatctgctgttgctgcaccgtaattgctctccaaatcgctgccacacagataccaataaacaacccaagtatcctccttactgaaactctgcttcgcttctttctcttcgtccgcgcatccggtcattgaaaataacatacacaaaaccaacacaagcgccgtccatttttgatatttttttatctccatcttaatttttctcctttctgcctatttcttcattgtatcggctctttctaaatcctgcaacaaaccttgcagaattgtgggtaaagggtgaaaaattgcttgacccttccttatgaatttgttaaaattttatataggtaaatgtcgcaaaatgataggaggcagcaatgaatatcgcaattgtagatgactcagaaagcgaccgtcaattactacaggaattgctaatacgttatttcgatgcaagcggaatcagtattacgatttacccgtttcagtcgggtgaactttttttggcagggctttctcaccattcctttgaccttgtctttctcgatattttcatggatgagattaccggtatggacgcggcacacaaattattagaagcaggctgcgactgcacaattatttttttgacgtccagccgcgaatatgcactcgaaggatacgaagtaggggcttttcgttatttgcttaagccacttacttatgacaaactggaaggtacattaaatccctttttacgcaaatttcgtggggaagcaaggaagctcccacttatggtagagcggacaccgctgtacattccttattcggatttgtactatttatcatcggtgatgcgccaaacagaagttcatttagaaaaaagggtgctaaaacagtcttccgccattaattttcaaaaaacagtcgctccactccttagtgattcccggtttttcctttgttccaaaggcgttatcgtgaatttgcagcatgtgagtga

SEQ ID NO: 553 - DNA, 11531 bp, unidentified
  source 1..11531: mol_type = unassigned DNA
gtgtcagattttggtgcgagaagagcccacaatatggatgcagctgtctatggtgccagagcggcagtgatcggtggagcaacgtcgaccgctacagtattggcaggtcagatgtttgatattccggtcagcggaacgatggcacatagttgggtcatgttttataaggatgaatttacggcgtttgaaaagtatgccagattatatccggatgcaacggttctgttggtagatacgtatgatgtccttcacagtggcgtaccgaatgcgatccgtgtggcgaaagaagtattagagcctatgggaaaacgattaaagggaattcgtttggatagtggtgatcttgcatatttatccaaaagggcgcgtaaaatgttagatgatgcaggattgaaagattgccggatcgttgcatctaacagtttggatgagtttaccattcaatcccttgtcagacaaggagcctgcattgacagttttggtgttggagaacgtcttattacatcgaaatcggaaccggtttttggcgcagtttataaaattgcggcagtagaagaggatggtatctttgatcctcgcattaagatttcggagaatgtggaaaaaattaccaatccgggttggaaacagatatatcgtgtgtatgatgaaaatcataaggcgattgccgatctgttagcgggaagagacgaagagattgaaacttctggggaagtagagtatgtcgatccgaacaagccttggaaacacagagtatttaccggatgtacatttgttccgttgcagcagccggtatttattgacgggcgttttgtaggaacgaccccaagtgtaaaagagatcgcaaaatatgtggaacgtcagctttcggaagaaatttgggaggaagagcagcgctttgaaaacccgcataaacattatgttgatatgacaccatcttattataaaatgaagaatgaattattgtcttctgccagatttgaaggctgataagttgtagaaagtgaggatgattatgaaattaaaggtgagaattgccttgtttgttatttttgcagcagtgatcggtgggttttattatgcctatttcccggcgatcaatatacatttggagattttttggacaacattgatcgttgtttttttgtcgttggcgatcattctgggagcaaaatcatccatttctcagatggttggaagattgtctaagaaaccgtcgatcaaggaattttcgtggtttgcgaagctttgcagtgtattggttatcgtatgtgttggtgtgctgatcgttggttcggcgttaggcgctacgctatttcgttcacgtgcctatgcaaatctgcttccggtagataaacgggaatttacggaggatatagagcagtctgatcaagttacagacattgcattgatggatacggagagtgccaggatatttggtaatcgtaagattggttctttgtcggatgtggtcagccagtacgagatcgaaccggattatacgcagatcagcattaaaggacagccgatgaaagtttcgggattgaagtacgcgagtttcttcaaatggtggaataatcgaaacagtggtgtgccgggatatgtacaggttaatccggtgaattcagaggctaagtatgtgaaattaacaaagccgatgaaatatgttccctcggcatattttaattataatctgcagcgtcatgtgcagcttacttatccaaccaagatcattagcggatataaatttgaggtggatgatgatggaaatccatattatatttgtccgacaatgacagcaagagttggattgtttggcggcatagatgtgaatggtgtgatcatttgtgatccaatcgatggtgagtgcaaatattatgcgattggagattgtccatcttgggtggatagtgtatatgatggacatctgcttacgaaaaagtataattggcatggtatgctgtctggtggatatattaacagtattatcgggcagaaaggctgtaagcaggcaacggatgattttggatataagatcattggcgatgatgtgtgggtatataccggtgtcacatcggcaaatggggatcagtctaatattggatttgtgatgatgaatcagcgtacctcggaggcgagatattatcaggtgtccggtgcggaagaacattctgctatgtctgctgcagagggagaggtgcaggaaaaaggctataaggcatcttttccaagcctgatcaatgtgtcgggtactccaacgtatattatggttcttaaggacgccggtggattggttaaattgtatgcgatggttaatgtggagcagtacaatattgttgcaacagcgacatctcagacaaaagtgtttgaagagtataagacgctcctagcttccgatggaaagctggaaaccgaggaaaatgatctgaaagaggatacgatcactgtgcagagtgtggagtatattgattcggatgatggaactatggtatatatcaaagatacgaatcatcaggtatataaacaggcgttcaaagaagatgaatcgttgatacgtattagtgccggagatgtactgcacgtgaagtatcagccgatggataatgaaattcatttgttgcaggagttttccttcgaaacgaagtgacggagttttatagaattttaagaatattttataattagagctattgaattatttatacgatcctttagacttataagtggttttaagattcgcaattaagaatcgcaggacggcttatcgtcaaatattctatgaatttctgcgctgtgtatgcaggacaggatttattggatatagaagatggaggatacaagatgagattaaaagaacgcatcagaagatttatgcaagggcgttatggcatagtggatcaatattcagagtttctgtttattgtagctattccgatgtatattatcggaaatataatatcaattcgggtagttagtgcgctgttgatgggtgttgcattatttttagtgttctacgtcgattaccgtataatgtcacgaaattgcacaaagcggtaccgcgaaaatgaacaatatttgatgtttgcgggtatattccgtaagcgttggcagaagttttgttctcgcatcaaggatcggcgcgagaatcgtatttacaaatgtccatcctgtaagcagcggattcgtgtgccgagaggaaaaggaaagattgcgatcacgtgtccgcaatgtcggacagaatttatacgtaagagttaaaaggaggaagtggtatgcgggagatgacgtttaagatggaacgtcccggtctggtgaaagcaggggatgcagtgcatgtcagtgaaaaaaagacagcactgaattattcctatatcatagagcctgctgttgctatgtccggctgttttaaggtaaatgagaggatacagagcagagatggtattgtaaaggacgtaacccacaatgaccgcggttattatgtagtcgtggaatttgaaaactagcatcgaaacgcgattttgctgtgctgtcggaatgtccgatgtaagataaatggtaatgcattgacaaatgaaattttggcacagggcagtcgacaatatagtgaggatagagtacattaaacagaaagagaggatacaatgttagaaaaaggaatcaagggaaccggacgtcaggtagtgacggagaaacttacggcaaaagagatgggaagcggtgagcttgctgtttatgcaacgcctgcgatgatcgcattgatggaagagtctgcttacaaaagtgttacagcagaattagaggatggcatgggaacggtaggaacattaatgaatgtgaaacacgtttccgcttcaccggttggtatggagatcacatgcgagacagaattgacagaggtagatggaagaagactggtatttacagtaaaggcttatgatacaaaagggctgatcggcgaaggcgtacatgagcgctttgtgatcgttaatgaaaaatttcaggcaaaaactgacagcaaaaaagaagcttaataattctgacagcaaaaaaagaagcttaaggatttagccataaaaaacgcttaaacattacggtttaagcgtttttttgttaggagagtattttgcggtcctttttgttcaggtattttgatttcacttttaaaaataagatggataacgtccgttttttgtagggacgttatccatcttcggctgttttttataaatgttccgcttagcgtttattgctctgtttccaaattttcatctgttctgcctctgcgatcaactggtcgcggaaatcaggatgagccacggaaataatggcttctgctttctgccaggaggaaagtcctttgagattaacaataccatattcggttacgaagtaatgaacattggcacgtgtatctgttacaatagaaccattcgccaaagtaggacggattctggaatttacggtgccatccttagcagtgaaagtagaagacatgcaaatgaaggatttaccaccgttggaaaggtaagcgcctaatacaaagtctaactgtccgcctgcaccgctgatctgtttggttcctgcactctcagcgttgatctgtccgtacaagtcaatatccactgcattattaatggaaatgaaattatccaatgcggaaatggagcggatgtcattggtataattgaccggggcactcatgcactgagggttttcgtctaagtagtcatataatttttgtgttccggcaccgaaagcatatacctgacggcctttatcaatgctcttgttcatgccggtgatcttgccggctttcgcaatatccacaaaggcatctacatacatttctgtgtgtacaccaagatccttaaggtcggacttagcaatgagagaaccgactgcatttggcatgccgccgataccgagctgcaggcaggcaccgtctggaatttcatctacgatatattttgcaacagcttcatctacttctgtagcaggagcagcagcgcccattgcatcaatagccggattggagccttctacgatcatggccacctgactgatatggattccctcttcaaatccacctaagcagcgaggcatattttcattaacttccacgataataatctctgcgcgctcacagacagcagccatatgagaggcgtttggtccaaaattgaaatagccgtgtttgtccattggagctacctgaaacattgctacacgggaaggggtagcggagtcgcggtaataacgcggcagctcggagtaacggatcggattataaaatgagaaattttgtgcgattgctttacgttcgatgccgcccatatgccaagaattccaagtcatatgctgtgcaggagagtcaattttgaaaatctccggaacgtgcattaaaataccgcctctgaagtttacatcagtcaattccggaagacgttttgccatagcagcatccaaggctaccggcgtacccgtgcaccatccgtaatcaacccagtcgccggaattgacgactttgaccgcatcttctgcggaagttagcttttcgttgtacattgtttgaaagttcatattctttctcctccatatctgttttgaattggggatccgaaagtgtagaaaaaatttcagatcctatgtaaaactcttatctaataaaatagcacgaaatcattttattcgcaacaaatcgcagagaaatctttgctgacaaattttgtcggaattccacaaacaatgaaagaaaaatgcttgctaattatttcaatttgatatatcatagaggcaaagagtgcatatggaacgctatatattgtatggattgttctgcacatatcaaataaggaggatttagttatggcaaagaaagttgttttggcaggcgcatgtcgtactgcaatcggtaaaatgggtggaggattgagcaagactccggcaccagtgttaggttctatcgttatcgaagaagctcttaagagagcaggagttccaaaggaagaagttgatcatgtatatatgggttgtgtaatccaggcaggtcttggacagaacgtagcacgccaggcatctattaaggcaggtcttcctattgagacaccggcagttacagtaaatgtcgtatgtggttctggtttgaactgtgtaaatatggcagctcagatgatcgaagcaggagatgctgacatcgttgttgctggtggtatggagaatatgtcgatggcaccatatgctatgatgcagggccgtttcggataccgtatgaacaacggtaagttagtagataccatggtaaatgatgcactttgggatgcattcaatcagtatcatatgatgatcacagctgagaatgttgctgatcagtggaatcttactcgtgaagagttagatgagtttgctgcaagcagtcagcagaaatgtgaagctgcaattgctgcaggcggatttgatgcagagatcgtacctgttcagacaggtgtagatagaaagacaaaagagccaatcatcttctctaaggatgagggacctcgtgctggaacaacagcagagagccttagcaagctgaaatgctgctccggtaaagagggcggtgtcgttacagctggtaacgcttccggtatcaatgatggtgctgcagcaatcgttgtaatgagcgaagagaaagcaaaagaacttggtgttactccaatggcaacatttattggcggtgcattgggcggtgttgatccatctatcatgggtgttggaccggttgcatctacgaacaagcttttgaagaaaacaggtcttacaattgatgatatggatattatcgaggcaaatgaggcatttgcagcacagtctgtagcagttgctaaggatcttaagttcgatatgtctaaagttaataagaaaggtggagcaattgcacttggtcatccggttggagcatcaggctgccgtatccttgttacacttctgcatcagatggagaaaggtcagaagggtcttgcaacactttgtatcggtggtggaatgggttgctcaacaatcgttgagaaagagtaattcacagatcgcggttgataaagtaatcacataaaggagacataatcatggattttattttatatgaagtagatggtgcagtaggaaccattacaatcaatcgtccaaaggcattgaatgctttgaacagccaggtgttggacgagctgaatgctacattagatgcagttgatctggatacagttcgctgcttgatccttaccggagcaggtgagaaatcatttgttgcaggtgctgacatcggagagatgagtacactcacaaaggccgagggtgaggcgtttggtaagaagggaaatgatgtattccttaagttagagcatttcccaatccctgtgatcgctgcagtaaacggattcgcacttggtggcggatgcgagatctctatgagctgcgatattcgtatctgctctgagaatgctgtatttggacagcctgaagctggtcttggtattacacctggatttggtggaacacagagactggctcgtttggtaagtcctggaatggctaagcagttgatctatacagcaagaaatattaaggctgacgaggcatatcgcattggtcttgtaaatgcggtatatccattagaggagcttctcccggcagcacagaagatggctgcaggtattgcaaaacaggctccgatcgctgttcgtaattgcaagaaagcaatcaacgaaggtcttcaggtatctatcgacaaagctgttgagattgaagaaaagttatttggtgactgctttgagacagaagatcagaaagctggaatgggcaatttcttagctccaaaggatcagaaagttaaagttgttcctttcaaaaactgttaaaatcgaattggtgggtgtcatgggatgagtgatcatcccttggcactttactatagtcaaagcggattttcatccgtttccccaaaaaattaattaaaatatggaggtaatatcatgaaagtaggcgttattggtgctggtactatgggacagggcattgctaaggcatttgctcagaatgaaggatatgaggtagctctctgcgacattaagcaggagtgggctgatggcggtaaagagaagatcgctaaaggctatgacagattggtacagaagggtaagatgacacaggacgctgtagatgctatccttggcagaatcacaccgggcttgaaagaaaacctttgtgctgactgcgatcttatcgtagaagctgcatttgaagatatgcaggttaagaagacaacattcgctgagcttgacaagattgctaagcctgagtgtgtatttgcttctaatacatccagtctttctattacagagattggtaatggtttaactcgtccgatggtaggtatgcatttctttaacccggcagaccgcatgaagctgatcgaggttattgcaggtgttaatacaccagctgagacagttgagacaatcaagaagatttctgagaacattggaaagactcctgtacaggttaatgaggctgctggtttcgtagtaaaccgtatccttatcccaatgatcaacgaagcagctttcattaagatggaaggtgtatctgacatcgctggtatcgatgcagctatgaagcttggtgcaaatcatccaatgggaccattggagttaggtgatttcgtaggtcttgatatctgcttagctatcatggatgtactttacaatgagactggtgacagcaagtatcgtgcatgcccacttcttcgtaagatggtacgtggcggtaaccttggtgttaagagtggtaaaggattctatgtatacaatgctgaccgtacaaagacaccggttgatgcgctgtaatcaattctgaaatgagttcacattttttagtgttctgtcagaacaagttgttttggcagaacattaaaaataaaatatgtgtctgaaacagcacacaataaatatgacatgaaaggtggtaaaagaaatcatggattttacattaagtaaacagcatgagatggcgagacagttattcaaagatttcgctgaaaatgaagttaagcctctggctcaggaaacagatgagacagaagcattcccacaggtaacggttgataagatgggtaagagcggattcttaggaattccggttcctaaggagtacggcggacagggcgctgacattttaacatacattatgtgtgtagaggagttgtctaaggtttgtggtacaacaggtgttgttgtatccgcgcatacttctctttgcgttgatccgatccttacttatggaacagaagatcagaagcagaaattccttccggatctctgcagtggcaaaaaacttggtgctttcggtcttactgagccgggcgcaggtacagatgctcagggtgttcagacaaaggctgttcaggatgaagcaactggtgagtggatcttaaatggttctaagtgcttcattacaaacggtaaagttgctgatgtttatatcatcattgcttatacagatgttatcgaagacaagagaggcagaaaagttaagaaattctctgcatttatcgtagagaagggaacacctggattctccttcggtacaaaagagaagaaaatgggtatccgtggttcatccacatatgagttgatcttcgaggattgcagaatccctgcagattctatgctcggtgtaagaggaaaaggattcccaattgcaatgcatactttggatggtggtcgtattggtatcgcttcccaggcacttggtcttgcagagggtgcactggagagaacaatcgagtacacaaaggaaagaaaacagtttggccgtacaatcgctcagcagcagaatacacagttccagcttgctaatatggcaacaaaggtagaggctgctaagaatcttgtatacaaggctgcacttaagaaacagcagtttgctgatggcgctagagtttcttactctgtagaggctgctatggcaaaattgttcgcagcagaggtagcaatggaagttactacaaagtgtgtacagttgttcggtggatatggttatatcagagagtacgatgtagagcgtatgatgcgtgatgctaagatcacagagatttacgagggaacttctgaagttcagcgtatggtaatctctggtgctcttttgaagtaagaactgataattgcaaattatataagacaaggagtgacattgccgtgaaaattgtagtatgtataaagcaggttccagataccaaaggcggagtaaagtttaatccagatggtacactggacagaggtgcaatgcttgccatcatgaaccctgatgataaagcaggtttggaagcagcacttagaattaaagatgaaacaggagcagaggttactgtattgaccatgggtcttccaaaggctgaggaagttcttcgtgaagcaatggctatgggcgcagataacggtattttggtaacagatcgtgtacttggtggtgctgatacttgggctacttctacaacgatcgcaggtgctcttagaaacattgattatgatttgatcatcacaggtcgtcaggctattgatggtgataccgctcaggtaggaccacagatttctgagcatttggatattccagtaatttcctatgcaaaggatattaaggtagaaggtgacagcgttattgttgagcgtcagtacgatgatagatatcatgtattaaaggctaaaatgccttgtctcgtaacagctctttctgagttgaacgagccacgttacatgactcctggcggaatcttcgatgcatttgataaggagatcactgtttggggcagagctgatttgaaagatgttgatgactctaacttaggtttgaagggttcaccaactaagattgcgaaagcatccgataaggttaaaaagggtgctggtgagaaagttactccagattctccggatgaggcagtatcttacatcatgagcaagttacaagagaagcatgtaatctaacaataataaggaaaagtggtgactaaaatgggtttagaagaatataagggtgtctatgtctttgcacagcaggtagacaacgaattaagcggtatcgcttttgaattgcttggtaaagcaaaagagttagcagctgatttgagcacagatgttacagcagttctgatcggttctggtgtaaaaggtcttgtagatcagttggcagagtacggcgcagataaggttatcgttgtagatgatcctgagctgaaagagtatagaacagagccatatgcgcatgcattagcttctgtcatcaatgagtataagccggaaatcgttttggttggtgcaacagcaattggtcgtgatcttggtcctcgtgtttctgcacgtgttgcaacaggtcttactgctgactgtactgtacttgagattggtgattttccaatcaatcctgttccaaatcaggagcagaagcataaccagcttcttatgacacgtcctgcatttggtggtaacacaatcgcaacaatagat

SEQ ID NO: 554 - DNA, 6846 bp, unidentified
  source 1..6846: mol_type = unassigned DNA
atggaactgatttacacaaatgatttatgcaccggatgcaacaaatgcgtgcggggctgtcctgtacttacggcaaatattgcaacgcaggaaggttatgtaacggtagacccggacaaatgtattgcatgtggggaatgctttgatgtctgcccacatgaagcgagagactattatgatgatacggaccgcttctttgaagaccttgcatcgggaaagaaaatttccgtgatactggcaccggcatttctggcaaattatcccaaagaataccagcgtgtgctgggatatttaaagagtaagggagtcaaccatatctgcagcgtatcgttcggtgcggatatcacaacctggggatatctgaaatacattacggaacacaaatttttcgggggcatttcccagccgtgtccggcagtagtcacctatgtggaaaaatatataccggagctgattccgcgtctgatgccggtacacagtccgatgatgtgtactgctatttatatgaaaaaatacatgcaggtcacagatgaaattgctttcatcagcccgtgtattgccaaaaaattagagattaccgatccaaattgcggcggatatgtttcttataatgtaacttttgaaaagatgatgaagtatatcggaaacgattatgaaggatgtgaaccatataccgatgaactggaatacggactggggtctttgtatccgatgcctggtggactgcgggagaatgtagaacattttcttgggaaagagcaggtagtgcgtcaggtagagggcgagcatgaggcgtatgaatatctgcgttcctatgcaaaacgtattcagcagaataaagaacttccgtttatggtagatatcttaaattgtgcgaagggctgtctctacggaactgccacagatccgaaacggggaacggatgatgtcatgctgacaatcgcaaaactgcggaacagcaaaaccagtgcaaaacaggagaaggcacactttggcaggaagagcaaaagcaggagtccgtgggcagatacactgacaccggaggaacgtctgaaaaacttcatggacgcttttggaaagctggacatcaacgattttatgcgtagctacaccaatcgcgcagtacatattgaggaaccgtccgaacaggagaagaaccacctgtttgcagaaatgaaaaaagatacctatgaggaacagcacagggactgcgaatcctgtggatattcaagctgcaccaacatggtacgtgccatccacaatggagtcaacgtaaaagaaaactgtgtgcactatgtgcggggcatggcagaggaagagacaaaaaagattgcagaacttcgcgatcaggagcggacggaacaggaaatccgccagcagaagattacagatatcacagaccggtttattaccctgagtgataacattgcagaactgaatacggcaaacgaggaatctgcaaatgaagcaaccaatctggcacagtatattcaggatatttcccgcctgtgcgacgaactgaatgagtccatccgtattatgtcggatttcatcagtgtatataaaaagagcaatgaagatatttctgccattgcagggcagacaaatctgctttcgctcaatgcctccattgaggcagcgcgtgccggtgagaacggaagaggctttgcagtggtagcggaggaaatccgtacactgtctgattccacgaaagatcttctgacacagaacgaccagaaagccgaggcaattcttccaaagattacacagagcatggattcgatcaaagatctggtagaaagcatgaataccatgacgcagaaagtgtcaacgattgccgcaaacacggaagaaatttcttcccagacgacctatgtacagaatatgacagaagaaatgcgggatgaggtgaaagaactgtagatgaaaaaggatgcgtattacacatccggacaatttgcaaaaaaagcacatgtgacacttcgcgcgatccggtattatgataaacagaatattttaaagccaagtgcacggactgccgcaggagcgcggctgtatacggatgcagatctggcaaaactccagcagatccttttattaaaatatctgggattttcgctggaagatatccgggagatgacacttgctgcggcagatcagcagtatcttcttgaatccatgcggatacagaagaagctgctgcggcagaaaatggacgaaatgcaggcgatggatgaggcaattgaccgcaccatagaagccatccagacggaacaggcgattgactggaacagtatgctggatctgatccatctgacggcagtggaacgaagcctgaaaaaccagtaccagaatgcggcaaatatttccgcccggattcgcctgcacagggagtattccgtcaatccgcaggggtggtttccgtggattatgcagcagtgtaatctgcagccggggatgcggattctggagctcggctgtggaaatggagcactctggaccgaaaacagggaacaactgcctgcggatctttgggtcgttctctcggacaaatcggaaggaatgctaaaggatgcacagcgtgcactgggagaggacagccgcttttcctataaaaaatttgactgcgaagaaattccttatgaggagggaatgtttgatgttgtgatcgcagatcatgtgctgttttactgtgaaaatatcccacaggtgcttgcagaatgcaggagagtcttaaaagatgagggacgttttttgtgcagtacttatgggaagcagcatatgtgggaaattaccgatctggtgcagaagtttcataaagaaatcgttttatcagcggaggtgctgtatgagcggttcgggcttgaaaacggagaaaatctgttagcaccgtattttccggaaattcagatgcgaagatacgaggatgcgattgaaatagcggaagcagaaccgctgatttcctatattctttcctgtcacggaaaccagaaccagctgcttttgaaccagtacaaagagttccgggaatttgtttctgcccgtgtggcagatggatttcatatcacaaaagatgcagggatcttcctgtgcagaaaatagtttgaaaatctataaaaaagacttgaaggtgacctagcgtcaccttttataatgcaatcaaatagaaaaattggaaactcacacaggaggaaaagtacatgactattattgtaacgggtggtgccggtttcatcggcagcaactttatcttctatatgttaaaagaacatccacaggatcgcatcgtatgtctggattccctgacctatgcgggcaatttgtccacgctcgcaccggtgatggatcagccgaattttcgtttcgtaaaactcgatatctgcgaccgtccgggagtatataccctttttgaggaagaaaaaccggatgtgatcgtcaattttgcagcggagtcccatgtggaccgctccattgagaatccggaagtctttttgcagaccaatattatcggtacttccgtgctgatggacgcatgcaggaagtatggtatttcacggtatcatcaggtatccacggatgaggtgtacggagatctgccgctggaccgtccggatctgttcttccatgaagatacgccgatccacacctccagtccgtacagcacttccaaggcatctgcggatctgcttgttatggcatatcacagaacgtacgacctgccggtgacgatcagccgctgttccaacaactacggcccgtatcagtttccggaaaaactcattccgcttatgatcgcaaatgcgctggcagataagccgcttccggtatacggagagggactcaatgtgcgcgactggctgtatgtcgaggatcactgtaaggcgattgatctgatcctgcgcaacggaaccgtcggagaagtctacaacatcggcggacacaacgagatgaaaaatatcgatatcgtaaaactcatctgtgaatatctcggcaagccggagagcctgatcgagcacgtacaggatcgcaagggacatgacatgcgctatgccatcgatccgaccaagattcacaacgagctgggctggctgccggagacgatgtttaaagatggtatccgcatgaccatccaatggtatctggacaataaggaatggtgggagaacatcgtaaacggggaataccagaattattacaaagaaatgtacggaaagaaaggcttataaatatgaaagtattcgtgacaggcgttgccggacagctgggacatgatgtggtaaacgaactgacaaagcgcggacatcaggcagtcggttcggatattgcaccgacactggaatcctgtgcatcgtatgtgccgctggacatcaccgatgcggcagcagtggaacagacaatcatgcaagtacagccggatgccatcgtgcactgtgcggcatggaccgctgtggatgcagcagaggacgaagaaaatcaggcaaaagtcagagccatcaacgtagatggaacgaaacatattgcggaagcggcaaaaaaagtagatgccaaaatgttctatatcagcacagactatgtgtttgacggacagggcgagactccgtgggagccggactgcaaagcatacgcaccgcttaacgtatacggacagacgaaacttgacggggaactggcagtagcacagacactcgggaagtatttcatcgtgcgtatcgcatgggtgtttggattaaacggaaaaaattttattaagaccatgttaaaagtggcaaaaaatcacccgcaggtgcgcgtggtaaatgaccagatcggcacaccgacctatacttacgatctggcaagactgcttgttgacatgatggaaaccgaaaaatatggttattaccacgtaacaaacgagggtggttacatatcctggtacgatttcacaaaagaaatttaccggcaggcagggatttctaccgaagtgcagcccgtgacaaccgcggaatacggtctgtcaaaggcagcgcgtccgttcaacagcagactggaaaaaaagaaactgaaagaaaatggatttacaccgcttccgacctggcaggacgcgctgggacggtatctgcaggaactaaagcgacagggggaactttaagatgaagggaattatattggcaggcggcgcagggacacggctgtatccgctgacgatggtaaccagtaaacaattgcttccggtatatgacaaaccgatgatttattatccgctgtctacactgatgctggcaggcatccgcgatattttagttatttccacgccggaagataccccgagatttgaagcacttctgggggatggaaatcagttcgggcttcatttgtcctacaaagtgcaaccgtccccggacggactcgcacaggcatttttgctcggagaggaatttatcggagaggatgccagcgccatggtgctcggtgacaacattttctacggaaacggattcggaaaaattctgcgaaatgccgcaaaggatgcacaggaaggacaggcaaccgtctttggctattatgtcaacgatccggagcgtttcggcgtcgtggatttcgatgcgaatggaaaagccgtatccatcgaagaaaaaccggcacagcctaagagcaactatgccgtgaccggactgtatttctatccggcaggcgtgagcgcgatggcaaaacaggtaaagccatctgcccgcggcgaactggagattacgacgttaaacgacatgtatctgcagcagaaaaacctaaatgtacagctgctcggccgtggctttgcatggctggacaccggaacgatggacagccttctggatgcggcagcatttgtgcagatgatcgagcaccgtcagggcgtgaccatttccgcaccggaagaaattgcatatatcaatcagtggattgataaagaaaaactgcttgattctgcgatacgctatgggaagagcccgtatggagagcatttaaaagcagtcgcagaaggcagagtgaaatattaaaatcagcgtaactattcagaacccctcagaattcgaaaatcagaatcgttatgtttacataaaagaggctgattttcgaattctgagggagcttgaatagagttccctccccatatatgagcaaaattagctgcgttagcagcgagaaagcacgtgaagcgtgcgtttttgcgaatatatggggagggggttctgaatagtaactattcagcatgaaagagggaaaacagtgggacagataacagttaaaaaaaatgtcggtggcatcgaagggctgtgtgtgattacaccggccgtacacggggatgcccgcggatactttatggagacctacaatgaacgggaaatgaaagaagccggatttgacatccagtttgtacaggataaccagtccatgtccgtcaaaggcgtacttcgcggactacatttccagatcaactatccgcagtgcaaactcgtgcgcgccgtgcgcggcagcgtgtttgatgtggcggtggatctgcgggaaggttccgcaacctatggaaaatggtacggagtggaactttccgaggaaaacaaaaagcagtttctgattccggaaggctttgcgcatggcttcctggtcctgtccgacgaggcagagttctgctataaagtcaatgacttctggcacccgaacgacgagggcggcctggcatggaatgacccggcgatcggtatccagtggccggatgtgcagggggagtatcagggaaccccatcggcggaaggatattgcatgacagatggaacgccgctgacactttcaaagaaagaccaggagtggccgggattagaggaaaaataa

SEQ ID NO: 555 - DNA, 7632 bp, unidentified
  source 1..7632: mol_type = unassigned DNA
atgaagaaatcatatgcagtgatcacaggggcaagctccggaatcggtatggcgtttgcacggcagcttgcagcagaggggtatcgtctggtgctggttgcacgcagagaggaccggctacaggaactggcgcaggaattacaaaagaagggaaccgagagcattgtgatatcggcagatttgtcacaaaaagaagcctgttatcacctgatgcagcagatcgagaagctgccagtcgggatattgattaacgatgcgggattcggtgactgtggcagctttctggagacggacgcagataaggaaatgcagatgattgatgtaaatgttaaggctatgcatcttcttatgaagctgatgcttcgccgtatggagaagcaggagggcggttacatcttaaatgtggcttcctcggcgggacttcttccggcagggccttatatggccacctattatgcgaccaaagcttatatagccagcctgacacgtgccgtggcactcgaactgaaacagagaggcagccgcgtgtatgtgggggcattatgtcccggaccggtgaatacagaatttaatgccgttgcaaatgtagagtttgcactggcaggaattactccggaatattgtgttagatatgctttaaagcagatgaaaaggcgcaaagtagtgattgttcctacgttgacgctaaaagccgtgacaacctgtggaagatttataccacaaaaagtgctgattgcaattaccgcacatcagcagaaaaaaaagctcagagcagaggatatatcataagatggaagaaattaaaatcggttcccatgtgggaatggcaggaaaagagatgtttttagcgtccgtaaaggaggcagaaagctacggagcaaatgtgttgatgctctatacgggtgcaccacagaatacccgcagaaaagaaatcaaagatctgaatattgaggcaggatgggcctatgcaaaacaggccggaatccgggagattgtggttcatgcgccttatatcatcaatctggcaaataccgtaaagccggagacatttgaactggctgtacagtttctggaaaaggagatccggcgcacggctgctatgcgaagtcatatcctggtgttacatccggggtccgcgctggatgcgggtgcagaggccggaattgcacagactgtccgcgggctgaatatggtgctggatgagaacgaggatgaggtatttattgctctggaaacgatggcaggaaagggcagtgagattggaagaacctttgaagaaattaaggcaatctatgatggagtgaacaaaaaggagcggttgagagtctgttttgatacctgtcatgtaaatgatgccggctatgatctggtgcacgattatgatggggtgtttgaaaaatttgatcaggtaatcggactggatcagattgcggtcttccacatcaatgacagtttaaatcccctgggggcacataaggaccgtcatgcaaatattggaaaaggaaccattggatttgaacccctgtaccgtctggttcacgatccgcgctttgtggaaatcccaaagattttagagacaccgtggctttgtgccgagggagagaccaaaaagacgattccgccatataaagaagagattgcacagcttcttgcaaaggaatgagggggagaaggattatgaatgttaaacaacaggggatttccggctattggttaaaggtgatcgccgtggtttccatgctgattgatcacacatctgccgttattttagaacagattccgggactggaagcccccgcatttttgatgcgcatcattggaagactggcgtttccgatttactgttttcttctggtagaaggattttaccatacacgcagcagggcaaaatatgcgggaaggctttttttgtttgcactgatttccgaggttccgtttgacctggcattcagcaggagaatgtgggatttttccagcaacaatgtcttttttactttgctgttcggacttttggtgatctggggtgttgaaaagataaggcagaagtttgtggcggatgtttacggggaaaaagcagcagccatccgtgtgattcttatcattgtgacagttgcagccgggggatttctggcacttcttttccgtacagattacgatttgtcgggaattgtgacaatttttgcaatttacatgttttatccgaagaaagtgaagggaatgggtatcggtgttctggttttaaccctgctggcaagtatcattgaagcggcagcatttttagatatgataccgatttatttttacaatggaaccaggggaaaacagatgaagtatttcttctacatattctatccggcacacctgtttcttcttgccatgattgcacgggcaatgggattttgggcttaatattttaagaagatgttacgattcttatgaaattcttatctttttcagatacagcttgcgttcctgaaaaagcgggagtacaatgcagacgaaatgaaagacagataggaatggaggtcttgaatgatgagacaaaaatcttggaatcagtttaaaaaaacaatggctgcctcgacactggcaggagcgatcgcttttacagggtgtgcggtgatgccttcggttacagcttttgcagatacaatggaacagaccggtcaggtatcgtatgataatgaggtgatgccgatccacacggacgtgcagacggaggcaaaaccgttgatgaagggtacgtcatgtacggtttcggatggaaagaacctgtattatgcgtttgaaatgatgggtgtgcgtatgggaattatgaaatacaacaccaaaacaggcaaaaagagtgaggtatattcctacaaaatagggaaaaacaaaaagggaagcaatggtttttcccagttatctgtggataagaaatatatttatgcaacctgggaccgttactatggaaccgatgcaacaaaagaatatatttaccggatcgcaaaagacgggaaatccgcaaagaaacttgcgctcggacgtgacccacagcttgtagatggacggatttattatctggcactgaaaagtaaaagtgaagatggcatgaattattcggaagataccggaaccgtaatgagcatgaagacggatggaacggataaaaagaaagtagcacagattgcaaacagcggagatgcttataggtattccctgtttcaaagtgagggaaagatttactataccaaagaaaacgagaacaggacattttatgatctggagggaaacagttatcagagaggttcctttgctgttaaggatgaaaattatctgagtgtttcactggaagctgtcaatgatggaacgtatacctatagtacgacaggaaaggatcggtacatgcagacgaaactctaccggacagataacaggacgggaaagaaaaaccttgtggcatcctttaaacttggcattgaaaaatactcggtttgtggaaattatgtattcgtggaagcaaatgttccgtacaagggagctgatgtgactgagaaacttgcagtttactgctataaggcagatggcagcagcaaagtaaagcttgcttcctggtttccggcagaataaaatccgggtaacaatcgaaaaaataaaagaagcaccgcgacttgcggtgcttcttttattctggggatttatttatccagatcttttttatctacattctgcagcatcattgcacgaactttcagaggaagtccgaacagtgtgatgaatccgtctgcatcgtgatgatcgtactgatcaccggttgtgaaacttgccagagactcactgtagagagagtatggagaagttgtgccggctttgatgatgtttcctttgtagagcttgaattttacttcaccggtgacatacttctgggtagaagtaacaaatgcctggattgcttcgcgaagaggagtgaaccattttccttcgtatacaacattggcaagacggttgcccatctctttctttgcagataaggtatcgcggtcgagaaccagttcttccagctggtcatgtgcttccataaggatcgttccgccaggagtctcatatacaccacgggatttcataccaacgacacggttttctacgatatcgatgatgccgacaccgtgctttccaccgagacggtttaattcacggatgatatcggaaactttcatttcttttccgtttacagtctttggaacacccttttcaaaggtcatggttacatattcgccttcgtccggggctttctctggggaaacaccaagaaccagaagatgatcataatttggctcgtttgcaggattctccagctcaagtccttcatggctgatatgccataagttacggtcacggctgtaactttggtctgtgccgaatggaagatcgattccgtgtgctttgcagtatgcgatctctgcctcacgggaatccatctgccacttgtcatcacgccaaggagcaatgattttgatatccggagcaagtgctttgataccaagctcgaaacggatctggtcatttccttttccggtagcaccgtggcagattgcaacagcgttttcttttctggcgatctctaccagtttctttgcgataccaggacgtgccatggcagtacctaataagtatttgtgctcatatacagcaccagcctgtacacaaggtacgatgtaatcgtcacagaactcatctgtgatatcttcgatatataatttagaagcgccggataatttggctctttcttccagtccgtctaattcttcgccctgtccgcagttgatacagcagcagacaacctcataaccataagtctcctttaaccaagggataatagcggtagtatcgagtccgccggagtaagctaaaacaactttttctttcataagattgtatcctttctttctatatggaattgtacgctctcgtacgactaaccctactatacatcaatccaaatgaaaacacaagtgaaaaaatatacataaaattgcataaatatacataaatttgtgaatatttgctatttacggatggaaaaagatggactattataggatagaatcatatttttaaaagaaagaaaaggtaagaaacatggtaaaggtaggaattatcggagcgaccggttatgcaggagcagaattggtacgtattttattaaatcataaagaggcacagatcgagtggtttggatcaagaagctatatcgatgaaaattatgcagatatttacagaaacttttttgagcttgtcgatgcagactgtctgggtgataacatggatgagcttgcttcccgcgtggatgtgattttcacggcaacaccacagggatttctggcaggtgtgctgaatgaggatattttaaataaggtaaagatcattgatctgagtgcggattttcgaatcaaagatgttgctacctatgaaaaatggtataagattgagcataaaagcccacagtttattaaggaagccgtttacggactctgtgagattaaccgtgataaggtgaccacccagacccgtctgattgcaaatccgggatgttatacgacctgttccattctgacagcatatccgctggtaaaagagggactgattgatccggatacattgattattgatgcaaaatccggtacttccggagcgggacgtggggcaaagacaccgaacctgttctgcgaagtgaacgagagcatgaaagcatacggtgtgacaacacacagacatacaccggagattgaggagcagctcggctatgcggcaggaaaagagattaccgtgaattttacaccgcatctggttccgatgaaccgcggaattcttgcgacagagtatgcaaccctgatcaaaaagccggatggtacctatccttcttatgaggaactgaaggctgcttacgataaatattatgcaaaggaacgtttcgtgcgtgtattaaagaaaggtgtctgcccggagaccaagtgggtagagggcagcaattacgtggacgtaaactttgtcattgatgagcgtaccggcagagttgtgatgatgggtgcactggacaatctggtcaagggtgcagccggacaggctgtacagaacatgaatctgttgttcggatttgatgaggcagaaggactttccatggttccgatgtttccataaggaaaggcatctgttcggtgcatttcctacgctcattgtttccgcgtaagcggaactctcatacaatgagctctataatgaggtgaataatgagtaaagaatatacaatccgtgtgatgacactggaagattatgatgaggtgtatgcgttgtggatgggcatccacggttttggaatccgttccatcgatgattcaaaagaaggagtggagcggtttttaaaaagaaatccgaccacgagtatggtagcggtagcagatggaaagatcgtgggagccattctctgcggacatgacgggagacgcggatgtctgtatcatgtctgtgtgcacgaagattaccggaagaacggaatcggaaaagccatggcagtcgcatgtatgcgcgccctgcaggaagaaaaaatcaacaaggtcagcctgatcgcatttaagagcaatgagctgggaaatcatttctggaaagatgccggctggtgtttcagggaagacttaaattattacgattttacattgaacgaagcaaatattacgaaatttaatcagtaaggagaatgttatgagtgagaatttaaacgcattggaaaaagcacaggtgctgattgaggcattgccttatatccagcgttttaaccgcaagattatcgttgtaaaatacggtggatcagcgatggtagatgagaaactgaaaaaacaggtcattcaggatgtcaccctgttaaagctggttggattcaaaccgatcattgtgcatggcggcggcaaggagatcagcaaatgggttgccaaagcaggaatggaaccggaatttatcaatggactgcgtaagacggatgcgcctaccatggagattgcagagatggtgttaaaccgtgtcaataaatcactggtatccatggtgcaggaacttggggtgcaggcggtcggcatcagtggaaaagacggtggtctgttaaaggtggaaaagaaattgtcggatggtcaggacatcggatatgtaggagaagtaaaggatgtgaatccaaagattctgtatgatctgctggagaaagatttccttccgattatctgcccgatcggtcttgatgacaattatgatacatataatatcaatgcggatgatgcggcatgtgcgattgcccgtgcagtttccgcagagaaactggcattcttaaccgatatcgagggagtatacaaagatccggaagatccgtccaccctgatttccgaacttacggtttccgatgcagaaaaactgattacagacggatatatcggcggcggtatgcttccaaagctgaataactgcattgacgctattgaaaacggagtatcccgtgtgcatattctcgatggaagaatcgcacattgtctgcttttggagatctttaccaatcgcggaatcggtactgcaattttgggtgatgaagaacatcatttttacaatgaataa

SEQ ID NO: 556 - DNA, 30706 bp, unidentified
  source 1..30706: mol_type = unassigned DNA
  misc_difference 29036: note = a, c, g, or t
  misc_difference 29037: note = a, c, g, or t
  misc_difference 29038: note = a, c, g, or t
  misc_difference 29039: note = a, c, g, or t
  misc_difference 29040: note = a, c, g, or t
  misc_difference 29041: note = a, c, g, or t
  misc_difference 29042: note = a, c, g, or t
  misc_difference 29043: note = a, c, g, or t
  misc_difference 29044: note = a, c, g, or t
  misc_difference 29045: note = a, c, g, or t
  misc_difference 29046: note = a, c, g, or t
  misc_difference 29047: note = a, c, g, or t
  misc_difference 29048: note = a, c, g, or t
  misc_difference 29049: note = a, c, g, or t
  misc_difference 29050: note = a, c, g, or t
  misc_difference 29051: note = a, c, g, or t
  misc_difference 29052: note = a, c, g, or t
  misc_difference 29053: note = a, c, g, or t
  misc_difference 29054: note = a, c, g, or t
  misc_difference 29055: note = a, c, g, or t
  misc_difference 29056: note = a, c, g, or t
  misc_difference 29057: note = a, c, g, or t
  misc_difference 29058: note = a, c, g, or t
  misc_difference 29059: note = a, c, g, or t
  misc_difference 29060: note = a, c, g, or t
  misc_difference 29061: note = a, c, g, or t
  misc_difference 29062: note = a, c, g, or t
  misc_difference 29063: note = a, c, g, or t
  misc_difference 29064: note = a, c, g, or t
  misc_difference 29065: note = a, c, g, or t
  misc_difference 29066: note = a, c, g, or t
  misc_difference 29067: note = a, c, g, or t
  misc_difference 29068: note = a, c, g, or t
  misc_difference 29069: note = a, c, g, or t
  misc_difference 29070: note = a, c, g, or t
  misc_difference 29071: note = a, c, g, or t
  misc_difference 29072: note = a, c, g, or t
  misc_difference 29073: note = a, c, g, or t
  misc_difference 29074: note = a, c, g, or t
  misc_difference 29075: note = a, c, g, or t
  misc_difference 29076: note = a, c, g, or t
  misc_difference 29077: note = a, c, g, or t
  misc_difference 29078: note = a, c, g, or t
  misc_difference 29079: note = a, c, g, or t
  misc_difference 29080: note = a, c, g, or t
  misc_difference 29081: note = a, c, g, or t
  misc_difference 29082: note = a, c, g, or t
  misc_difference 29083: note = a, c, g, or t
  misc_difference 29084: note = a, c, g, or t
  misc_difference 29085: note = a, c, g, or t
  misc_difference 29086: note = a, c, g, or t
  misc_difference 29087: note = a, c, g, or t
  misc_difference 29088: note = a, c, g, or t
  misc_difference 29089: note = a, c, g, or t
  misc_difference 29090: note = a, c, g, or t
  misc_difference 29091: note = a, c, g, or t
  misc_difference 29092: note = a, c, g, or t
  misc_difference 29093: note = a, c, g, or t
  misc_difference 29094: note = a, c, g, or t
  misc_difference 29095: note = a, c, g, or t
  misc_difference 29096: note = a, c, g, or t
  misc_difference 29097: note = a, c, g, or t
  misc_difference 29098: note = a, c, g, or t
  misc_difference 29099: note = a, c, g, or t
  misc_difference 29100: note = a, c, g, or t
  misc_difference 29101: note = a, c, g, or t
  misc_difference 29102: note = a, c, g, or t
  misc_difference 29103: note = a, c, g, or t
  misc_difference 29104: note = a, c, g, or t
  misc_difference 29105: note = a, c, g, or t
  misc_difference 29106: note = a, c, g, or t
  misc_difference 29107: note = a, c, g, or t
  misc_difference 29108: note = a, c, g, or t
  misc_difference 29109: note = a, c, g, or t
  misc_difference 29110: note = a, c, g, or t
  misc_difference 29111: note = a, c, g, or t
  misc_difference 29112: note = a, c, g, or t
  misc_difference 29113: note = a, c, g, or t
  misc_difference 29114: note = a, c, g, or t
  misc_difference 29115: note = a, c, g, or t
  misc_difference 29116: note = a, c, g, or t
  misc_difference 29117: note = a, c, g, or t
  misc_difference 29118: note = a, c, g, or t
  misc_difference 29119: note = a, c, g, or t
  misc_difference 29120: note = a, c, g, or t
  misc_difference 29121: note = a, c, g, or t
  misc_difference 29122: note = a, c, g, or t
  misc_difference 29123: note = a, c, g, or t
  misc_difference 29124: note = a, c, g, or t
  misc_difference 29125: note = a, c, g, or t
  misc_difference 29126: note = a, c, g, or t
  misc_difference 29127: note = a, c, g, or t
  misc_difference 29128: note = a, c, g, or t
  misc_difference 29129: note = a, c, g, or t
  misc_difference 29130: note = a, c, g, or t
  misc_difference 29131: note = a, c, g, or t
  misc_difference 29132: note = a, c, g, or t
  misc_difference 29133: note = a, c, g, or t
  misc_difference 29134: note = a, c, g, or t
  misc_difference 29135: note = a, c, g, or t
tcaattggacattttctcttctctaaagtattaccttcttcaaatacggcaacctttagatcaggagctttcttcataagctcataagcagagaatattccgcccggaccagcacctataattattacatcatatttcataaaatattcaccccacaatcgttaatcgtcctaagtattatattataaaagcaggattattaacaagcaaaacaattaagatatgaatattaaccttgaaagtgttgtaaatacaacatattaatgcggaatgaagatgttacaatccagacatactaataatccacatacagataagtgtaattgtggtcttacaagatatacaggtaagagtgactgtaagcttacaagataataaagcagattataatatgatgcacatataagcataacagccagcttatatataaagctgataaattaccagcagatagattgaaaaatataataaaaataatggaggaattatatgaacaggacagaacagattaaaggctatcttaaaagacttggtgatggtgaaagtcttgagaatgttaagaaagattttgttaaggaattcaatgatgtcaatccaatagagattatggaagcggagcaggcgttgatagcagagggaacacctatatcagaggtttcaaagctgtgtgatgttcactcagcattatttcacggtgcgactaaggaagaaagaatagccaaggcggaaaatgaaatatcagagatgaaaaagtactatgatgacacaatgaaaggtatgactaagagtgccattgcagatatgcgtaaagacagagaaagcatttttaataaactggctatgataagcggccacccattaaatacttttgtgaaagaaaataaggcaatccagcaggttattgatgatattaaagaaaatattacaagcggacatattgatataaaggcactgaaagagaagatatataagctcagggagttatcaattcattatgccaagaaaggggatttgttatatccggtgcttaatgtacgatataaaatcagcggaccttcggcggttatgtggacagttgatgatgagataagagatgagctgtcagacatagcaaagcagttaaattacgtggacggtaataacagtagcaaagcagacaataataacagtgcggataacaataatggtaaaagtctggacggtaaattaattgaaagaatagaaaatgttataaagagggcagaggagatgatatataaggaagataatatattatatcctaactgtgccgctaattttacggaagctgagtggattggaatatatcacgattccaaagattatgccgtgtgccttgatacagtatcagacagatgggagaaagcagaagaagtagaaaatgtgtataaacctgaagtgtcagaacaatctgataagaaagaagatgttcagaatgagttatatatggcaggcggacatatgacactttcgcagcttgaggcactgcttaatgcaattccaatggagataacatttgttgatgaagataatatcaacagatattttaatgaagggtcaaaggtatttaaaagacctgttatggcaattgacagggaggtattctcgtgccacccaccaaagattgaggcaaaggtcagaagaattatagaagaattcaggataggaacacttgatgaagtacctgtctggatggataaacaaggaaggactatgcttgttaaatatattgcggtaagggacaagcagggaaattatgttggaactcttgaggcagttcaggatatggaatttgctaaagaacattttgcaaagcttaaataaacgtgtatacaaggtttctctttaaatatagccgataaggacattgacatttctttcacataaaaatataatataatattgtctgaatggaattgattcagcattaagtatattgatatggtagaattatgaagaataacaataatgaactcattgattatatgattaatgattttaaaagtggaattaagcacggagtgcttgttgccaatctgacatatgagcttgcacagatgtgtggtttgtctaaagatgaggcatacgaattaaagattgctgcgatggttcacgatgttggaaagttaaagctttcagaatatctgtatggaagaaccgatgaggcacttccggaagatgagaagcagtatatgagtatgcactcaaagataagctatgatctattgaaaaaatacgattattcagataatataatggatgtcgttctttcacatcatgaatgttttgatggaagcggatatcccaatgggcttgttggtgagcagataccattaggagcaagaatattaaaggttgcagatgaatttgcggcacttatatcagacagaccatataggaaagcatttgatatagacactgctgttacaattatgatagatgagattaagaatatggatatcagagtattccttttattccagaggcttattcacgaagattcgactatagaattgattaataatagcagattagatattgatgatttggatataagtgatatactaaaaatcagtcaggattaggagtaacctaattatgccttagggcaaataaaacaggctgttaatacagctaagaagaatgaggtaattaactatggcagagtcaatggttggcttaaagagaacacacagatgcacagaagtttcaagtgcagatattggcagtacagttacagttatgggctgggttgctaaaagacgtaatcttggttcacttatatttgtggatttaagagacagaagcggtcttttacagattctttttgatgagaatattatcggcaaagaaggatttgacaaggcatatacattaagaaatgaattcgtaatagctgtagtaggtaaggttattaagagaagtggagcagttaatgacaatcttaagaccggtgatattgagattgcggctgaatcattaagaatactttctgagtcagagacacctccatttccaattgaggataatattaatactaaagaagatataagacttaaatatagatgccttgatcttagacgtcctgatattcagtctaatatcattatgagaagcaaggttgccactcttacaagagcatttcttgctaatgaaggtttccttgaaatagagacacctatgcttactaagtcaactccggaaggagcaagagattatcttgtgccaagcagggttcatccaggaaaattctatgcacttccacagtcaccacagctctttaagcagatgcttatgtgctctggatatgacagatatatgcagattgcaagatgtttcagagatgaagatttaagagctgacagacagccggaattcactcagatagatatggaattgtcatttgttgacgttgatgatgtaattgatgttaatgaaagacttttagcatatcttttcaaagaggtattagatattgatgtacagcttccaatccagcgtatgacatggcaggaagctatggatagatttggttctgataagccagatttaagatttggtatggaacttaagaatgttacagacatagtaaagaactgtggtttcggcgtatttacaggggctatcgagaatggtggaactgtaagaggtattaatgccaatggacagggaagtatgcctcgtaagaagattgatgcacttgtcgactttgcaaagggatatggtgcaaagggtcttgcttatatagctattcacgaagatggttcacttaagtcttcattctctaagtttatgactgaggatgagatgaacgcacttgttgaggctatggaaggtaagccgggtgaccttcttttatttgctgctgaccgcaataagattgtatggaatgtacttggagcattaagagttgaacttgctggacagatgggacttcttgataagaatgattataagttcctctgggtaacagaattcccacagtttgagtggtcagatgaagaagagagattcgtagctatgcatcatccatttactatgcctatggatgaggatcttgataagcttgagtcagacccaggttcagtacgtgccaaggcttatgatattgtacttaacggtacagagataggtggtggttcagtaagaatccatcaggctgatgtacagtcaagaatgtttaaggcacttggtcttacagatgaagttgctaatgagaagtttggtttcttacttgatgcgttcaagtacggagtaccaccacacgctggtcttgcatatggtcttgacagacttgttatgcttatggctaagagagattcaataagagatgttattgcatttcctaaggtaaaggatgcttcctgccttcttactaatgcaccagatgtagtagatgcaaaacagcttgaagacttatctatcagaattacagagtcagaacaggaataatattttaagagcatttgaaagtatttaatggatattttcaaatgctttttttaactatatttttagacaatactttgtgaaatctggatgaaaataatggctttatcagcttttttttagcaaaaatattgcatttgaataatcatgggtatatactttttttataaatctttgcaaaactataacaaaagactggagaaaaattatgacagagaatcagtatataagggcaaacaggactgttttatttacagttctcatagtatttggttatattgcgctgaccctgatggcagcattaggagtgggtgacggacataacaaaggaaagattttaatacagtttgttgtggcacttgctgtaattattgtatcagtagctgcttatattttaaggaagaagaccagagtgtgtgaattaacgattgcggtatcaatggcatttggatatgttgttcttatactgcttaattcaactgatggtgtatggacatatgtacttcctttgattatggcttcgatggtatatcttaatgaaaaactaatactgtgggctgatggcgttgcgatagctggtaatgtcataagacttattatggattataatatgtataatggagtggctatggcaagcagggttcttgctatattagtattggttattgttacatgtatatctcttagtgtaacaaagctgcttaagcagttttttgcagagaatatgaataagatagaggcagcagcagttatacagaaagagaataacgagaagatggttgctgtagctgataatataaccagacatttcggacaggctatggatatgcttgatgagttagaaaagagcatagatataaaccacaattcaatgaaagatatagcagaaagcacagaaagcacagcagaagctatacaaagacaggccactatgtgtgcagagattcaagaaaacactgatattgctgaaaaagagataagcgagatggttgaggcttcacacagaacagatgagactgttaatgatagtaaggctatagtagttgaacttaaggaacaggcacagaatgtacatgatgcaagcaatataatcgtagatgtgattaacagtcttacagaaaaggttgatgatgtacagggatttattggttctatcgtagagatttcaagccagactaaccttcttgcattaaatgcttcaatagaagcagcaagagcaggagaagccggaaagggtttcgcagtagtagccgaagagataagacagctctcagaacagactaagaatgcatcttcaagcataacagatataatcaataatctttatgaagatacgaagaaagctaatgagagcataaaagcgtcagttgagtcagttaataagcagaatgaacttattgataatacaagagtgacttttgaggacgtaggaaaaacagttgataatcttatgaacaatatagattctgcagagcagagcattaacaagatactggattcaacttctgttatttctgataatatttcacatttatcagcaacaggagaagaggtagcagctgcttcaactgaaggcctaaaagtatctgacacaacagttgaaagtatgaagaactgtaagaatatattacataacatatatcttcttgcagaggatttaaagagttcagtagataactaaatggattgtaagagattaagcagattacaatgtattgcaagactagcagttgattattataagttgtaattaataatataatcaggatggttttgcagggttattaatatttataagacaacagtatgtttattataaggagtgcaaatgacattttatgtctgcattatttataaaagacagctgttgtttttttatgtaatagggaatttcgatagaatttcctatacataaaaggtgctatgtgccgatgatgcacacttgcacgaagatgtaggttgtcgcaagcgacagtgcttagtgtgagaaggtgcttcatatattttatttatataggaatattttatgcttgacttgaagttaactctaaatgctattatcaaaatgtagagttaataatcaggtttaattaataattatatgaggtgattaattatgagaagaaataatattagaaaaacagaggcacttataatggcatttgcattatcagcaagcctgttgttaacaggttgtggcaatagtactggtagtaagaatacagcttctaataatgcaagcattgtaagcagtagtaacagcgtagacaataataatggcagtagtggtaaccaaaatactaatggtgacagtgttaatgaaaataatagtacaacagacgaagctggaattaatcacgattatccggtaatgttgttctcttatgataagaatgatactaattatgaagaaccagaagcgtttaattcagaacatcttggcggcaattatggtgagattgagaagatagaatattattctccaactactaatgctacaagaaatgccaatgtgtatcttccatatggatatgataagagtaaaagctatcctgtagtatatcttcttcacggaatgagtggaacatatgaagattacagggttcttggtgcaagaccaacagcacagaatattgtgtatgaatacaaccgcaacgatatgatattagtaagctttactgtatttacggatgttaacggaaagcaggaatctgattatggattttcggatttaactgcaagatatgatgcctgtgaaaatgatgtgattaatgctcttattccatatattaattcgcattattcaactaagataggcagggaatacacaggaattgcgggatattcattaggtggacgggaagctctttatttatgctttgcacaccctgatatatttgggtatgtaggtgcatttgagcctgttggaggagttgttaatacaggaagcggtgaaacattatatggcaacaggggatatcttcttcctgagcttgttaaggaaagcggggaagcaccacttcttacacttatagtaacaggtgatgaagatccatattgcagggtatcatcagagaattattcaagatatatgacagaacattcaattgaccatatattctattacagacacggcggacacgaggcaggtgtatggaataatggcttatataactttctaaggcggatattctaatgaagattgtattaaataacttaattattgtacaaatgtataattatacattgacttattgctaaataatctataaaattaatagctatacaggttgtataactacaactatagaaaatggaggttgtaatatgtattcatttgatgaagtattgaactatgatccagaattagctaaagctatggatgatgagttagcaagacagagaagccatattgaattaatagcttctgagaaccttgtaagtaaagctgttatggcagctatgggaagccctcttactaacaagtatgcagaaggatatcctggaaagagatattatggtggctgcgaatatgtagatgttgttgaaacacttgcaattgagagagctaagaagttatttggttgtgaatatgccaatgttcagccacattcaggtgcacaggctaacttagcagcattctttgctatggtagaaccaggtgacactgttatgggtatgagccttgactgtggtggacacctttcacatggttcaccagttaatatctctggtaaatattttaatatagttccttatggtgttacagccgaaggttttatagattatgatgaagtattaagaatagctaaggaatgtaagcctaagatgattattgctggtgcatctgcatatgcaagagtcatcgacttcaagaagttcagagagatagctgacgaagttggtgcttatcttatggtagatatggctcatatcgctggtcttgtagcgggtggagaacatccaagcccaattccttatgctgatgtagttacaactacaacacataagacattaagaggaccaagaggtggtatgattctttcatcagcagaagctgctgagaagttcaagtttaacaagtctgtattcccaggaattcagggtggtccacttatgcacgttattgctggtaaggcagtatgcttaaaggaagcccttgacccaagctttaagacttatgctaagaatattgttgacaatgcacaggctctttgctcaggtcttatgaacagaggatttgatatcgtatctggtggtacagataatcaccttatgcttgttaatcttttaagcaagaataagactggtaaggaagtagaaaagcttcttgatgcagctaacattacttgtaacaagaatactattcctaacgatccagcttcacctttcgtaacaagtggtatcagacttggtacagccgcagttacaaccagaggcttcaatacagaagatatggatgtagtagcagaagctattgcattacttgttgatgatgttgatgctaatcaggctaaggctatggcaatggttaaggagcttacagataagtatcctctttacgaataatgctggaatatataagaaatgaacttctggggatgactgataaaggagaatatgcagcatttacatcctcacttattcctggctgcgataatataataggaataagacaaccggtattaaagcaatatgcaaaacagctgataaaggagaataaggatttccggcagctgcttagtgaaccggatatttatcaggaagaaacactgcttagaagctacataataggaatgggaacagcgaaggagaaagactttaagaaggctttaaaagacttcaacacattcgttcctcttgtgaacaactgggctgtaaacgacagcttctgtgtagaattcagggttatggatatgtttcgggacgagtttctgccatacataaaggaatgtatagaatcgtttgatgaatacagggcaagagtagggcttataatgctgttagaccactatttaaaggttgatatgcatggcatgaaaagaccgagaatgaaaaaggttactattaaagatatagaaagcacagatgaaataaattgtgctaatggtttatatcttgatgatatattttcacttgtaaacagggatttttcggcctatggatattatacacagatggcagcaggctggcttcttgcggaatgttttgttacatttccaaaaagaacgtgggaatatcttacagataccgactgcttaaagttagataagttgtcatatcagaaggcggtacgaaagatatgtgaatcgctcacgccggataaagaagttaaactaaaagttaaaaaggatctgaagcagatgtaataatctgtttcaggtctttttttattgctttagtatattttaataatttgaatatcaaaataaccttgacaaacacataagttttgtagtataaaaataatgtttgaaaatcaaagtaagataatcaaattgttagtaagtcaaataaataaggacaaaaaagtatgataagaacaagaatcataggaacaggaagctatgttccaccagatatattgactaacgataatctgtcagaaatggtagatacgagtgatgagtggataaggacaagaactggtatatgtaacagacatatagcaaaagatatggataatgctgatatggcatataacgctgcaagaaatgcagtagaggatgcacgtattgaagcttctaagattggtctgattatagttgcaacgtcaactcctgattatgcttttcctaatcaggcatcacttgtacaggcaaagcttaaagcagtaaatgctatgtgttttgatgtaagtgcagcatgttcaggttttattacagccctggatattgcagcttcaatgttaaaggcaggttcgtataaatatgcacttgttattggttcagaaaaaatgtcagaaatagttaactggaaagacagaagtgtgtgtgtgctttttggagatggtgctggtgcagtggttcttaaagcagttgataacaacacagaagatgttacaggtgccttagttggtcatgaaagaggaattattgacagcaatatctacaatgatggaacaggtgcatctgttttaacaggtggcagaagattttctgattcatgcagcacagatatatttatacatatggatggacaggaagtgtttaaattcgccgtaaagagtgttcctacagctatagaaacacttttacataataataatatggatattaatgaagttgataagttcatattgcatcaggctaatgtacgtattatagagagtgtagctaaaagacttaaggctgataaagataagtttccagtcaatctgaatgaatatggaaatacatcatcagcaagcattcctattctgcttgatgagttaaacaggaatggaagcttaaaacagggagagaagcttgtacttgccggttttggtgcaggattaagctggggaagtattctgcttgtatggtagcacggttaaagatgctaagcttattatatagatatttgcagactgcttactaaaagatatcaggcagccggataagcggcattttaacatatataagatgtttatggcaaaagctttgccatagatatcaaagttgtgggcttttgaccccgacaacatataataaaaaataataagaattaaggagatttaacattatgtttgaaaaagtaagagaattagttgcagcacagttaggtatagatgaggcagttattaagcctgagtctaatttcaaggaagatcttaaggcagattcacttgatctttttgaacttgttatgtcacttgaggatgagtgttcagtaactattccatctgaggagcttgaaaagattcttacagtacaggatgttgttgattatatcgaggctaaccagaaatagttataaatgtcaggaaggaagataagttatgaaaactcgtgtaacagagcttcttaatatagaatatcctgttatacagggcggtatggcatgggttgcagatgctaatctggcagcccacgtcagcaaagccggtggaatgggatttattggagcagctaatgcgccggcagaatgggttaaagaacagatacatattgcaagaaagataacagataagccagttggtgttaatattatgcttttaagtgattatgcagatgagatagcacagcttgttattgatgagcatatagaagcagtaacaacaggtgcaggcaatccaagcaaatatatgaaggcctggaaggaagctggaataagggttattcctgttgtggcatcagttgcacttgcaagaatgatggaacgtgccggagcagatgcagttgtagcagagggcatggaatcaggtggacatatcggcgaggaaacgaccatgacacttgtaccacaggttgttgatgcagttaatattcctgttatagcagctggcggaataggtgatggcagaggtgtatgtgcggcatttatgcttggtgcagaggctgtacagatgggaacaagattcgttgtggctaaggagtcaaatgtccatcagaattataaggacagagttatagctgccaaggatatagattcagtagtaactggcagaagtacaggtcatccagtaaggtcacttagaaacagcatgacaagagagtatcttgatatggaaaaagaaggcgttgagtttgaaaagcttgaaagacttactcttggaacattaagaaaggctgttgtggatggtgatgtcaagcagggaactgtaatggcaggtcagatagcaggtcttgtcaataaggaacagacatgtgaagagattattaaggagcttatgaaggaagtctctgaggtatataattcacataataagctggcataaaaacagtgtatggaaatgaggatttaaaaggtatgggaaaaacagttgtaatgtttccaggacagggaagccagcgtactggaatgggaagagaaagctataatagctgcacttcatcagtaaagtgctttaagaaggctggtgaactgacaggtatcaatatggagcatttaatatttgaagaaaatgatcttcttgataaaaccgagtatacacagattgcgttatatgtaacagaaatcgcccagcttgctgatatggttgagcagggccttacgtatgatgcagctattggactttcattaggtgaatatagtgcacttactgcaagtggtgcgctatcttatgaagatggtgtaagacttgtaagaaaccgtggaatatatatggaacaggaggttccggctggtataggcgccatggctgcagttatcgggcttacatcagatgaggttgacagtgtacttgctaaatataacaaggataaaagtgggaacacagagtctgataatgatatgtatcctgatacagtttccgcagctaattacaactgccctggccagatagtaatatcaggtaaaaaggaatgtgtacaggaggctatggaagtgcttaaggaagcaggagcaagaagaacactccttcttaatgtaagtggaccgtttcattcaaagcttcttaagggcgcaggtgataagcttatgaaggatcttgaaaaagttacttttgataaagtgaagtatccttatgtggcaaactgtacagctgagtatgtggatgagaatacatccagtggatatataaaagaacttctttcaaagcaggtatatagttcagtacgttttgaacagtcagtcagaaaaatgatagccgatggttatgatacatttgttgaggtgggactaggaaagactttatctggctttgttaaaaagatagctaagagcatggaaaaggaagtagttataaaataacaggcaataaatgcagacaagatattggtaaggctttagcaatattgtatcgatgaaaggcagtgtgttatgtgtatggataattgtataaaaagatatgaaaacaagatagtgcttgtaaccggagctagcagaggaataggagctgctatagctgcccgttttgccaaagagggggctgtggttattgttaattacagtggtaatgatgaggcagcagatagaacagttgaaaatattctggctgccaacggaaaggcagaaaaatacaagtgtcaggttgattcgtatgaagaaactgaaaaaatgattacatatataatggataaatataagagaatagacattcttataaataatgcaggtataacaaaagatggtcttatcatgagaatgaaagaggaagattttgacagagttatagatgttaatcttaagggaacatttaactgcataagacacgtaagcagatacatgttaaagcaaagaagcggaagaataatcaatatgtcatcagttgtaggcatagctggtaatgcaggacaggttaattacagtgcttctaaagcaggtgtgataggtattaccaaatctgcggcaaaggagcttgcatcgcgaggaataactgttaatgcagttgcacctggatatattgatacagatatgacaaaggttttatctgatgaacagaagaagtcagtacttgatatgattcctctttcaagaatgggaagcgtggatgatataagcaatgctgtagcatttctggcatcagatgaagcagcatacataacaggacaggtgatatcagtagatggaggtatgaatatctgatgagaagagtagttgttacaggtatgggtgcaataacacctataggtttaagtgtggatgaattctggaattctgttaaagagaatacagttggaatagataatataacaagatttgatacaacagattataaggttaagcttgcagcagaggtaaaggattttgatgctaagaattatatggatttcaaggcagccaaaaggatggaaaagttcagccagtatgctgttgcggccgcgcatgaggctatgaaggattcggggcttgatatggctaaagaggatgctttccgtgttggtgtatcagtaggctctggtgttggaagccttgaagctatggaaagcaatcacaagaagcttcttgaaaagggtccatctaggattaatccgcttcttgtacctcttatgataactaacatggcagctggcaatgtatcaatacagctaggtttaaagggtaagaatataaatgttgttacagcatgtgctactggaactaactctataggtgaaggctatagaagcatacagcatggagaagcagatgttatgtttgcaggtggaactgaaagttctatatctcctattggaatcggtggttttgctgcgcttacagcactttcaacatctacagaccctaagagagcctctatcccatttgacaaagaaagaaatggctttgtcatgggtgaaggagcaggtgtggttgtacttgaagaactggagcatgctttaaagagaggagcgcatatatatgcagagatcacaggctatggctgttcttctgatgcataccatataacatcacctatggaggatggaagtggagctgcatatgctatgacaagtgccatgaaggaagcagaagtaaaaccagatgatatcgattatataaatgcacatggaacaagtacccatcataatgatctttttgagacaagggcgatcaagctggcacttaaggatgcagcttacaatgtgcctgtaagttcaacaaaatccatggttggacatctgcttggtgcagcgggcgcagttgagttcatagcctgtgtcaagtcaatccaggatggttatatacatccaaatgtaggactatcagaaacagaggaagaaatggatcttaattatgtcaaggatgaaggaatcgaaaaggacgttgatgtagtcatgacgaattctcttggttttggtggacataatgcaactcttatagtaagaaagtattcataatatgatgaacgcttaaagtacataagtagattgctggtgagatatatggaataccagaatatgaataaaaggtcatgaagaaatggagataatatatggaattagaaaatgtaataaagctcattaatgctgtatcagaatcttcacttacaagctttagcatggaagatggcgacactaagctttcgcttggcgctgacagaagtgacagggcagctgttaaagaaactgccggtgctgatgatatagttaatagcgataacggcaatgaatcaggattgaataaatcggacattaaaacttctgatgataatgtgcttactgttaattcaccacttgtaggtgtattttacagttcagcatctccggaagctgatgcatatgtagcaataggtgacagggttaaaaaaggtcaggtaatcggtatagtagaagcaatgaagcttatgaatgagattgaaagtgattatgatggtgtggttactgatattcttgtagataatgaacagatggttgaatatggacagcctatgtttgttataaaaccagtctgacaatacgtcggtatcaaaggcatgggtttttgataccgacattatatatatgaaattcgattatttaatataaggagttaagtatgcttacaacaaaggaaataatggatattataccacacagacatccttttctgcttgtggatacgatagatgaacttgagcctggaataaaggcaacaggatataagtgtattacatatgatgagccttattttgcaggacattttccagctgagcctgttatgccgggggtccttcagatagaggcatgcgcacaggtaggcgctgttgcgatactttcgctggaagaaaacaaaggtaaaacagcatattttggtgcagttaataatgcaagatttaaaagaaaagtagttcctggtgataaacttaagatggaatgtgagattataaagaaaaaaggaccagttggcgtgggaaaggctgttgcgacggtagatggcgaggttgcacttacagcagagcttacatttatggtaggttaatccgtctgatgttataaatataatatgtggattatggaatgattataaggagatgaagctgtgtttaataagatattgatagcgaacagaggcgaaatagctgttagaataataagagcctgtagggaaatgggtatacagacagttgcagtatattctgaggcggataaggaagcacttcatacgcagctggctgatgagagtgtatgtataggaaaggcagcagctaaggatagttaccttaatatggaaagaatattgagtgcaacagtagctacacatgcagatgcaatacatccaggctttggatttctttctgaaaacagtaagtttgcatcattatgtgaaaaatgtaacatcacatttataggtccagattcagatatcatagagaaaacaggtaataaacaggaagcaagaaatacaatgatatcagcaggtattccagttattccaggaaccaaagaaccagttatggatgcagaaagaggaaaagagcttgcagacaatataggttatcctgttatggttaaagctgcacttggcggcggtggcaaggggatgcgtgttgtatatacaaaagaagattttaaaagggaattcgataacgcacagagagaagctgtgaatggctttgctgatggcacaatgtatatagaaaaatatatagaaaagccaagacatatagagttccagatattagctgataaatatggaaatacaattcatcttggtgaaagagattgttcaatacaaagaaatcaccagaagttagttgaggaatcaccctctcctgcgttgaatgatgaattaagaaagagaatgggagatactgcagtggcagtggctaaggcagttaactatgaaaatgcaggaacagttgagtttcttcttgacaaaaacgacaattattactttatggaggtaaatacccgtattcaggtcgagcatggtataacggaacttgtgacaggtgttgatcttataaaggaacagataaagatagcagccggcgaaagtcttggtattaagcaggaggatgtaaggatacatggtgctgccatggaaataagaatcaatgctgaaaaccctgaaaagaactttgcacctaatccgggaacaataaagaatatacatataccaggtggtaatggtgtaagaatagatactgcagtttatagtggatatacgatacctcctttttatgattccatgataatgaaggttatgacatatgcaaacgacaggaaaacagtgattgagaagatgagaagtgtccttggcgagattattattgaaggtgtcacaacaaatacagattttatgtatgatatatgccagaatgagaagtttattaaaggtgatgtcagtacagatttcataccagaggagtatccacaggtatgtaaaaaatagttgttcgttatgcacagtaagagtgcgtggaaatgaggatttatatgcagataaaaggcttgtttaaaaagaatatccataaaaataaaatcaacaatctggatagcagtaatataaatgttccagatggattatatacgaaatgtccggtttgttcaaaaataattttaacagaggacatgtatctgaataattgtgtatgtccggaatgtggatattatatgaagctggatgccagaacaaggatatccatggtagtggataagaatacattttcagaatgggatactaacattgaagagagcaatccatgtgaatacccaggttatgaggagaaaatccagaatcttaaaagaaaaacaaatcttgatgaggcagtaataaccggtgttggaaagatagatggcagcaaagctgttataggtgtctgtgatacaagatttcttatgggcagcatgggcgaagttgtaggtgaaaagcttacacgggcagttgagaaggctacagagcagaagctgccggttattatatttacatgctcaggcggagccaggatgcaggagggaatagtatctcttatgcagatggcaaagataagtgccgcattaaaaaaacatgatgaggcaggacttttatatatcactgttcttactgaccctacaactggaggtgtaactgcaagctttgctatgcttggagatattatacttgcagagccaggtgcccttataggttttgcaggaccaagagttatcagacagactataggacaggaactgccagaagggtttcagagagctgaatttctgttagagcacggctttgtggatgcgatagttaaaagggatgagctaaagaagacacttgcgcatctgcttgacatacataagtacagtggagcttatacagaagttaaagaaaatgtggatacataccggagcaattcagatattatgaagaagtatcttgagtatcttgataatatatatttcaaaaagatagatagagaagaagaaaaaaaggctgaggctgataataatctgtataatgagtatgatgtatgggaaaaggttgaaatagcaagaagcagtgaaagacctaatgccgcagattacatagaaaaaataactaaagatttttttgaacttcatggtgacagaaacttttgtgatgataaagcaataataggtggaatcgcaacatttggcggcattcctgtaacagtcataggacatatgaagggtaagactactaaagagaatatatcaagaaactttggaatgcctaatcccgaagggtatagaaaggcactaaggcttatgaagcaggctgaaaaatttaacagaccggttatatgttttatagacactccaggagcatattgcggtcttggtgcagaagagcgaggccagggagaagctatagcaaagaatctgtatgaaatgagcagtcttacagttccggtattgtcaatagtaactggcgaaggtggaagcggtggtgcacttgcactaggtgttgccaatgaggtatggatgatggagaattccatatattcaatactttcaccagaaggctttgcatcgatactgtggaaggattctaagaaagcaaaagaggctgcggaaataatgaagctgacggcagcagatttatatgagcttggcataatagagaaggtcattccggaatatccggttataaatgaaaataatataaaaagagtgatattatatatgaaacgcatgatatgtgattttatgtacagatatattgatatggacaaggaagaacttgcaagacagcggtataacagattcaggaaaatgtaagaaagcactaaatctattacatttttttatggttgtattaatataattgtgttaatatgattatgttaatgtgattgttttaatgtgattgcgtaggaagattacggaattgttatatctaaacagaaagaaggaatatatatgtcatatggatacagacaatacagggatactgctcatagatggacacagataggtgttggtttaatatctgtaatagcaggtcttatacttattgtatgtgtaacggcacctatgtatgtctcaagcatgttaaaggatgcaggactgtcagctgctatatcgcaccgttttatggatactgtttttgattcacttggggataatatggaggcgttatccagaattcagacaagtatagaggattctaagatagtagacagaatagcacagaaatatacaacggctatggttgacgggatgcttaaagaaaaatcctttgatgatatagagattaatatagatgcagagctggatgagcttatggatatgacatataacaaaatagcatctaatatcaatatgggaaatatacaggaaacaatagtcagggcagctcttagctatagtaaaaatgctgcaaatgaggctataaataattatgccagtggtatatatggtgatatatcttatcgtctgcagccgcttataaaggtatatggaataataacgtctgttgtgtttaagatattgatgcttttaatatatatcacattattgattgttatcattgcatttaatcctgtcagggttgtaaggtacacactcccatgtatatttgtcataacaggtggtatatatatttttattgcaaatataattggaaacagatgtatggcggctgtaagtaacagatatctaggaagaactgtgtttatagatactcagattgcttatagggttatgggtgttatgtgtatactggcagcagcttcttatgttattactttgatatatggaatggttgtgaaaaacaggagaaaaagaatatagaaatatctgagattaatgtttgataagagtttataagagcttataaaaactcataaaacattataaaagatgaaaaatggagctgctacatatatatgtggcagctcctgattttgttttataatacttgttatataatattttttaaagtattatttgttattcttcttttcgttctcaagcttcttcatagctcttaccttaagtgaaagaccaaagaggttgatgaaaccatcagcatcatggtggtcataaaggtctccagttgtgaatgaagcgatagattcgttatataatgaatatggagatgttgtaccagctttgataatgttgcccttgtaaagcttgaacttaacttcaccagttacgtattcctgtgtcttttcgacaaatgcctgaagtgcttcacgaagaggtgtttcccactttccttcgtatacaacctgagcgaacttgttagcaacattaatcttctctgctgttgtatccctgtcaagaactaattcttcaagctgctgatgagcttcgtaaagaatagttccaccaggtgtttcatatacaccacgtgacttcataccaacaacacggttctcaacgatatcaattataccaatgccgtgcttgccgccaagtctgttaagttctctgatgatatcagaaaccttcatcttcttgccgttaacagatgtaggaacacccttttcaaatgtcattgttacatattcgccttcatctggagcttcttctggtgtgcatccaagaacaagaaggtgcttatagttaggctcattagctggatcttcaagctcaagaccttcgtggcttatatgccagatgttacggtcacggctgtagcttgagtcagggctgaatggaaggtgaataccgtgctgtctgcaatattcgatttcatcttcacgagactgtaatgtccatcttgaatctctccaaggagcgataatctggatatctggagctaaagccttgattgtaagctcaaatctgatctggtcattacccttacctgtagcaccatggcagatagcaacagcaccttctttacgggcaatttcaacaagtcttttggcaatgataggtcttgccattgatgtaccaagtaaatatttattttcataaactgcgtgagcctgtacacatggaacgatgtagttatcgcagaattcatctgtgatgtcttcgatatataacttggcagctccacaagataaagctctttcttcaagtccgtctaattcctcttcctgaccgcaatctgcacatacacagataacatcatagtcgaaagtttcctttaaccaaggaatgattgctgtagtatcaagaccacctgaataagcaagaacaactttctctttcattattaatgtacctccatataattaagtaataggtttaattatgtaataaatattatgtagtaaataatgctattacaaagtgtaaaactctgctgattataataaactacttattatgaaaatgcaataggtaaaaatgtatattatgcaattttatgcaataatattgcataaatataaaaaataatgaataaacactttacatagaaaaaaaagttgttataatggaacttgtcatttttattgatgaataatatatgtacacgaatgaataaataaacattcagatggaggacgtatggttaaggttggaattatcggagctaccggatatgcaggtaacgaattagtaagacttcttcttggacataaggatgtagagattgtatggcttggttcacgaagctatatagatcagaaatattcagatgtatacagaaatatgtttaaacttgtagatgccagatgtatggatgataatatggaacagcttgcagatgaggttgatgtaatatttacggcaacaccacagggcttatgtgcatcacttgttaacgatgagattttatcaaaggtaaagataatagaccttagtgcagactttagattaaagaatgtagatatatatgagaaatggtataagcttgaacataagtcaccacaatatattgatgaagcagtctatggtttatgtgagattaacagggataaagtgaataataatacaagaattattgctaacccaggatgttacactacaacatcaattcttacattatatccacttgtaaaagaaggaattattaatccagatacaataatcattgatgctaagagcggaacaagcggtgcaggcaggggtgcaaaggttgctaatcttttctgtgaagttaatgagagtatgaaagcatatggtgttggtacacacagacacacaccagagatagaagaacagcttggatatgcttgtggaagagatgatttaaagcttatatttacaccacatttagttccaatgaacagaggaatacttgtgacagcatatgctaatcttgcaaaggatgtaacttatgaagatgttaaggcggcatatgataaatattatgataaggaatattttgtaagagttcttcctaaggatgtatgcccagagacaagatgggttgagggaagtaactttgtagatataggatttaagatagagccaagaactaacagaattattgctatgggtgcattagataaccttgttaagggtgcggctggtcaggcagtacagaatatgaatcttttattcggttttgaggagaatgaaggacttaagattgcacctatgttcccatagaattatataatacaggcggcactataaatattttattcatataagattaataagacgtgattattaatctggacaggaggaagttatgcagattatagaaggtggagttacagcggctaaaggatttaaggcagctggtatggcggcaggaattaagtataagaatggtaagaaagatatggcaatggttgtttcagacaagccttgcgtgacagcagggacatttactcttaacagagtatttgctgctcctgttaaatgggataagaatattgtatataatgaagcttttgcacaggcaattgtagtcaacagtggtgttgctaatgcctgtactggtgttgagggtgatgaagcctgtgcacttgaagctaagacagctggagaggcacttggaattccagctgatgcagtgcttcttggttcaacaggtgttattggaatgcagcttcctatggatagaatgtgtgcaggaattaaggcacttccggaacttcttgattatactaaagaggctggaacacttgccgcagaggcaattatgacaactgatactgtaagcaagcaggttgcctgcacagtaaatattgctggcaaagaagtaacggtaggcggtatgtgcaagggtgccggtatgattcatcctcatatggctacaatgctctgttttattacaactgatgcagttatagagaagaaagcacttcagaagatgacaagtgatattgttgaagattcatttaatatgatatctgttgacggagatacatcaactaatgatacagtgcttgttcttgctaatggcgaagcaggcaatgatactattaaggaaggcagcagtgattatgatacattttatgaggcattatcttatgtacttacagagctttctaagaaaatagcaggagatggtgaaggctgtacatgtctttttgaagttcaggttaagggagcttcaactaaggaacaggcaagaattcttgccaaatcaatagtgacttctaatcttacaaaggcggcaatatttggacacgatgctaactggggaagaattctttgtgctatgggttattcaggcgttgatttcgagccggagaaggttgatatattctttgaaagcaacgcaggaaagcttcagatagttaaagatggtactgcaacagattacagcgaagaaaaggcaactgaaattctttcacaaaatcctgtaaccgcaatagcagatattaagcagggtaacagtgaagctacagcgtggggctgtgaccttacatttgattacataaagattaatgctgattacagatcataatagttaagaataaaatggcattgtaatattgtcaggaatgaggataataaatgagtacaattaatatggaagaagagttaaagaaggcacaggtgcttgttgaagcactcccatatatacagaagttcaacagaaagattatagttgtaaaatatggtggaagtgcaatggttgatgaagaacttaaaagaaaagttattcaggacgtagtattattaaaggttgttggatttaagccaattattgtacacggcggcggcaaggaaatcagcaaatgggttgaaaagtctggaatgacaccggaatttaagaatggtttaagagttacagacgagccaactatggaaattgctgagatggttcttaacaaggttaataaaagccttgtatcgcttatagaggaacttggcgtaaaggcgtgtggtataagtggtaaagatggcggtatgctaaaggtggaaaagaagtattcaaagggtgaagatatcggatatgtaggtgaagtcaaggaagttgatacaacacttatacattctcttcttaaggacgattttcttccagtaatatgccctataggatatgatgacaatttccacgcttacaatattaatgctgatgatgcagcttgtgccattgcaagggcagttaatgcagagaagcttgcattcttaacagatattgaaggtgtatacaaggattataatgataaatcaagccttatctcagaactttcaacaactgaggcaaggcaattattagcaggtggtacaataggtggtggtatgttacctaagcttaataactgtattgatgcgattgaacacggtgtttcaagagtgcatatacttgacggtcgtattccacactgcctccttcttgaaatatttactaacaagggtgttggtacagctatattatcagaaggtgctgagaaattcttcgatactaatatataataacaggagtagttatgcagacagaacagattattaaaacagcagaagaaaagttaatacatacatataacagataccagattgtacttgataaaggtgatggtgtaagattatatgatacagacggaaaagaatatcttgattttggtgcaggtattgcggtatttgcattaggttataataacaaggaatataatgatgcgttaaaggcacagattgacaagcttatacatacatctaattatttctataatgagccagcggtaaatgctgctaaagcacttacaaaggcttctggaatggacagggtattctttactaacagtggtacagaatcaatagagggtgctataaagcttgcaaagaaatacgcttatttaaagacaggaagaacagattcagagattatagcaatgcatcattccttccatggcagaagtatgggagcattagctgtaacaggcaataagcattatcaggaagcgttcggacctatgattccgggaattaaatttgctaattataatgaccttgaaagtgttaaacagttggtaaatgataaaacttgtgctattatatttgaaacagtacagggtgagggaggaatatatcctgcaactaacgaattcatcaagggtgtaagacagctttgcgatgaaaagggtattcttcttatacttgatgaaatacagtgtggaatgggaagaacaggtacaatgtttgcattccagcagtatggagttgagcctgatattcttactgttgccaaggcacttggctgtggtgttcctgtaggtgcatttcttgccaaggaagaagttgccaaggcacttgtaccaggagatcacggtacaacttatggcggtaatccacttgcgtgtgcagcagcaacaaaagtatttgaattatttgagaaacagcatatattggataatgtcaaggaagtatcagcatatcttgaagaaaagcttgatgaacttgtagcagaatatgattttataattgagaggagaggacttggacttatgcagggacttgaactttcaatcaatcctaaagatgttattgctaatgcattagacaatggacttatactgttctcagccggaactaatgttatcagaatggtgccacctcttgttataactaaggcggacgtagatgaaatgataacaaagttaaagaaatcattttaataaaggttggatgaataatgaaagtaattaagaagcttgtgtcagttcttatggcaggtgttcttactttatctgtgatggcatgttcaggtacagataagaataagacagcaagggaacttgatatagagactcctgtaacagttaatgtctggtatgataataaggactatgacagctatcttgaaaatgtagcgaaagaatttaaagaggctaacaatctggttactgtcaatccggtatatgttgagtcatcagattttgttgatacaatttacaatgaaactgtaagaaatgataatgtgccagatgtgtatcttatgtcatcagagaattgcaataaggcatatcttttaggtcttatgcttgaaaatgattcttacaaggatgtatacaatgataaagtatatggacaggctgcccttatagcaagctcatataatgaaaagttatatggctatccggttacatttaatatgccggttatggtgtataacagtaagcttgcaggtgcagttgatacatttgatgagataaaagaatataatgataactacgaagttacagaagataataaaagtgttcagaggatatttaactttgatgcatcatcaatgtttcttaattatacatttacaggaagatacgttaatataggcggcaataatgctgaggattcaggagcatttgcaatagatgaggtgcattttaaaaaggctttaactgaatatgtgaagttaaaggacacttatgcgattgatagatataattcatcattgcagtcgtgtgtatcacagtttgcagagggaaagcttatatatacaatagttgatgccgacagcctttcaacaattgatgcttcaggtgttgaatatggaataattccagttccaaagcttgcagatgatttagagtcaaaggcaatgtcagttactacgatggcgatagtaaatccatacacatcaaatattgcggtatccaaggcagtagcaagggcaatatcatatgactatgcagaggatttggaaagtcttagcggacatatgagtgcaagggcagacataagccataaatcaaagacccagcagagcaattacaatacactgcacacaatatatgctaacagcatcgtaaaagccaaatatgtaggcgtaggcaacatatatacaaaatatgagattatgcttcaccagttatgggacggagtggattttaacagtgcatataatgagttttacaaagaaatctccaattatatgacactatcaaggcttaataattaaatatggaataatacattagtgtggataaaaatgtaatttactccaatatcagtgaataaaatcctgctatcagtaaatactttattaacaatagagattgttaaaggaggttgtctgatggcaggatttattgttgcaataatctcaggtgcgttaatgagcctgcaaggtgtacttaatacgaatgttacaaaagcgagcagtatatgggtggcggcaggcttcgtgcagtttacagcacttgcaacctgcattataatgtggctgtttaacggaagacctgatattagtggaatatttcaggtagagaataaaatatcattattaggcggtgtgataggagcattcataaccttcaccgtagtaaaaagtgtatccgacctaggtgtagccaaagccgaagtcacaatagtagtagcacaggtaatagtagcctatataatagaacttatgggcttatttggaagcaaaaaagccgacttctcgtggctcaaactcttagccctgataatagcaatgggcggagtatttatgttctacaatacagggaagaattaaagttgtaaaactgacagcgaggggatataatgtgcgtaagctacaagccgtgccagacagaaaacttaaaagctgctgtgcttgcacaaagctgcttttaaaatttctgtctgatagggcgacagcccgacagtccaagaaagccagagctttctaggacctgcacggcgaaaccagtgggaaatcaactaaaggcgatgtgcgaagcacgagccagcaaaaacaaatcataagcaggctaaggaaagcgatgtgcaaannnnnnnnnnnnnnnnnnnnnnnnnnnnnnnnnnnnnnnnnnnnnnnnnnnnnnnnnnnnnnnnnnnnnnnnnnnnnnnnnnnnnnnnnnnnnnnnnnnnaagcacgagccagcaaaaacaaatcataagcaggctaaggaaagcgatgtgcaaagcacgagccagcaaaaacaaatcataagcaggctaaggaaagcgatgtgcaaagcacgagccagcaaaaacaaatcataagcaggctaaggaaagcaaagtgcaaagcacgagccagcaaaaacaaaccataagcaggctaaggaaagcaaagtgccaaagcacgagccaaaagtaaaggcaatctgcggcagtacataataagccaaggcaaagtagaagcgaagtgcgaagcacaagcgcaatctatgccaccactgcatttcccaccccaccccaaataaaagagaggacctcaaccaatgaccaatttattcaaaataacaggcacagtaaccctgaaaaaaggcgccggccgtcaattaaaatccggcggtatgtgggtatacgacaacgaaatagacacattttccgaaaccgtagaagacggaggccttatcgaactccatgatttcgatgattactttatgggaataggcttcgtaaaccgccgttccaaaataacagtaagaatgttatcaagacacgagggagagattaacgaagaatttatcaaacagcgtgtaaaagatgctgtttcctacagaatggatactgtcgatacatcttcctgccggcttatattcggagaggcagattttcttccgggtatagtaatagacaagttctcagatgttcttgtagtagagtcacttgcacttggaattgacagatttaaacagcttattgtcgatgacctgaaagaaatacttaaagaatatggcatgccaataagaggcgtatatgaaagaagcgatgccaaagtaagacagcttgaaggaatggaaagagttaaaggctttatcggtgaagaattcgataccaaagttatgataactgaaaatggtgttaaatattatgtagatgttaaggacggtcagaagacaggctttttccttgaccagaaatataacaggagagctatcggcggcttatgcaagggtgcgaaggttcttgactgctttacacatacaggttcatttgcacttaatgcaggaatatcgggagcttcaagcgtattaggagtagatgcatctgaacttgctgttaatcaggcgacagaaaatgccaagcttaacggacttgaggatattgtccgattcaaatgtgcagatgtgtttgacctgcttccacagcttgaaaagagtggcgagaagtttgatgttgtgattcttgatccaccagcatttaccaagtcaagaaattccattaaaaatgcagttaagggatacagagagattaatcttagggggatgaagcttgtcaaagacggcggataccttgcaacctgctcttgttcacattttatggatccggaattgttcactaagacaattggcgaagcggcaagaaatgtacataaaagactaagacagatagaatacaggacccagtcacctgaccacccaattctgtggtcagccgatgagtccttataccttaaattctatatttttcaggttgttgacgaaaagtaa

SEQ ID NO: 557 - DNA, 37498 bp, unidentified
  source 1..37498: mol_type = unassigned DNA
  misc_difference 21249: note = a, c, g, or t
  misc_difference 21250: note = a, c, g, or t
  misc_difference 21251: note = a, c, g, or t
  misc_difference 21252: note = a, c, g, or t
  misc_difference 21253: note = a, c, g, or t
  misc_difference 21254: note = a, c, g, or t
  misc_difference 21255: note = a, c, g, or t
  misc_difference 21256: note = a, c, g, or t
  misc_difference 21257: note = a, c, g, or t
  misc_difference 21258: note = a, c, g, or t
  misc_difference 21259: note = a, c, g, or t
  misc_difference 21260: note = a, c, g, or t
  misc_difference 21261: note = a, c, g, or t
  misc_difference 21262: note = a, c, g, or t
  misc_difference 21263: note = a, c, g, or t
  misc_difference 21264: note = a, c, g, or t
  misc_difference 21265: note = a, c, g, or t
  misc_difference 21266: note = a, c, g, or t
  misc_difference 21267: note = a, c, g, or t
  misc_difference 21268: note = a, c, g, or t
  misc_difference 21269: note = a, c, g, or t
  misc_difference 21270: note = a, c, g, or t
  misc_difference 21271: note = a, c, g, or t
  misc_difference 21272: note = a, c, g, or t
  misc_difference 21273: note = a, c, g, or t
  misc_difference 21274: note = a, c, g, or t
  misc_difference 21275: note = a, c, g, or t
  misc_difference 21276: note = a, c, g, or t
  misc_difference 21277: note = a, c, g, or t
  misc_difference 21278: note = a, c, g, or t
  misc_difference 21279: note = a, c, g, or t
  misc_difference 21280: note = a, c, g, or t
  misc_difference 21281: note = a, c, g, or t
  misc_difference 21282: note = a, c, g, or t
  misc_difference 21283: note = a, c, g, or t
  misc_difference 21284: note = a, c, g, or t
  misc_difference 21285: note = a, c, g, or t
  misc_difference 21286: note = a, c, g, or t
  misc_difference 21287: note = a, c, g, or t
  misc_difference 21288: note = a, c, g, or t
  misc_difference 21289: note = a, c, g, or t
  misc_difference 21290: note = a, c, g, or t
  misc_difference 21291: note = a, c, g, or t
  misc_difference 21292: note = a, c, g, or t
  misc_difference 21293: note = a, c, g, or t
  misc_difference 21294: note = a, c, g, or t
  misc_difference 21295: note = a, c, g, or t
  misc_difference 21296: note = a, c, g, or t
  misc_difference 21297: note = a, c, g, or t
  misc_difference 21298: note = a, c, g, or t
  misc_difference 21299: note = a, c, g, or t
  misc_difference 21300: note = a, c, g, or t
  misc_difference 21301: note = a, c, g, or t
  misc_difference 21302: note = a, c, g, or t
  misc_difference 21303: note = a, c, g, or t
  misc_difference 21304: note = a, c, g, or t
  misc_difference 21305: note = a, c, g, or t
  misc_difference 21306: note = a, c, g, or t
  misc_difference 21307: note = a, c, g, or t
  misc_difference 21308: note = a, c, g, or t
  misc_difference 21309: note = a, c, g, or t
  misc_difference 21310: note = a, c, g, or t
  misc_difference 21311: note = a, c, g, or t
  misc_difference 21312: note = a, c, g, or t
  misc_difference 21313: note = a, c, g, or t
  misc_difference 21314: note = a, c, g, or t
  misc_difference 21315: note = a, c, g, or t
  misc_difference 21316: note = a, c, g, or t
  misc_difference 21317: note = a, c, g, or t
  misc_difference 21318: note = a, c, g, or t
  misc_difference 21319: note = a, c, g, or t
  misc_difference 21320: note = a, c, g, or t
  misc_difference 21321: note = a, c, g, or t
  misc_difference 21322: note = a, c, g, or t
  misc_difference 21323: note = a, c, g, or t
  misc_difference 21324: note = a, c, g, or t
  misc_difference 21325: note = a, c, g, or t
  misc_difference 21326: note = a, c, g, or t
  misc_difference 21327: note = a, c, g, or t
  misc_difference 21328: note = a, c, g, or t
  misc_difference 21329: note = a, c, g, or t
  misc_difference 21330: note = a, c, g, or t
  misc_difference 21331: note = a, c, g, or t
  misc_difference 21332: note = a, c, g, or t
  misc_difference 21333: note = a, c, g, or t
  misc_difference 21334: note = a, c, g, or t
  misc_difference 21335: note = a, c, g, or t
  misc_difference 21336: note = a, c, g, or t
  misc_difference 21337: note = a, c, g, or t
  misc_difference 21338: note = a, c, g, or t
  misc_difference 21339: note = a, c, g, or t
  misc_difference 21340: note = a, c, g, or t
  misc_difference 21341: note = a, c, g, or t
  misc_difference 21342: note = a, c, g, or t
  misc_difference 21343: note = a, c, g, or t
  misc_difference 21344: note = a, c, g, or t
  misc_difference 21345: note = a, c, g, or t
  misc_difference 21346: note = a, c, g, or t
  misc_difference 21347: note = a, c, g, or t
  misc_difference 21348: note = a, c, g, or t
tccccactctgcaaccttctcgcctacccactcatataatggacgtccgtcaatcatacggtcctggaactctccacttgatggatttgatgtctttacaagaatgaagatacccttcttctcctccttgcatacatctacgaatggcttgataccgtctgttccgaggtatggattgacagtggcaaaatcctcatcaaaggcagaatagctcttgctgccgatctgtacctttccgagatgtcctgtggcatatgcagccgatgttgagccgatatctccacgctttacatctccgattaccacgagatccttctcatgacagtaatccactgtcttctggaatgccttaagtccctcaacaccaaactgctcatacatggcaatctgtggctttacagccggaatcaggtcatatgtggcatccacaatagccttgttgtactgccagatagcttccgctgcacctgccggtgtctctccaagctcatcaaatgccttctttgtgatatgctcaggcacatatgaaagcatcgggtcgagacctactacgataggtgcgtttgttttcttgattttgtctactaatttgttgatcattctttcgtcctctttatgcgtattttattatacagacagatattgtgattattaaatatctgcatacagttataaatattttatagcataaactaaattcttgcaaccaaaaatataatagcagggagtatagcattaattactgctatactccctgctgatttcatctttacactcccacaacctcatcaatcatcctaagctcttcctcagagaagcctgtgccctccataacctttaagttttcaagaatctgctgtggctttgaggcgccgacaagcacgcttgtcacgtcatcatcctttaccacccacttaagagccatctgtgctagtgtctcaccacgttttgcggctatatcgtttagcttcttaatctgctcgatgtgtggagcgagcttttcctgatttaaaaatcgtccgtctgtctttatacggctatcctccggaatgccgttcaggtaacggtccgtgagcatgccctgtgcgagcggactgaatgagataatgcccttttggcactctcttgcagcctgcttcaaaccgttttgctctattgtacggttgaagatattgtatgaattctgattgatgataaacggacatttcaaatcagtaagaatctcgcaggctctcttcatggtctcgccatcataatttgacagtccgacatagagtgcttttccgcttcttactatctggttgagtgctcccattgtctcctcaagcggtgtctcagggtccattctgtgatgatagaagatatccacgtagtcaagtcccattctcttaagactctgatcaaggcttgcaatcagatacttgcggctgccccagttgccgtatggtcccttccacatatcatagcctgcctttgagctgataatgagctcgtcgcggtatgccgacagatgctccttaaggataagcccgaagtgcttctctgcgctgccgtattcagggccatagttgtttgccaggtcaaagtgtgtgataccatggtcaaaggctgtgaaacacatctgcttcatgttgtcatacgatgaaaaatcaccgaaattgtgccataagccaagtgatacaacaggaagcttcagtccgctcctgccgcatctgttatatctcattgtgtcatatctcttttcgtctgctgtgtacatatttacctccctcataaatacatgatatttaaactgttttacccgataaattattatactacagcagacttgatttttctattgttaaataaaatcctccgtcagctttccgtgcttctcataatttgtcacacgcgctatcttgttttcatcatccacaaacacaacctttggatgatgctcctttgcttcctccggtgtcatctgtgcatagcacataagtatcacatggtcaccgacttcaacctgtctggctgctgcgccgtttaagcatatcatgcctgagcccggctctcctgcgatggtgtaggtttcgaatctgtttccgttttccacatcaacaatctgaaccatctcatactctaggatgcctgctgcctcaagcagctttgtatctacagtgatgcttcccacgtagtttaagtcagcctgcttgaccactgctctgtgtattttgcctttaagcattgtataattcattttttgtacctcttttcaataatcgtttctgtccggttacgcgataaaattatcaatcagccttgtctttccgatatatacagcgattgccacgagtgttgttcccttgatctcgtcaaccggtgtgattgtgtcaaaatcaaccacatctacataatcaatttttgcaagcggctccttgtttatctctgctgtgattgcatcctttatcgattgtgcactcttctcaccatcctctacgagctgctttccgatttttaagcttctgctaagtacaagcgctgcctgtctttcatctgcgctcagatatgtgtttcttgagctctttgccagtccatccgcctcacggatgattgggcagccgatgatttcggtgtcaacatttaaatcctttaccatacgctttatgactgcaagctgctgtgcatccttttgtccaaagtatgcgcggtcaggtgtcacaatgtgaaacagcttcaggacaactgtctgtacacctctgaaatgaataggtcttgtttttccacaaagctcagttgtgagaccattcatatccacgtacgagcagaagccgtctgcatacatctcctcaggctgtggatggaaaataatgtcaacccccgcatcctcacaaagctttgcatccctgtttaaatcacgtggatagctgtctaaatcctctgtagggccaaactgcattggatttacaaaaatgctcactacaaccttgtcattttcgcgtcttgccgcatcaattaagctcttgtgtccctcgtggagatatcccattgtaggtacaaagccaacgctttttccctctctcttccatgcctttactgcttctcttacctgttcgatttgtccgtatattaacattttatgtctccttattcttttatgctttgtaactattcttctatactaatacagtttatctattattgtctcatccatcttaaaggtatgctcctcacccgggaagcttccctcctcaacagcctttttgtaggctgtgaatgcttcattcatctcttttccgacctgtgcgaactgctttacaaattttggcttcatgtttgcatacatggcaagcatatcctgatatacgagcacctgaccgtcgcagtctgctcccgctccgataccgattgtaggtatgcttatgctctctgtgatttttttggcaagtgcctttggcacgcactcgagcactactgcaaatgctcctgccgcctcaactgcacgggcatcgtcaagaagcttctgtgctgcctcttcaccctttccctgcaccttgaagccaccaaatgcatttactgactgtggtgtaagccctaaatgtgcacataccggaattgatgcatccacgatagcctttatctgtggacatagctccttaccaccctcgagcttgactgcctgcgcatggccctccttcacgagtcgccctgcattgaccacggcatcatatactgatgtctgatatgacataaaaggcatatctgtgatgagcagtgtatcctttattcctcttgaaaccgctgcactgtgatgaatcatatcctccatagtgaccgaaagtgtatcctcatagccaagcaccaccataccgagagaatctcccactaaaatcgcattgattccggcctcatctatgagctttgctgtagaataatcatatgctgtgagcatcgtgagcttctcgcccttttcctttgcctgtttaaaagttactgctgtatttttcattgtccaatccctctgtctttctgcaacaatccttttttgtaactatttacggtattgtcagcctcttagcaattccatcatctgagtgtattccttatcaggattctttttttcagcaatatttaccagttttgtgccaagcattttgtacaaactgacatcatcgctatcgtcattttgcatacatgcgatgtgctttttcactgtttcaatatcgtttctctcgattggcccggtcagtgcgccgtcacagcctgcttcaagtacattttcgatattgcgcatcacaagctgacctgtggctcttaccgcctcagcccttgtaaagccacagtcctccaaaagagtgtaacccatgtcaagaacagcaatcacctgattgcttaaaatgctcgccgctgcatggtattttgcctttttagcaccatcgatgcgacatacctcatttccaatagaacaaaacagcccggatattgcttcaaccgcagcatcctgcccttctactgtgaaaaatgctttatttaattgctcatatgatgaaaatctgttactgaacggtaacattggatgaattgaacagcatgatacactcatgctctcccttccggaaaatgaatcggatgataatgcgccactgcaatgacatataatctgattccttagagacagctcttttaattgttcccaaaccggtataataaatgaatccggtgtggtgataaatataatctgtgattgatccgccagttgctttagcgaatcaaagctctctgtccttgtaaactccgcagcctccttagttgccgcagaatccacgtcataatagccggcaagctctatgtcctttgttcttagatatttacctatagaacagccaactctgcctgcgccgattatgcctattttcatgctaccaccttctttccaaaccggccagaccattccatatatcgcagccgatataatctccgccatatgccgtatggaagcggtcgatttatcctgcgcgcgcctgtcactttgctgtctgcttcatattctgatgcagcaatgtgcttttaggttccttgtgtctgccggatatgctctgtcataaggtgacaacacatcctccatgatacagtttccttcgaataccgttcgaagaaaactataccacattgactattatttaacaatccctattttattttgcctcagtcatcttgatatactcatactgtggcttgaaatcctctctgtcacagagttcatagtaatgcataaagattctctccatgacatttggaatctgattttcctgtggttcaaatagtatgataagatactgcattgagctgtagcgcgtgcagacatccacctttctgatcttgctacggatggactgctccatgcagtcaagtgccttctcaatttcctcgatatctgcaagctgctccggcagagtgttcatagtcaccatgaccagatagcagttgtgcttgtgcctgtcacctatattgttcatgaactcatagattcttgcaaactctctgtagtttaaatccaacgcacctgtatagctgccactctcctttaaaagttttgccacgtttcgtaaatccgcactcagatttgtattctccttattgtcagctaagagctgctcatagaagaaatatgaacccttacagttctgcttcacatagtaaagtgccttatctgcctttgtgtagtcactttcaaacatggctccttttgtcgtcatgcacagtcctgctgaaagagctgcctcctttatctcacagtctgcttccctggcgctctcgaagccctcaaatatgcgctttataacactctccacgcttgccctgtcagaatatggcataaagatgaggaactcatcacctccaatcctgcaggctgcaaaggtctcattctcagtctctttagcaaggagattacctataagcttaagtgccctgtcacccgccttgtgaccatgcacatcattgacttttttaagattatccatatctatgaaggcaagacagccatcattatcctgcatcagggctgctattacctgctgtccacgacttcgcatgtaaagtcctgtcagataatcaacactatcggctttttcctgactgctcatggtcttcatgacctcagatatgaatttgtctgccactgactcgatagccgcattatcacggtagccctgagccgccggattatcctcatcaatcacaaccatgccattgtcaagcatatcaacaaacatacacgaaatctgcggatcaaactgagtgctgcagttatccaaaagctcccttcggatttcttcatctggcagagcattcctgtaaatcctgcgcgatttcatggcatcatagctgtctgccacacacactatacgggcagaaagcggtatttcctctcccaccagtccgtcaggatagccctttccatcgtagcgctcatgatgattccttgcaatatccaccagatggtctaacagtgtgatatcctttaagatatctgcgcccatcacagtatggctctttatggctgcaaactcttcatcggtcagcctggtcggcttatttaatattgtatcaggcacgccaatctttccgatatcatgcagatatgcagcatttctaagattctccatctcatgctcactccagccaagctgctttgctatgagagcagaatactctgcgactctgtatgagtgacctctcatataatcgtcctttgcctcaattgtagcagcaagtgtcttcatcatctgaagggaaactctctctgtctgatttctaagcttatcactctcttccttctggcgcttgtattctatctcgctgattctttttattgtgactatgatattgacaaacaaaatcacaataaggcctattccgataaataaacctgacatggtgacaacaaagtacacagatgcagcctctataagcgctagaacaagtgccacaatcatggcaaccatctctggtctgtatcccaaagccctgtgtttaattatatcaatgataaatgttgtgatgacgaccacgcagcatacagcaagcattccctgtcctgccggcagaatctctatataatcgcacacaccaaaaagctgcagtgatgtgcagacaattaaattcacagccgcaagcgcctctatgcatgtatacactcttgtataacgcccgccctgtatgctgtcaatataaatcgaaacagcaataggactaatcagaataaccacaaagcacatagccgccaaaacagatgcattcggcaccagcatctgacgcagctttgattcaccaagcatccatattgccccaagaagcatacaccagcctacatactccatgtcaaaatgtgtcttgtatacaatactgagtgctatactgaacataacagacactacagcagcaaaaaaaatgaaaaatgctataatcgtctctcttgagctgttatgaaatatatttgtccatatatcgctcttatctccacagtatactgtatttacaacgcctgaatagttggatgcatggctcgtcagctcaatgcgcagctctttgccggcatcatcctccgacatattgcaaaatacatatctgctcgcggaatccttaccgaagggtctcgtgtcctttgtatcatactctgctctcagactgccatccacgtaaaatctgactgtctgaagtgatgctctgattgccatgacatttgcattgaaatcatcaggcagaacagtagttatgaccatcgtatcccccggcttaacatcgtacctgccgggtacttcaatagcctccctttcaccatcggacttctcccatgtaaagctgccctcgtaggtgatattattatcacttacagactggcttctctcactcggtaatatgcactcggcaattataaatccaacaatcaaaaaggccatcattaaataaaacaatgacctctttgtcctactcacactgtatctatccataacttatcctattccgcaaacataaggtctactttataatagtcaggttttctaatgtcgcagatgggaattcagacacactatgcagtctgctgttcaaccatggtgttgatttccttgctgattttgtttacatacatcatgattgctacacctgcagcaaaaatcactaccgtgacaataattccaactgctgaaaagcacagctggcttaagtatcctataaacggagtctttgcgataacctgccctttaactaccttatatgatacaccatttccatcacgaagtgcaatctcttttgcagaagaatcattagaatccacatagtatgaatctacccttctgcctgatgaatcagctgattcgatggctactatattgccatccttataagaggcctcgtcaatagtctttaaatataccacgctgccattctttgaaatatttcctgtatggtctgtgcccgaaagatatgtatgatagccaaatatcggtggaagcacaaccggaagcactataagaagtgccacgatcacaagcacatagcccagtattgtaagccctgtccttttaccctttttctcgtctactgtctgattgttgttaatgtttttactcatattaagctcctttctgttcataaaccctgtattactacaaatggagtatttccatgtagtctgttgcatcagccgctacagcagcctttttctgcatggcaagcgcctcatcaataagatgcggcatagccagtgtcaggttgagtgcctccgccatatcagcgtactcgctctccttaaatgtattcgtgtctgcggtgtaatatgcgttgtgcatggtctcctcataacccactataagcatgttgtttaagaaagctctgtgaaccgcatccactatctcaccctcgtgattgatatcgaggtagaaatcacacttctcaaaaagactatccagcacggacatcttcacattagggtagagtgacacattgtcatactgccctgccgacataagctttgacgacatctctgtgatggccgccacatgaaaatgcatctgcggcatgagtgacgcaagctctgtcagatgccccacattctctgaattggtacatacaagtatgtgcggcctgtgcttattttccctgacgaagctgtagatatatccaagctgcttcaccttatcagaaggagcgccaagtgctataagcctgtcgtaggactccctgcgcgacacaaatacgcgctttgccctcgttccctgatcatgcagtataatctgcatattgccgggtatctcatcacccaccggctcgtgccagaagagtgcgtcgcgaaagccgtttggcgcaagcgcctgtgatgcaaaaaacggatatgacagcgagttgaaataaaccgctgtatcctccagccctgcgcacctgatgaaaaacgctataaagtctgtcttacttctgaaaatccagtccttatcctgccatctgacgagtatatcaccggtgacaaagttctccactatcatctccctgcccgtcacatcgaaaaacttcctgagtgccttctgcccctttttattaaaaaccgtgtgacagaagatcgcgccatacctgttataatgctctgaaagcctgacctgaccggcatcatcgagccagtcaacaatcttaacctgccgcctgtgcgtaggctccgtgaaaaatatcctcgctcgctccctggtgcggtccatgaccttcgcagatgaattatctccctctatgcgccagtaatcaggaatctgtatctgattgaaatacagcggcttacccggtaagctgtcagcctcccggtaatcgcctaagaaaaatccatacacactcatcacatcatccggcaggaaaccgtcatcctcaatgactgctgcatgaaaggcagcacctgcattcttaaatgactcaaggagattcttgctctcgcctgaaaatgtatcaaagagcagtgtgataccatctgccgtgtgtgttacttcaacagctctatccatctatgaaccacctccttagtcagatattctttggccttctcatatgaatgtcctgaaaatgcatccatgtcatcctctgtaaacatcctcactatacgctcagaaagaagctttatcttctccttctgatccatctcatcggtgattggaattttgtagccgttttgcccatcatcgataaaggtctggttgccatacctcacatcaaagcccactataggaagccctgagcctatggcctccatgagtgtgagcccgaagccctcactctgtgaagctgccacatacgcatcatagtgcttgtatacatcatctaatttctgttgtcccatcaaatgcacataatcggcacagcccagcctgccgataagccccttaagcttcgcctcatcgccaccctttccatatatgtcaagtgaaatgtcaggcacgctttcttttgctttcacaacggcctccaccagccagtcacagtgcttctcagtcgcaagacgcgacgcagtgatgagtgagtgcctctttcttggctcatccggatatttaagctcatcaagactgcccaccggaatagtcaccacatgaggctcttttccacagtacttcttaaactgctgcctcataagctcattctgcgcatccgtcgctgtgatgtagaaatctatgtgctcagtctgagaaaatgaatactcataatagttgttccacagtatgtaatcatcatcagtgcctccctcgctgaaatggtccgcatgcaccactattcctacgcgcgccggtccacagttttcgaggattgcctgacctatgcctgtcgtcctgtcgatgatcaccacatcatcagccgtgaggttaagcctctttaccatgtagccgaccaggtcagccttggtataaagcacctgcgctccaatcctgtaaaaggtgctgtcatcctctatgacctcctcgtagcacaccgagccatcctcattgaaaaatgtccttccgtacagatgagccttgccgtcaagcggagcatagtactcgctgaaggtcctgcaataggtgtaaaaatccttccggatcaggcatccgtttgatacaatctcgactctgtgcacgagatcacttgtatcatcgaccatgtagcaggtgtagaacctgccgctctccttaaactgatacctgcacgtcttcccatctctggaaaaggtataatcctcctctgccatcgaagcctcaagctcctttagagtgaatgtaacaggagatgtcctcacatctgtaaaaaatgtgtacagccatatcacttcctcatccaaaaagccgatatttcttgtcatgtgctctatattttctgttggaaacatatctgtgaaaacaaaccttgccggaatgtgcgccctgcggagcagattagccctgtagctctgtgcatactccacgccgcttgaagcccagcctattccgagattgaagttatataccatatgattctcctcgtatctgtcaaactatttatattataataacctttaagggtagatgacctgcagcctgccatccttgccgattttcacatcactaagcaaaatattccttatgatattacattttaccgctttttctgtatccaaaaacgactcgaaagcctcattttggtattcaaacataacatttctctgtgcggatgctcttcccgctaccgcatacttgagctgctcaaggtagtcaatcagctcaacccagccatcatccaccgcctttagagttgcctcgcggacaaactgctcgtaagcctcctcatcacctatgcgctcacgctgtcttgaaagcccctgatacacacgaatcatcaggtaatcgctaacagtggcggcgctttgcatgtcagacaaagtcagaccggcgtccagcttgtaagaaatgttgtcaaggatatatctgtttagtattgatgtatattgctctgtattggtatttttatcattatatttctttctgccacggcgcctgccatgcttcttattactctgtatgcagtcaaaatgattaacgaagtctgagatattctccttcgcaatctctactatcttctcctgctcgacgctggcgccgtcgagcagtttttttctggttgcgtagattaggtctcgctggcgctggaggacctgatcgtactgcagtgatttcttgcggttcatctcctcagactccacactaagcttctgacactggttgacaatacgctttattttgcgctttccaatacgctttttgccatcaatatagcgctgcagcttgtcatcatcctcagctcccactatgtcatcctccaggctcacatagtactggctgaagcccggatcaccctgtctgccggcgcggcccctcgcctgcctctcggatcttgaattgttcatccttcctatacctatgacggctaagccgccaagctccttcactccgtctccgagctttatatctgttcctcttcctgccatggtcgtagcaaccgtaaccgcattcagctggcctgcgcctgcgataatctgtgcttcccagaaagcattgcttgcgtttagtacattgtgcggaatatttttctctattaaaagccttgaaaaaagatctgtatccgtaacggaattaagcaccacaagcacaggctggcctgtctcgtgaagccttatcacatcatccactgctgtccagaactggtcatgaccgtttttaaagtatctgtccttcctgtcgactcttttaagaggcctgtttgtaggtattttcaccacatgcttgccgtaggtctcaaaaagctcatcctttgcatccatgagtgtgccgctcatgcctgccatcttgtcaaacatcataaacagattctggaaggtaacggatgccaccgttctgtattcctgcgatatctccaccttttcctttgcctctatagcctgatgctgaccgccacgcagcttgacaccgtgcatgagacggcctgtcgctccatcaaacagctctacctccttcttgtcagtaacaacataatcctttttgttcttcaaaagcttgtgcgcccgaagagaaagcgtgacatgcctgtttatctcaaaattctctttaccgtagaaattggatatgccaaagaagctctcggcaaacttaacaccctttggagtgagccagacggccttatcctcctctatgtaatctatatcctccacaagtgtcgtgacgaaaaaatcacatacatcgtacaggttcgactgcactctcggcactcccgatatgacgagcggcataattgcagagtctaaaagcaccgaatcagcctcgtcaattatgacatagtggaaatcacagagaaatctgtcctcctttttctttaccagattgtcaaaaaggaaatcaaagccaagtgcaccatttgtagtgtatatgatatcagccgaatagaactgtcttttctcatcatcatcctgcttttttgtatcatccgcatccggatatgagcaggtgagacccatgaaattgtagacctctcccatctctgcaccatctcgcgatgccagatactcgttcgtggtaacgagcatacagctcttgccggtcagcgcattcagataaagcggcatggtagctgatagagtctttccctcacctgtattcatctcagcgagatatccaccgtgaagagctgctgctgccaggatttgcacatcatacggtctctttccaagcaccctgtaatccgcctcgcacatagctgcaaaggcctccggcataagcgattcaagcgattccccatcgctatacctgctcttaaactgctctgtcagtgcagaaagctcttcatcacttagattttttattttttcttcgctttttcttacttttgttagagtcctctttaagtctctcaattctttcctgctctgcatcaaactcttcctctgaaacctctttaatcaccagtgatttgaatgtaaaatcagcatttccaccatttatcagctctatcctgtagctgtaggtcctgatggacggcttgaaaaacgcctttttatcgcggacaataatactctgcgcctgtacatcatacctgtcaaaaaatatgatacgaagcatcagtgcctcactctcactgttgtgatagtcaatattcaccgcaatggaatatgcccgctctccatcgatgagcggaagcgacggctctatcctattcccctggaaattcgtcatagaataccatgtgtgaatcaccgtgcccggcggcatgaggcggttcttataagagactgaaccatcctcattaaattcaattttagatccatatacatacgagtccgatagaaattctttccagcggacctgccaagtgtcaccatacataatacttacctgtcttactattgttcacttaatgtttgttttcctgttactgttcacacctgactgtgtgacctgcaacgtttatttgcttatcttgaaaaatcatcatgcagcagattattgtactggctcttgaaccatgccatgacatttgctgaattgtcagtatgtctgccgtgtgagcccttgccatacacctcaacaccgctcgacttcagatgcgacaaaatgctcggataaccatccgggtcgtaatcatcctcatacagatatgagatgatgaactttgtttgcgaccagtcggcactgtcgaatctgtcccacatcctgttgtttagctgctctatcgcctcatcagagagattgtcataatttttcatcagaatatcaagcgaggtagcgaagcctccggctctaaggattcgctcgtttcttgctacatttcccatgttggcaagcggctttgcaagaagcagtgcatgtggtgaaagctttgagccatagtatagtgaaccgaaggttcccatcgaagctcctgagagcacgagctcatcctttgtaaggccaagctcatcgagcttatcagtcacataatccgtaatcatctgctcgaattcactgtctcccagataaaaggctccaccctcacttcttgggtctgtcacaagaataaacggacatccgaagcctcgcatcatatagtagccctcaaagccctcctgagtcctgtagcctgagaaatagacagcaagcggtggcttcatatcgcccttctcaaagtacacaaacacttcctctcccttagaagagacaagcctctcacctccgggcaggaaaaatccgtgtccacggcgggaatgtctgtcgtgcaatgatatgatattcaggctgccggtgccccttgcaagtatagaaacaaaaacaggaccctgatctgattcattatctatcctgaaaacatcctgaagctgttcctcgtcaaactcccagacctgcttaatatcaccaatcgagccatagtagaactgaaataatctaagcttaatctctacatccccagttttctcatattcaagatacatatcaatacactgtccctcaaaaaccgggatattatatctccagtatgcaatctgcgaaaaattctccccaaactctccatctagaaccaagttatagtttccatcacatgctacccttcctgtaaaggaatcactgacagcaagcttggcaggattaaacttctcaccataaggatttggatagtaatttctcacctcatgagccagaaaatactgcacatcgccggtatacagatactgtcccattcgtgccttgaaatatctgctcgtcgcgctgtttagcatctgcacattttccgttgcaaaaagacagtagccccttgtaaacttcgtaaaagccttttcctctgagagtgttatatccctgtcaagaataactaaatccatgagctttctcgcaggtctgtttgccgttagttcactctcatcagactcgtatacttcaaactctatattgtccggaatgctgtatttagttgtccaatcgtcatcgccaacatataaaacatgaatcttactcactaaaatttagcacctttctccacttcttaagcagcaccgatgtggtatatttctgaccaagctcatagcactccaccaatgcctgattccagttttcaaagctgtccagataataggtcagactccttccgatatcagaaaaatcatctatgaccattccgttttttcctgaaacaagaaactggtctgcactcaggctgattcttggcacgcccttgctgatagctgtaacataaacaaaaacatccatcgtgcctctcatatcgaggatgactctctgctcgttgatacacttgctgatatcacgctcatccacacatacatccacgaaaaatctctgctccaccgttttttctatatcccccagctcattctcggcaaatacatcagccccgctgcctccaaagccgagagctgcctcaccatcgcctgttaccaaacgggaatcatagcccatactatcaagaagctttaccgtatcattctttatagcatcctcatgaccccatgaggcatctcttgtaaagaaatgaactctcgcaaggtcattaatggtcagataatccgcaagcccctttataatccgagcaaatgcatcctcagtcagtccatcaaccggcacgagtatgttctgcacacgaagctgcgagctgataccgaagtccatcctggtatcatatggcggaatatctgtgatatgtaatctgagcggcttgttatttactgcacccagattttccataataagcttcgtcgtataatcagaatccgtaatgatattttccgcatgctctaaaaaatccgctgccagtgatgtctgcgtgaaatcaaatctgttttcaaaaaatgtagcaataatccttttccccttaagcacatgctctgcaaccctgatatgaagcggatgcatcgccacgaaaaagttgtcattttgccttgtgagattcacatagcttgcaaatacctcttcgataaccgcctcgaggctgtcatattcagcctttgtaaagcgcatctcaaccggctcacctgctttgccgctcttagcatcaggcaccacatcatagtcagggcatgtctgattgacaaccacatgaccatcatttttatactcacgtatcttccagatgccgttttccatcaaaaaatcctgatactgctctatgccgttttcatatataacagtactggaaacaaagcctctgtcatcataatagttgcgcctgcagattttgccatcctcaaacatatctatggatatcggattgccatcctcaccaaactctacctgtgcatacttcacatcgccctgcaaagcgattatagaaaaaggcgaatacacaaactccagccccttcggccacttgatatcgtgatatgacagcacagcgaccttctttctcctgacctgtgctatcgcatcaaagcatgaccagtactttgagcggtacatgccctgcctgtgtaggaaatgtctgaaatttggcgagtatccgagcacaagaatcctgtaaggtctgtccacatttctatgaaaaagagtaatctgctttatagtctcgtcaaactctgacttgagcctgcgcatataccactgctgctcgttttcgcaccacatattctgtttataccatgccggtataaaatatagcattatgattcctcctaattcttaattcaaagcgccgggagctatatgaatgtatgatatctgtccatattccggtacacctctgcctcgcggtacagcgaaatccaaagacctgtcgtcatcatgatagagcacggcagcatagcaagtgatgcgtccacatatcctccaaactgtaaaaacagcggtccaccctgacatatacagataatgattgagcttataacggaaaagctgagcactgtgccaatcagatatctcttcgtaggctttcctgcatatatatcctgtatagaatcacccgacttaagcagatcatctgctgtcctgcccggagacagcataaccatagaaaagataattgtaagcagacatataatcaccatgtatactacaattccaagcggtgatgtgagcctcatattgtccatccaccactgaatatcagcattgtccggaaacagataatgaagtccattgcacataaactgtggaagcaaaaaagcggctgacgcaaacataagcggtgtagcaccgacaggattgagcttgtaagcgatatagttcttatccgcataaatattgtttatggaaactctctgtactgctattcgcttctcagtggtctcaagtactatcatgacagcaatctctgccactcctatggctacaggcagtgccagcttctcaagcggctttcctgtaaacatggtcatcataccactgactatattgaccatgaatacactcaccttgccaccgataccatatttggtagctctgtcgcacatatacaccactatcagcatacccgcgatgagctgtatgaaaactattatcttattccatataagttcatatccactaaccctatacataagtgtctgtgttttgtgatatgcctgaacggctgcgataatcatcatgatggtaactgtccatatgtttatcttcttcggtgacagcttcctggtgtggtcaagcgacatgattgcaactatcagtatggcaagcatggatgccagcatgtacggccacaagcctatgatgaaaatggaacagttcttcatatcacctgaaatagcctgtaaaagtatggactgcgcatctacgtttacattgctatatgcatctatatctatcccgtagagtggtatatttctgcctaccatgtacacgagcatggtcatgaacgaatataaaagcttatataataatacgtgttccttctgttgtttttgttttttcttctttatactatccttctgcttcaaggaattcacctttcctcacaaagtaatctcgtcttactacaaaacagcttaacgaattagtgaccatccgctacagatggtcactaatattataaaacaatattgttagtattgctattaattatttatttctcatcagaattatcttctgaatcgtcgctctttgcaggttttcttctgcggttgtcataaacaccctttcctgtgatagctgcaactgctgctgcaatccaccaccaccatgttttgataccgtccttggctgttccgcctgctgcaagaggtgtatcctcatcctcgatgttctgaagattatcttcttcctcatttactccaagaggaacctgtgcatcctgaattggtgtattcggtactgccggtgccgcaggagctgctggtgcaggtgctaccggtgtagctgctgcaagaggtgtagcagccggtgtgatagttgctgctggtgcaggagcattatctactgccggtgcaggagttggagccggtgtcggtaccacatttgcagctgactgactctgactcgtacttgtgcttgtgctgatgctctcgcttgtgctgagtgactcgcttacacttgatgactcacttgcacttgttgaggcacttgtacttgccgatgtacttgcgcttgttgaagcacttgtacttgctgaggtgcttgcacttgttgaggcacttgtacttgccgatgtacttgcacttgtcgatgcactcgtacttgccgatgtacttgcgcttgttgaagcactcatacttgctgatgtacttgcactggttgaggcactggtgcttgctgatgtgcttgcacttgtcgatgcacttgtacttgctgaggtgcttgcacttgttgatgcgctggtgcttgctgaggtacttgcgctggttgaggcgctcgtacttgctgaggtgcttgcacttgttgaggcactggtacttgccgatgtacttgcacttgttgaggcacttgtacttgctgaggtacttgcacttgttgaggcactggtgcttgctgatgtacttgcacttgtcgatgcgcttgtgcttgccgatgtacttgcactcgttgatgcactcgtgcttgctgaggtacttgcacttgttgaggcactggtgcttgcacttgttgaggcgctcgtacttgccgatgtgcttgcgctagttgaagcacttgtacttgctgaggtgcttgcacttgttgaggcactggtacttgccgatgtacttgcacttgttgaggcacttgtacttgctgaggtacttacacttgttgatgcactggtgcttgctgaggtgcttgcacttgtcgatgcacttgtacttgctgaggtacttgcacttgtcgatgcgcttgtgctggctgaggtacttgcacttgttgaggcactggtacttgccgatgtgcttgcgcttgttgaggcactcgtactagctgaggtacttgcacttgtcgatgcacttgtgctggctgatgtacttgcactagttgatgcgcttgtgcttgctgatgtacttgcacttattgaggcactcgtactagctgaggtacttgcacttgtcgatgcacttgtgcttgctgaggtacttgcactagttgatgcgcttgtgcttgctgaggtacttgcactagttgatgcgcttgtgcttgctgaggtacttgcacttgtcgatgcacttgtgcttgccgatgtacttgcacttattgaggcacttgtgctcgctgaggtacttgcacttgttgatgcacttgtacttgccgatgtacttgcgctggttgatacactggtgcttgcagaggtacttgcacttattgaggcactcgtactagctgaggtacttgcgctggttgatgcactggtgcttgcagaggtacttgcactagttgatgcgcttgtgctggctgaggtacttgcacttgtcgatgcacttgtacttgccgatgtacttgcgctggttgaggcacttgtacttgcacttgttgaggcgcttgtacttgccgatgtacttgcacttgttgaagcacttgtacttgctgatgtacttgcgctggttgaggcacttgtgctagctgatgtacttgcacttgttgatgcacttgtgcttgctgatgtacttgcgcttgtcgatgcactagtgcttgccgatgtacttgcactggttgaggcacttgtgcttgctgatgtacttgcgctggttgaggcgcttgtgcttgctgatgtacttgcgctggttgatgcgcttgtgcttgctgaggtgcttgcacttgttgatgcactggtgctggctgaggtgcttgcactggttgaggcgcnnnnnnnnnnnnnnnnnnnnnnnnnnnnnnnnnnnnnnnnnnnnnnnnnnnnnnnnnnnnnnnnnnnnnnnnnnnnnnnnnnnnnnnnnnnnnnnnnnnnttgaggcacttgtacttgccgatgtacttgcacttgttgatgcactggtgctggctgaggtgcttgcactggttgaggcgctggtactagctgaggtacttgcacttgttgaggcacttgtacttgccgatgtacttgcacttgttgatgcactggtgctggcgcttgtcgatgtactagtgcttgccgatgtacttgcgctggttgaggcacttgtacttgctgaagtacttgcactggttgaggcactcgtacttgctgaggtacttgcgctggttgaggcactcgtacttgctgaggtacttgcgcttgtgcttgcgctggttgatgcgcttgtgcttgctgaggtgcttgcacttgtcgatgcgctcgtacttgccgatgtacttgcgcttgttgatgcactggtgctggctgatgtacttgcgctggttgaggcacttgtacttgccgatgtacttgcacttgttgatgcacttgtgctggcgcttgtcgatgtactagtgcttgccgatgtacttgcgctggttgaggcacttgtacttgctgaagtacttgcactggttgaggcactcgtacttgctgaggtacttgcgcttgtgcttgcgctggttgatgcgcttgtgcttgctgaggtgcttgcacttgtcgatgcgctcgtacttgccgatgtacttgcgcttgttgatgcactggtgctggctgatgtacttgcgctggttgaggcacttgtacttgccgatgtacttgcacttgttgatgcacttgtgctggcgcttgtcgatgtactagtgcttgccgatgtacttgcactggttgaggcactggtacttgctgaggtacttgcacttgttgatgcgctggtgctggctgaggtacttgcgcttgttgatgcactggtacttgctgatgtgcttgcacttgttgaggcactagcacttgctgaggtacttgcacttattgaggcgctggtcgatgcactcgtgcttgccgatgtacttgcacttgttgatgcacttgtgcttgctgaggtgcttgcgcttgttgaggcactagtacttgctgaggtgcttgcacttgttgatgcgctagtacttgccgatgtgctcgcacttgttgatgcacttgtacttgctgaggtgcttgcacttgtcgatgcactcgtacttgctgagatacttgcgcttgttgatgcacttgtacttgccgatgtacttgcacttgtcgatgcgctagtacttgccgatgtgctcacacttgttgatgcacttgtacttgctgaggtgcttgcacttgttgatgcactcgtacttgctgaggtacttgcgctggttgatgcacttgtacttgccgatgtacttgcacttgttgacgcgctagtgcttgcttcaacactcaaactctctgatattcttactgattcactcttctcatagtttggatctgcatcatccagtaaatcaatggaatccccatgcttatatgcgtatttatacgtatgtactccacctgtactactacttctaaattctacccattcattatcagacacttttaatacaaacgcatttccgtcacatatatacaattcgccagttttattatggctggtttcccaccagagaattccttctgtccaattaaatgtaacttgatcaaaattattaaaatattcccactcacctgtatatgaattctttactctatactgaaaatttttatctttccatttcttcggttttacatcatttatagattgaacatcagatctagctaaatctttaaaattacttgccgtaatcttagtcacatgatgtacctgatctgatacacaatcatctctatttgtatcattacttgcaagctgcggcattccactcattcgagcataaacagccgtatcctgttctgcatcatctgtgtatgcagccgctacaacattatcaccactttgttgttctgcatcactctgcttagcactttcgctgatgcttgagctttcactggtactttcactttcacttacactcacgctctcactctcgctagtgctctctgaagcgctttcactcatgctctgtgttgtactctcgctatactctgtacgttcgctctcagacaaagagcctgcgtcaactaatgaattggaatctgctgccgattcattaattgcagccataaccatatcagcaccctggatagagctgactccacccatggcaattcctgctgcggttataccttttaaaatactgtcaaccttcttcttattcatatagtctctccttattcacatgaatccggatacttgattatctgtttcctaatcctctttcatccggacataactatagttttcctctttaacactataaatataaactcctaggtgtatctaaaatcgtataaaaacatttatataccgccaaattatagcctttctccacacataatcaaggtatccagcaataattttctggtatatattccatttatgaacaaattttgcagttttttgacatttgcgtagtattgactcaatttatcttccgattctgatacagctatccggtatacatcttcaaaatctgtcgctgctgctcctatttcattatctgtcacatacttttcacagctcaacccctttttaactatcactgggattccggcagccatataaagtccaagcgcctgctcatccgcatcccaaatcaatccaaagcctccgtctgacaacctgagtatagattccatggcacggtactcatcatattgcaccacctctatattcaaattgttcaatggatattcattttgactcgtttccgccatgatatatagttttttatttttatgctcatttgcgcaaatgtctgtcatataatccggtatattctgaatcagataaggtttttcttttaatccatttgcgatatagtaatcccgcagcgcagctgaggcaaaaataaacatatcagccctgttaagcagcgtgatttcatcactcaaagaatactcactgtcatctctatcgaatgctatttcctgtataaacgcaacaatttttgttccatgatatcttcttaaatgctcaaataaaaatccatcgtatctgggactctctccgcttggatgctgaaaaatcactatatcctccggacaaagtgatgcgattatgccatccatcctaacatgaagctcatcatcactatcatatgcatcaggaaatttaaataaactcatttctttaaagccaagtgtttcaccagcgtttttcactgcattttgacggagaccaatcaatccgcctatgttataagtttttgtaatatgtacgctcataatctcttccccattattccactgtagcaactatctgtgattcatacacctgatcatggtcaaatactatatcctgtcactgttgatttgtctgctaaatctatatatgatcttgatatctgttttcaaccggtgtacaggcattttccaaaacctcaattattgcatcctgaagtgtttttcttgtatatgcgccatctaatatcagcttttgaatattcttcacattatggtaaagctttatatactctgcatccgtaatactctgaaccagtttatcagcttcatccaacgtatcgactgcatatcccagaccgtttctttcgacaaatttctcatgaacacagcctctttttactataactggtatccctgctgccagatttgtaccgagcttgtacggctgattcatcgaataatatctgtcaaaatattcgtcatcactccaaacaagcccaaagccacctttggaaagctcatgcattagcttttcctgctcaaaataccctctccagcaaaagctgtcatcattttctctgtccggcttatttgcatcatattgataaatcagtgtcttgccatggtactctgccagaaacggaaaacgattatagttcccggcaaagtgaaagcatctcgttacagcatgatccacaaaacaaatgtctgatggcatatcccagatagtctgatagataacaggcttctcatcaagcccattttctttcagatagcgatgcatcttctttgatggcaaaataagtaaatccgccttattgagagttttaatttccatatcaagaattgcctgctcagaatcaaacatgagcttttgtatatcctgaacaaaaattatcagctttgtatcccggtacgactttatcttgtttacaaagctctcatcataattcaccccaatccagcttggatactgaaaaatcacaatatcaccatagttaagaggcgctattatcccatcaagacgtttgtctatctcctttgcatagtctggctttaaaggataaaaagacaagcccatttcatgacagccaatactctgcgccacctttaatactcttctatgtgccagactggcagttcctgccatgttgtttaatgtagtaatgtgtgttttcattgatactcctgtctacaagcctgttgtttcattgatgttttccaacatttttctctcatactcaagccaataatccttaggatgttttaccttcatgttactgcatttctctataaaattaagtttgacggattgagctatggtatattttttataagctgcatccattttgattctattacatgctccttatattcttcagcaatcatataagaattttcatggaatttcttcaatctgtcatcatcctcaaatattttaactattgctgctgcagttctttcacagagcttatctttattttgatagtctgtttcaatatcaaaatccaccagatagccattttcatccggatgtataaaaagcctgttcccatatcttacatccagtccaaccatggctagtccgtctccaacagcctccatgagtgaaagtccaaatgtttcccacaaagaaaaggatgcaaacaattcatagtgtggataaatcttttcaagattacagcgccctttaaagtgaatataatcatcagcaccagcatctttaactatattttgtaaatatgaagtatactcatcattgccacttccgtatatatccagattaattgtctgatttatctcatgagcttttatcacacttttaataagaatatcaatacctttccttggactaagtcttgaagcagatattatactgccttgccaacgattatttttacttttaagtttgccttctggtatggcgcccggtggaatagctgcaatatgcggaacaaaacaatcatactcttttaaaaatgcttccagacttcttttatgttcatccgtaccaacaacaaaataatctattgcctctgaatatttgaaccaataataatactcatagttcatgtataatgagctttcatcctcatatattttgtaaaaatgatctgaatgtaatacagctatcagctttgatttgcctttattttcaaaaagaggctgtatataatcaagatatcccgctctatccattatacatatatcattctcacaaagattaagtgtctttacaaatctttctagaaactctacattgtctataacttcaccatttttaaacagatattcaacattatctttatagatacattgttcataaaccatctgtccttgtttgttccaaaaaattctccttcctagatttaagccatcgttcgaatcattatcccaattatacagctctgtatatgacaaactgtctgtataataattttctaaatacttttttccgtttttaaagagactttcatttataacaaatccatcttcatcgcataatatttcaactgatttttcaccggaattatatagacgaatcacctttccatcctcatctatattgtcatactcatagttttctttttcattttctaaaagagcttcttttttcacagacaaactcatatctaatcttccggtcataaaaagatgtgcagacataatctgactgcgttttattttttgcgaaccatacagctccatatccctaattgtcggcagctctgtaaaaataaagttagcatctacattgttttttgcaaacaatcttgctctaaatccctgagcaacatcgactccggaaaattcatatccactaagtaatgtaaaatcaaatactctcatctgtatcacccataactacttttgcagctaattgttttaattgcttcttttgcctgtctatatattcattgaatatcgtctgactagttattatattttttagagtttctttcatcttcacatagttgctgctttcaaaaatatttcccattggatataattcttttgaatgcgctgtattgtcaaacgctagtattatcatattattaaccattgcctcgtttactgcattgtatagctctctgtaatgattaatatccaaataaatatcgcatctttcaaacagttcttttctcttttgttccgtaatacatggatataactcaacattattatttatatccagtctcgttaatttatctgacataatggtactggcagctatatgaaaagttatttccggaaagtcatttataagctgttcaatatactcaagctgatccgattctgtaataataaatgcttcttttctcccaaattttgatttattattctcaagatatgaatataatctgtcgcatttataatttgaattttctttataccaattgacctgctgctcttcactgcacagtattcgaaacgctgtgttagtctgagttattactgtcaaatctgagtttaatctattttgtggcaggtatgatattttaaaatttccataatcccaggcaaatttatttaatatctcatcacttgtcagccatatattttcatcataaattttattatatttaagataagcttccaaataatcagcaaagcctctatagctcttcggactaatgcgggtgccaaacgtggtatatgtctttggacctgtctgttctaatactttaatgtcaccatttctatcatagaattccctgactgtaacattgccgccactcacattctccgaacaatacatatatccgtatttgttgtaataatctactttatatactgtattattcctgtcaatccactcgactctgctgaccattcttttctctatcggattcttaaaatagatgtttgcctttttggttttattatcatatatagcaccatttagaccatctgcacgaacactccaatattgagggatatctatgaatgcataatacctgtctttttccttaagcacatcgtttctttcagatatgccacaaaacaaatctatggcttctattgttttgcattctttaaatcccacattttctgccagctctattatatttttctcaaacttacctaattcatcagtaataaaaatcatagggcaaacccaccctctgtataatgtaaaaacctctgtgttataaaataattctcaccattttctaatccggcatttgccagtatttccagtccattgccatcgtccgcttctgctgagactatatagacagtattatcatcacagataatctcattctcctttaaatgctcatgccattcacagctatcgaaatttctgtttaatagcctcattgcattccttattgagctgttctctccgccatagaatacgagtcgtatattgttttgagtaactttttttagcagcttctccagcatacctgttctatccacaattctacccatagaattacacaataagccatcctccatctgctctccccatggggttctcagtattgtgaaatagtaggctctgtcaatttcattatttgtatgcagcatcaacagggttgcagcataatgatatatttttttctctgctttctcattattttttcttgcctcatcaataaaataattccatttttcatctatcaataaggtttttccgctgaatatggcatttaaagcatcctggtcaggaagccatgtccgtggattatcgttcagataatctataacctgttgaaacaggcttccatttttcctgatattgtcaagattcatgcaaagaacacccgcattaaaatatctgtcacgacttgtctgccctgctgctacagcgtatggagttccccaatttcttattgtcgaacaatcctgagcagccgccagacagtaattatctatatttaggttccataattcttcaatatctgtatttacaaataaatcatagtccaaatatattattttttttaaatccggcataatatcgggcaacataattctgaacattgttccaattgcaaatctattcattgaatcagcaaacgtgccaaaaacgtccgaattaaaatgatgaaattctatatcatttccactattatcggcaataaaactcagcttatttttatttatttcgttcaatgtgtcatcatgtaatatatgaaaaactattggcgcttttgtgttttcaacaatggattgcatcgttgttccagcccagacactgtaatttccatccttatcatgtataccaagacagatatgtattgcattatctaaaaagcatacattattcatttttttcgcagttactctcagccttgacattcttttcaataccacatcatctgaaaaaaacttcacatatggattattaaatatatccggttcactctttaaaaactcttctttgcaaatatccagttccctattcataaaggtttctattctactatatggctcaatatattggtgccataacaaaaatgtctggatttcacaataacactgctcaattacatttcccagttctgcttttctactttgaatagcctgccttatatgatccataataatcttagcatcccggatctttgcattgctaatttcagaacgtataatgccctctgtattctcaaagtaatagtataatgccgattgcaccttacaatatttctttgcaagtaacacacaaagcatagaaaaatgtgtatcctcataatatacatcttctataaatcttagattatgttctcttataaatttggtcgagtatagctttgcccatgctgttacactagtaaatccggtcagacctataatgagatttttcctattatcaacattatccaaatcaagcctttgaatttctaaatcatttacttctaatacatttggcttatctgctttaaaacacgatacaccacactgtgccacatcataatcgtcctctgtcattctatcatacagcaccctaagcatatccggatgcacataatcgtctgcatccacaaatgtgatatatttgccggtgcagatatccattcccagattacgtgcaccgccacattttccttttttctgtattttaagagatataacattctccgggtattgtctttgtaaggattctaatatagaccatgtattgtctgttgataaatcatctatgagtatcacttcgagattttcaaagccatatgtctggctgtaaattgaatcaaagcatctcataatgtatttttgtacattgtagcatggaataattactgatatcttgtctttaccattcataacattttctccataatatataaaataatcaaattagtacttcctctaatcgtgtaaaatcaccttgtagcttttccaacctatttgtactatttcctttacaactcacaaactatactgttcacatgacatttctctgcggctctcggatttttctttgcgaactggcggttgattctctttttcactatctcgcagtcctcacgcttgattccgatgagcatgataagaaactgcacctttccatacgaggtatatatgtcactgtagcggattgattcaccaacgcacttcttaagctgccttgaatacttgttcatctttgtctcgctctgtacctgtctgccttcctcgtcctccagagtacagagcatgagatatacaggtacccttgtgcgcttcataatacggatggacgcctggtatattcctctgaataccggatagctgcagaaatatccacctctttctgtttcctcctgctcgttcatgccctcctggatgttttccagtatctcatgtgcatgattcatctgattactgtatttctcaaggatttccaagagtcttgaagatggataaataccgcactccctgagataatagtccacgacatccgtgtatagctcttccgcctcatcatagcgcctggtctctaccatcgcctccatgatgagctcctcccactcattgaatgggtcgacctttgccgcatatactccgagcttctccagtcccttgaattgttttctctttcgcagtatatacgcagcttcatttatgattttctcaaacataatgtgatagcgtctggcctcctgtgctatccacgtctcgcctgtatatgccgccaaaaactctcccttatacagatatagtgcttttatgtacagctcaagcatattgtcttctatttcctttatccgctcatcacacactgtctctgcactctccggttcctgtggcatctgcttttccagtgcacaggcctcgttatagagcttctcaaactctgctgcatcctcttctatctctatatccggagtccagtaatatatgcctccctccaaatatacgaggttctttcccggcaatccaagctgtgcgagcttttgctttgtcttgtatacaataactcttagtgccgtgtgaggtgcatctatgtcacgctcaccgattactatttcctcgagcttatcctttgctattccgcagtcagaatagtgtatcaaagcctgcatcatgcggttgaactggctttccttatgcattttttccgccacaaatggtgctccgttatagtccattctgaaattgccaaacatctgtaccttgattttatgcgtcataggtgcctctcttcccgagttttataaacctgcttattatagaattcatattatcattgactcatatattcagctagtttttaactaaacaaattaatctaattatcattatacatcaattccacgcatggcaataacaacgacaatttacacaaaaagtgtcaaaactcgtacttgacaaatcgtaagatatatgatagctattcgaagccagaaataaaaaaagatcctgcaagaaaatctcacaggatccggctatttctgatatattaaatcagatatgttaaatcaaatattaaattagaaaatagcatttacaattgttgaaccaatggctgttgcaaggaatgccagtccacacacgagtggaagcttattgtcatcctcttctattgcccttactccaaagaatatgcttacatatcctactacacccgcaaatgtatgcagccagctgctcacattgccaaagaactggaatgggattatgtcgatgattgctgccacaagtataatcggaaggtatactgcatcatacagacatgctgctgaaagtgtctgtgcaaatgtcacctttttattcttctgcactgcgtttaatacaaccagaatgactgctgccaggatgagtactctcaccgcctctcctacgattcctgagaagattccctcaaagaagctcgccgggtaaaatgagaatccaaagccgcctatgctgccaattacgcttgataacagatatactacagacagcactacctctactatggcaaataagccaataaatataaagcctgatgccatatttgcattctttacaaagtctgctgcagcctgtgccggcttcttaacaagacccttgtagaatgtgatgatagatgccacattcttgtcattctgcagctgctgtcctgctgcactcacctgctgtgtgaagttatcaaacgcctgcgactgtgcgctgccctgtggctgtccgttgaactgtccctgtggctgtccattgaactgtccctgtggctgtccgttgaactgtccctgtgcgttgccctgcggctgtccgttaaactgtgcctgatgtgctgcattatctgcctgtgcattgttgtcctgtgtctgatttggtgcctgtggctgtgcctgctgacgacatgtgcatacctcatcatcagctaactgcctgccacaatttgtacagtatttcataactgaaacctccttaaaataattaataaactgctgataattatattagcatttcggatatttaatagcaatatttatttgatatttatttcatattatattatgattatttataatcattcacattctacagaggaataaacatgccacaaacacttaatatagctgtatgcgaggacgaagctgcagagaccgtgctgctttgtgatattctcaaccacagcgatatccaaaatacatacactgtctttacggatgcagattcttttcttgcctcatatgagtacggaaagtatgacctgctgctcatggatatatacatgaaagattccatgaccggcatcgaggcagtctctataatccgcgagacagatgccgatatcccggttgctttcatcacaacaagcacggaacatgccttggaaagctacaggctgtctgccatcggctatatcgaaaagccggtttctgcagctgagctaagtaacattcttcaccttgccatgctgaagaaatccgatgccccatctctttatgtgaagagaaacaagagtatggagaggcttgccctttctgatatcatgtacatagagcagagagccaggcagattttcatacatttaaaagaaaatgaggaaatcatctgctatgagaagctttcagagctttcagatcagctgcccgctgagctgttttttctgccgcacaaaagctacgcggtaaacctgtcgtatgtcacacgcattgatacttcactcaaatgcttcgtgatggccgatgacacaaatatccctatcaagagagagctctccggcaaagccaaaaaggctctggagagatactactttgatcacaccagagggcttaaataaggcactttcctattgatttgatatgagctagactgtcaaaagtaatacactgcaaggagcccggattatgaaaaaaattagcgctatacgaaatattccctatctgacaattatactgcttacactgatttgcatactgcttctttcctcaaaaaacatgattatgagccaggcgagctatcctgaagccactatcgtaagctctgcatatgccgtagttgagggctcggattcagataaagaagaaatcgcatttccacatacctttaagcacctttcgccgcgcacacatgtcaccgtcaccacacatatcaacctgaacaaggatgatccaatctacataaaaactgtctattcccctgcgaaggtctatctggacgatgacctcatatatgagtttggcagggccgaaaactatccatcctatatgaaggatcccgcaaccgaggggtacctgataggcactgacggtcattcaggtgatacagagcttcgcatagagtatctgtctcctgttaccagaagctcgcttacggtatattctcctatctacggagcatacaaatccttatttttcactctgttaaagctgaataaatggtcattctttatagcactgcttgagcttgccgcaggtgttttgtttatatttatctcactgatgcttttatactacgataaagaggtttgcaagatgatatttcattttggattcttctcactcatggccggcatgtggtctatcggcgagtgcaactacacaggtgtcatagtcaaaaaccctacactgctgtatctgtgtgcttttatagggcttttctcgcagatgattccgctgctgtatttctgcaggcttgcagttggttttaagaatgacaagccaattatagttatcgcgaagctcctcaccgtgcttgaccttgtcgcttgtgtcttacagcttagcggtacggttgcactatcccagagcatgtacgtgttccatgtcattctgcctctcatactttgcttcctgactgcatacatcatccttgaggctgttcgtagccaaaacagcagggcaaaacggctgatggttccggtattcatactggcacttgcttcatgtgctgagataatcaattatcatttaaaatttgtggcctcattgtcattactgtaccagattggaactctgcttttcattataatcatgggaattataatggggcttaatataagcgatatgctcatgataaaacgtgagaatgaaagactcatattcgatatgaatctccttgagcattccctgttggagcagaagaaatataattcgctcatcacaacaaacgaacagctttttaagaagcagcgccacgatctgcgtcaccagctggttgcaataaaaggcctcgcaaacactgaaaataaacagctgaatgaatacctggatgccctgatccacagcataccatctgcgcctgcaagctattgcgaaaacagggtagtcaattccattctgtcatactatagtgccatatgcagaaatgaaaatatcgctcttgagacaaagcttattgttccggaaaccgatgatgcggccttggacaatgacctgtgcctggtatttggaaatctgatagaaaacgctatagaagcctgcagacgcatggatacttctgattctttgaacgagaaatcatcgcactttatccgactgcatgcccacgtacactataagacacttattattactatggacaacagctttgacggacatgttaccatccaaaacggaaaataccgttcttctaagagggacgactatggtataggtctgtcatccatccgctctgttgccggcaaatatgatggtgacgttgcatttgaagcagctgatggtatatttcagtcatcagtataccttcaaatatataaatgacacactaaaatcattaatttatattaatgcttcatacctaaatttcattttcagagcccaactaacttattgtatataatgtatacatatgctataataataaaagaattttgtgcattatacacatatggagttttaatttatgatagaacacacgatatacaaggaatttattgataaaatttcagaattatcagacgggatatatcctatcatcaccgacctggataatgacttatcatacgtaccggataagacagctgattttttcggctttgaagccggcgagcatacctgcttctttgaacagctgagttcttgtgtcaacgacgttgacctgccggaatataagcaggaaatccgctatcgcttaaatggcgaaaaaccggatgatatattttatgtccgcatgggaaagcataccaaagaatatatgatgggattttattctgatatttttaccggtgatgacggacaccgctaccatgtcctcgtgctcagaaacgaaaatacccttccggatatcgacccatatacatatctttatggtcagtcaaagtttgaaagagacatcaacggctatatcatggaaaacaggtctgtagccataatcgaggtggagataggtcatatagatgagttcaatatactgtatggttccaatttcaacactgcaatccagcgtgagcttgcgctcaagttcatcgacatgatggatggcagcaccgctacctactatatgaataattgcaagtttgtatttgtggtaaaggaagcagaccgtgccttggccaaggccttctatcagaaaattgccgatacaataaagtccatgtatttctttaaatgctttaaatttgagtttgatatatatgctgcgtgtctgattctcaaggattatgatggtgatacctcaactgtcatcagcaaggtggaatacactctagaccgcgcgaaggagcttcacagccctgatttgttatttttcaatgatatggtcaggttcaatggcagctcgcatatagatatcatgaaaatcattcatcagtcggttatcaatggctgtgatggcttttttgtagagtttcagcccattgtaaaggcttgcaatggtgaaataatgggtgctgaggctctggtgcgctggaaaaaggagccttttggcacggtgccacccggactgtttatcgactggcttgaggatacccctgctatgtatgagc

SEQ ID NO: 558 - DNA, 6713 bp, unidentified
  source 1..6713: mol_type = unassigned DNA
ctattcagtcttctccttcaggtattcataaaaagtatattgtgaacgtactttttccttttgtggatgagctgatttccaacagttacgcagattctcatctacaaaacaggctttacgcttatctgagagctggatagaaagcatatctattagttcctgctttgcatccgggtccagtatgggggtgacggcctcgatgcgacggtacagattacgccgcatccagtccggtgagccgaggaatagtttcgggtttcctccattaccgaaataccatatacgtgcgtgttccagaaatgtatctacaatacgtgtgacacgaatgttacgactgtatgtttgccccggtatcaggcagcagataccacggacgatcaggtctatttccacaccggcttgcgaggcttcatacagacggtttatcatggtaggatcttgcagtgcattcatctttagtatgatgcgaccggcttttccttttttcgccagctccatttcatgatcaatcagacggttcagttccggtatcaggttaaaacgggctaccagtaagcgatggaacttcagattctctttaccttgcagggtacggaacaagttgtacagatcgttcacgatgatccggttacaggtaaatagaccactgtctgcgtagagcgtagcagtcttttcattgaagttaccggtgctgatataggcataactggttagttttttcccttctgcgtcgcgccgaagaacgagggcaaccttggcatgtacctttaatttaggaatactatatatgatattaatgcccgaagctttcatcatttcagcagtggcaaggttgttttcttcgtcgaagcgggctttcagttccacaaaaacagtaacctttttgccattctgtgcggcggctatcagagtgttgattacagctgagttctcggcaacccggtattgtgttaccatgatttcacgcacggtaggttcgtgtacggcttcgtacaggaagtggatgaaatgttcgaatgaatggtaaggataatgtagtagcaaatcctttttctccacatagcggaatatggattcccgttcatcaaggcaggtcagtttcatcggttgcggcttccgtatagggtgtatattggggttgggattaggcaaatggcgtaagtcttccaggttgaggtgcttgtctcccggaaccaactcgcggcggtcgatatggaaagcgtctaccaggaaatcaagaaaatcctgcggcatggcacggtcgtacacaaagcggcatacatctcctatcttgcgtttctttactttagtctttacctgttcgatgatttcggaagtgttggcggcatcgtctatcagtatatccgcatcgcgagaaatcttgatgcaataactgctttctacatcatagcccgggaagataacatccagattagccttgatgatatcctctatgaacatcagataatagttgtttcctactttgggcaactctatgaaacgtggaactttgctgtatggctgtttcattacgaaatattgcgtacgtcccggagcaccgggcggcaatcctttctgttgaagacggacggcaagatacagacggttgtcgcgcagaaacgaaatgaccttgtccttggacaccggcacaggttgcaggaacgggaaaatctcttcccggaagaaacgacgtacgaagtcgtgatggaagggttccacatttcggctctgatagaaaatgatatgatttttcttcagggcaggaagtatcttttgctcgtagatacggatacgatcctccatttggcggtttacttcaaggtttatcgcatccaccagttcgatggtagactgtacggtttcctcgtcactttgtgcagcaccggtagctatagctttatggtcggcaacgcgtattttgtagaattcttccaggttggaagaataaatggatataaagttaatgcgttcatacagaggcaaggtgtcatcttctgcttccaacagaacacggtaattgaatgacagccaactaatgtcccgtttaaaatattgatattggttttccatactcatcaagattttcccaaatatagttacctttgcacagataaacaaaagaaagatgacaaaagttggtttattatccgatacacacggatattgggatgaaaagtatctgcaatatttcgaaacgtgtgatgaaatctggcatgccggtgacatcggttcgctggaagtggcgcagaagttggcggcattccgtcctttccgtgccgtgtatggcaacattgacgggcaagacatccgtcaggtctatccgcaaatcaatcgttttactattgacggtgccgaagtgttgataaaacatattggcggctatccgggcaattacgatccttccatacggggaagcattctggtgcgtccgcccaaacttttcattagcggacattctcatatattgaaggtgaagtatgacaaaacactggatatgctgcacattaatccgggtgccgcaggtatttccggattccataaggtacgcacaatggtccgtttcattgttgacaatggagtgttcaaggatcttgaagtaatagagttggcaggttgagaaagctcctaaaaataaattaaattattttgtactacatttgctttgcattatctttgcgacttgaatagcaaattgagagccgtggggcttggtcctccttcttattttattctatatttgtatcaaccgaaaaaagaactgaaatatgaaaggaattattcttgctggtggtagcgccacccgcctttaccccttatcaaaggctatttccaagcagattatgccggtttatgacaagccgatgatttactatccgctttccacgcttatgttggcggggatacgcgaagtgttgattatttccactccacgtgacttacccatgtttcgcgaattgctcggtacgggtgaagagctcggaatgtccttctcttataagatacaggagaaacctaacggactggcacaggcttttgtcctgggtgccgagtttctgaatggtgaaccgggatgtcttatcctaggtgataatatgttctacggccagggcttctctgctatgttgaagcgtgccgcttcgatagaaaaaggcgcatgtatcttcggctattatgtaaaggacccacgtgcctatggcgtggtggaattcgatgccgacggcaaagccatttcgctcgaagagaagcctgcgcaacccaaaagcaactatgccgtgcccggtctttatttctatgactctactgtcactgccaaggctgccgctttgaaaccatctgcccgtggcgaatatgaaatcaccgatcttaaccgcttgtatcttgatgaaggcacactgaaagtagaaatcttcggccgtggtttcgcatggctcgatacgggtaactgcgacagtctgctggaagcaagcaactttgtggctaccatacagaaccgacaaggtttccgcgtcagctgtatcgaagaaatagcctggcgcaaaggttggatagatgccgatcagttatatcgtcttggtgaacaactcggcaaaacggaatacggtacatacctgatggaacttgccaattctcaccgttgagaaaatcataaattataaattataaatcataaatcaatgaagacttatctcgtaaccggtgcagccgggtttattggcgcgaattatatcaagcacattctggcaaagcatgatgatgtcaagcttgtgatattggatgctttgacttatgccggcaacctcggtaccatcgccaaagacattgatgatgaacgttgtatctttgtgaagggtgacatttgcgaccgtgtattggctgacgaactgtttgccaagttcaaattcgactatgtggtgaactttgccgctgaaagtcatgtagaccgcagtattgaaaatccgcagcttttcctggttactaacattctgggtacgcagaacctgctggatgcagcgcgtcgtgcctgggtgacgggtaaggatgaaaatggttatcctacctggcgcaagggtgtacgctatcatcaggtttctaccgatgaagtgtatggctcattgggtgccgaaggatacttcacagagcaaactccgctttgcccgcacagtccttacagtgcttccaaaacaagtgccgatatggtggttatggcttatcatgatacgtataagatgccggtaactattacccgctgctccaataactacggtccgtatcatttccccgaaaagttgattccgctgattatcaagaatattctggaaggaaagaagcttcctgtttatggtgacggtagcaatgtgcgcgactggttgtatgtggaagaccactgcaaagctatcgacttggtagttcgcgaaggcgtagaaggtgaagtgtacaatgtaggcggtcataatgaaaagaccaacctcgaaatcgtgaagttaactattgccactatccaccgattgatgacagagaaaccggaatatcgtgaagttctgaagaagaaagtgaaggatgaagacggtcagattgatatcagctggattaatgaagacctgattaccttcgtgaaagaccgtctcggccatgatcagcgatatgccattgatccggcaaagatcactgccgctttaggctggtatcccgaaacgaaattcgaagacggtatcgtgaagactatcgagtggtatctgaataatcaggactgggtggaagaagtaaccagcggtgattatcagcactattacgagaagatgtacggaaagagatgatgtttagtgattaacggttagtgattgctattataacactaagaagaatccccataaacagcatattgcgcgaagtctcgcccagtatgctgtttaattttttaccgcttcgtatctttaccatgcgtttccaggtagttacgtggaaataaaggtaggtgaaaggcatgaagatacctgcatagttccagccttgggcaaaccagaaggaaagcaatgtcgcgatgatgccgagccagaggtaaaggtatctgccgaaaggttctccgaaacggacgatgagcgtacgttttccgctgagggcatcctgatcgcggtcgcgataattgttcacaactaataaggtatctattaccagtccgctgatgagcgaagcaatgatgacgtttggggtgaatgtatatgcctgcacatagtatgtgccgcctaccggaacaaagccgaagaatatcagcaccagtaagtcgccccaaccttgataggagaggacggtggtataaaggaaggcaaatattacgcagaatactcccagcacaatgagttcccatcctccgtgaggcagttctccccaacttgtgtatagcaatccgagaccggaaatgcaggacaaaatgacgatgacaccgattcccactttcatggctcccggtgtaatccagccttgtgcgcaggcacgttccgggcccaggcggtcggtacggtcggtacctttcaggaagtcgaagaggtcgttgatgaagttggcggcgatctgcataccgcaggcaaagagcatacacagcagagcgggaacaattttgaattgtccgtcggcaaatgccagtgaagtacctatcatcacaggaatgatagctcccgtcaaggttttgggacgggctgcaaggagccatgcatggggggaattctgtttgatctctttcatattccggttttagaagtaagttatcatttaccaattttgtagcaaagatacagaaaatgcctatctttgtattcgtttatgatgaataatgtgctcacttgcgatgaataatatacttgcctatgatgaagaatttattttatatatgtatcctttccttactatttttttcttcctgtaagtcgggtagcagtatgttttcgtcttccaagtccggttccggatataaaggcatcagtcgggtaaggacttatgaatttacccatcccgatgtaccaactgctttcgatggttttcgtattgcctttatatccgacttgcattatagaagtcttttcaaagagaagggattggctaatttagttaagttgctcaataaccagcatgcagatgcattgttgataggtggtgacttgcatgaaggttgcgaatatgttcagccccttttggctgccctgtccggggtgaaaacaccgatggggacgtatgtcgtactgggcaataatgactatgaagcttgttatgatgatattgtacgtggattgcagaagtacggtatgcacttgctggaacataaagtagatactttgagacgggacggagaagaaattttgattgccggcgtacgtaatcctttcaatttaaagaagaatggcacatctcccacacttggactttcacccgatgattttgtcattctgctgacgcatacgcctgactatgcggaagatgttcccattacgaataccgatctcgtacttgccggacatactcatggaggacaggtcactctatttggcttgtacgcaccaatcattccatcccattatggtaagcgtttccgcaccggattgaaatacaactcgcatcacataccgatgattataaccaatggcatcggtacatccaataagaacatccgactctttgcgcccagcgaagtggtgatgattatactgcatcagcagaaagactaa

SEQ ID NO: 559 - DNA, 33447 bp, unidentified
  source 1..33447: mol_type = unassigned DNA
aagtcttgatgaggtaacacagtatcttggaaagaatattcctgatgcatcatcatggttaagtgtaactcatgatgcattagatgaaagcaacaagattatacaggatctgtataattactgtgtgcagggttctacggattcatattcagaagctgagcgtaatactcttgctgaaagtcttaacaagctggtggaagcttattatgagcagggaaatgttgattatgccggaagatatgtatttacaggacatgctacagataagcctctgacataccagtcagatgaaaccgctaaagatgttgattatacaattacacagaactttacaagggagaatttatctaataagacggcatacactaatgcatatactaatgatgatattattaatcttaatgtaaagacagatgctaacggcaatataatcacacctaatataacggatgtacacagaatccagctcgcatatgatgagattaacggaaaaaaattttcgatgagcatgggagataataattctgccaatatcactattgctgatgatggtagtgttgctatagatggaggacttactgttccggtaactgatgcagacggtaatacagctgataccgctgtaaatgttgttacaacgacagatcctaattatgttccgggtgagaatgagattgcaattaactcaacaaccggagagcttcttcttggtgagaatgtatacaagtcagtgtatgctgataatgcattttcagtgacatacgagaagagcaattttataaagggtgacattgacccgacaatgtattttaactgtgttgataataatacaggaattgagtacaacaagcagagtgaggatattgaatatatcattaatttttcacagaagattaaggttaatacagaagctgatgaagctttcaatatatatcttggaagaaatgttgatgaccttgtcaatgcggtacagaatgtccttgatattaatgaccagatatcaaagattgagtctatgcagaaggaaggacagtacagcgatgaggcttcacagaagaagttaagtgatattatggaaggccttacaaagcagagagattttgcaaaatctaagatgaaagatgcttttgaagcgggaatcggtcagatgcagggctatcaggagcaggtatctaatgcgaaggctgatgtaggaaacagacagataagactggatcttacgaagacacgacttacagaacagaagactaatttcactgatcttaagtctcagaatgaagacattgatctggaagagattgttgttacatatacatcagcacagcttgtatatcaggcagcattatcagctgcgagcaaggttgttcagcagacactgcttgatttccttgggtagccagcataagagaggaatacagtgaggcaggctgagagttaagctgtataaacagcattgacagataaaggatagaattaagatttggaggtttgacatgaaagtacagactaaatggtttggagagattgaagttagtgatgataaaatcatcacatttgacaagggaattattggatttgaggactggaagaagtatactcttgtgtatgatgcagagaaagaggagaatatatcaattatatggcttcaggcgattgatgagccaacacttgcacttcctgtcatgaagccggaattcgtgtatgagacatatgatcctgttgttgaggatgagcttcttaaatctctcggagatgatatacaggatgataatatcagagtgtactgtgcgcttacggtaccacaggatattactaagatgacaattaatcttaaagctcctatcattgttgattttgatacaatgaaaggaatacagcttatagcagataattctgaatatcaggtaagatatcctatatacgatattctaaagaaggaggagaactaatatgctcgcattatcaagaaagaaagacgaagcaatcattattaatgatgatattgagattacaataatcgaaatcaagggcgatcaggtaaagcttggcatatcagctcctaagtcagtgcctatatatcgtaaggaagtgtatgcacagatacttgattctaataaggaagcagcaagttcggttgatgtgaagtctcttaaccagttatttaagaaatgatttgttttattagtgtatatttttgtccaaagggttaaattttacttaacattttccgatatatgcagtacaacatgaatgtaactacaggataaagttttgttttcacacggaggtggaattgtatcatgggaatggaagttaatggagtagcggcagcgtcaagctatcagagccagaattcacaggctgccaagccggtatcacatgtaagcagtgttacaacaactacagataagagcaatgaggttgttgttgattcagcaaagtcagcagcatctaatgtggcagtttctgtaggacaggcagcagacagtgagaagaatggcagcagcgctaaagacaatgacaaggctaagaagcaggctgaatcaatggctgatgttaaggatataaggaaagtccttaacaacaatacaattgcagaatttggctacaacgaaccaactaacagaatcacaattaagattaaagataaagatacagatgaagttattaaggagataccttcagagaaagctcttgagatgcttgccaaggcatgggagcttgcaggtatcatagtagatgagaggagataagctatggcaataagattatctggtatggtatcgggtatggatacagaatcacttgtttcagcgctcgtatcatcatataagttaaagaaagacaatcttgttaaagcacagaccaagctttcatggaagcaggaaaagtggaagaccatgaatacaagtatatatggtttttattcaggaaagctttcaagtgcaagattttctacaagttataatcttaagacatcaacagtgtctaatgataagtatgccaaggtaacagcaagttcatctgctgttaatggtacacagagacttaaggttaagcagctggcgtcaacaggatatcttacaggtggacagattaaagctgctgatggaagcaaggttacaggtgatactaagatatcagacatagttggaacaacagatggttctataagttttaagactgcttctggaaccaagagtattgatataacatcagatatgaatgttaaccagttcgtatctaagttaaaggaagctggcgttaatgcaagttttgatgagaataatgcaagattctttataagctctaaggagtcaggcaaggataacgatttctcacttgtggctaatgactctaacggacttaatgcattacagaagcttggaatatatacagttaatgatactgattcagcagaatacaagagactggcagctttaacagagggcagtgatgcatataatacagaacttgaaggtatgtatactaagattactgccaaggatacagcgaagagttatgctgataagtataatgcagccaaggataagcttgatgcactggcagcagatgatacttgggatcattcattgacattagatgaatatgtcgcaaagcttaagacagagacaccagatattcttaatgcttatgataagtataagaaggaaaaggtggattcagagggcaatacagttaaagattctgatggcaaagttgtgtacgaatatgacacagaggctatggaaaaagatggtgtcaaggatgaatatgaggctgcggtaaagaaaaaagcgtctaatgaatcactgattaaggtgtatgatgataattccaaggttatacgggatactaaggattatgtgacaatcggcgatgatggaaaagctgtggcagatgcttctaatgccaatgtattacaggaagtaagcgatactaatgctgacagacaggctaaagctaaggcactgcttgactctaagattgcaatggcatcaaatgttactggtagtgcatcatcttcaggtgctgtcagaataacaggacaggattcagagattgagcttaatggggcaacatttactaacaactctaataactactcaatcaatggtcttacaattgaggcaatggaagttactggtaatgatgaagtaactattacaaccaacacagatgtagatggtatatatgatatgattaagggcttccttaaggattataatgaccttgtcaagtctgtagatgttgcctacaatgcggcaagttctaagggatatgagcctcttacaagtgatgagaaagatgcaatgtctgatgatgaggttaagaagtgggaagaaaagattaaggattcacttcttagaaaagactcaacacttggaagtgttcttgatactatgaagaatgatatggcaagatcattcaaggtgggagataagtcttattcactttctagttttggaatagctacacttggatattttaattctccagagaatgaaacaggtgtatatcatatagatggtgataaggatgattctaagacatcagctaatacagataaattaagagagatgatatctaatgaccctgatacggttatatcattcttttcacagttatctacacaattgtatactgatcttggaaagaagatggcagcatcatcaacaagcagtgcttatactatatataatgataagcagatgaatacacagtattcagagtataatactaagatatcagaggcagaagataaggttactacatgggaagattattattttagtaagttctcagcaatggaatcagctttggctaagatgaatgcgcagtcatcatcgttgacaggtttattcagttaattatagaatatattaaattatgggatatccatatatcatggaggagttatggcatttaatcagaatatcgcacaggagtataaccgtaataaaattcttacagcaagtccggcagagcttacacttatgctttatgaaggggcaattaaattctgtaacattgcattaattgctatagagaagcaggactatgaaaaagcaaatattaatattaagaaagctgagaacataataacggagtttaaggtgacacttaatcataaatatccggttgctaaggattttgaaaatgtatataattatatatattcattattggttgatgctaatattaaaaaagacactgagatacttaataaggcacttgatgaaatcaggggcatgagagatacatggaaagaagttatgaaccgaacaaggtcaatgaataagtaggagacagatatgactactaattatcttcagattatgatagacagtcttaagaagaagaaggatattcttgataagattatagttcttaatgagactcagaataagatactttctaatacagagtttgatcatgacatattcgaaaataatatgcatgaaaagggtgaatgcattgatgaattggagaagcttgatgaaggctttcagagtgtatttgaccgtattaaggaagaactcagcgataataaacagatgtattctgatgaaatcgaaactatgaagacacttattaaagcagttacagaacttggcgctaagatagaagttcaggaagctcgaaataaggttaaggttgaggcaatgtttcgcagggaacgtcaggagcataaggaagctaaaagaagtgcttcaatggcgaagtcatattatcagaatatgagccgtgtaagtgatgaacctcagtttatggatacgaagcagtaaaatttttttaaaaagttatattacggactaaagttttggtactaaggtccgatatataaagtacaagggaacagaaagtttcctgtaaaccataaccagatgcagcagggacgctgtatcacaatataatttcaaggaggaaaatattatggtagtacaacacaatttagcagcaatgaacacaaacagacagatgggtgtagttacaagctcactccagaagtcaacagagaagttatcttcaggttacaagattaaccgtgccggcgatgatgcagctggtctttcaatctcagagaagatgagaagccagattagaggtcttaacaaggcatctgataatgcacaggatggtatctctcttatccaggtagcagaaggtgcccttaacgagacacattcaattcttcagagaatgaatgagcttgcaacacaggcagctaatgatactaatacagcaactgatagaactgctattgatgcagagatgaagcagcttacatctgaaattgacagaatcagaaagacaacacagttcaatactcagaatctgttagatggtagctttactaagaagaatcttcaggttggttcactctcaggtcagactattcagattagtattggaaatatggatgcagcaacattatttggtgatgttgccaacattaatgtaactgataatgagaaatctggaaattctatgtctataattcagaaagctatagacacagtatcaactcagagatctacacttggtgctcttcagaacagacttgagcacacaatcaacaatctggatacaacaagcgagaatacttcagcagcagagtctcgtattcgtgatacagatatggctgatgagatggtacagtacagcaagaataatattctttcacaggctggacagtcaatgcttgcacaggctaatcagcagacacagggagttctttcacttctcggataattattactactataagcaaagaggctggtgtgtaacaccagccttttttgcttataatttatatataagttgatgattgcaggtatatattgaattattatatattactaatagaatgagagagaattatgcaatttgatagaagtttttttgaggatgaaataagaagtggattttacgttactgctgagatgaaacaggcatgggcatcacagcttgaagtatgggaggattttgacagggcttgcagaaaaaatgggataacatattttgctgattggggaactcttttgggtgcagtcaggcatggtggtttcataccttgggatgatgatatggatgtatgcatgaaaagagaagattataatagatttaatctgatagcaaaggatataatgccttgtggatatgatgtgtataatatatatagtgatgaaaataatgacaatatgcttacaagaataatcaatggaagaaatataagctttagtaaagaacatcttgaaaaatatcacggatgtccatatatagctggattagatatatttccgttagattatatagctccacaacaggaggatgctacatttcaggagaaaattattcgtatagtcataagcgtgagtgtatttataaaaaaacataaagatgagttgaaaaatgaagaaaatctggaaattaaaaaggaattggaatcgtatgttaaacagatagagcaactgtgtgccgttacatttgatagaaataaagatattcaacagcagataaggatgcttatagatagactatgtagtttatatgagggaaatgaagcggaagagatagcacctttacttctatggatggagaagaaagagttcaaattcccaaaagcagtgtacactgaaccagtaatgcttaaattcgagaatatatatgtgccggctccctgtgagtatgattatgttctaaaaaaagaatatggtgattatcataaagttgtgcttgagtcagatgatgcacatgaatatccgtattactataagtataaaaagttccttgcagataatgggatagagatatgtacattcaaaatgaatatgacagaatatgacaagttcatgaataatatacatgaagaacgaaagaaacgcagattaacaaaaaaggataataaaaaaaagatactttttatgccattcaaagctcaaaattggaaaaatatggagcctttatggcgtaaatatatagaagatgctaataacgatgtgattgttatgccaatatcatattactacaagaatatagatggaacagttgaacagtatattgaaaatgaaaagtatcctgaatatattcatgctatatccgaggatgattatgatattactacttgttatcaggatgaaataattattcagaatccgtatgatgagtataatgttgcgacaactgtgcacccacagtattatgcaaaaactctaattcaaaatacggataaacttatatatgttccgtggtttgtaacagatgaaatacaacaggatgatatgcgttcagataagagcatggatgcatatgttaatgtgcctggggttgtatatgcagatgaggtgatagtccaatctgataatatcagaaatctttatataagaaaattagctggtatatatggagatgaaactacatcaatatgggaaaataagataataacagagatataggatggagaaaaaatgcatatcaatgatgaacagatatcgatgagtcaggatgaaattgtatcatgtgtgacagaattattagatggaattgataaaaatgaattatcagatttatatgaatttaaaaaatataaatataaacatcttgttgcactttttttgtcaaagaatattataagtggaggaaatgaactttatagatatgtatataaaatggtaaatgatttagcatgcaaaacagtgaatggcaaatataaaaataatgaaaaggtaaaggtatgttttctggcaatatctgctgcagaatggccagcagagagattgtataaatatttagataatgatgaaaggtttgaggtgaaggttataccagttccattaattggaagagatccagaagatagaaaaagaatgtataatcagacatatttattttttcataatgaaggatatcaggttgagaaaatatatgataccgatacaggagaagtcagaacatgggatgacataaattggaagcctgatattgttgtacatgttagtccctggtatttagatattgtaaaatgttaccagataacagaattgccattatctgtgataaatatatatatatcttatggattaagcgttgcaggtttaaataataataaatatgaaatacagtgtcagtgtgataaagaatttatgaatcttatgtggagagtttatactgagacacctaaaaattataataattttgtgcaatttcagactttgaatgcttgtaatgtaagatatagtggatattgtaaaatggattatttttatgaggagcataaatatgatgaaaattatatcagaaatatgtggaaggtgcctgtcggaagagatgaaaaggattttaagaaagtaataatagcacctcatttcacggtaggaaatacatcgttattaaaattgtctacgtttgcagataatatgtttttttggagatttattgccaaaaaatatagtgataaagttttatttgtattcaaaccacatccaaatcttagaaataatctgataataaatggatatatggaatctgtagatgaatacgacagatatctagatgatttaaggaaattaaataatttttcagtaatggaagaagcagattatcttacattatttgacacatcggatgctatgattactgattcggcgtcttttataggagagtacatatatacaggaaaaccattgcttcatcttaccaggccagaacagcaatataatgcacttggattggaattgcagaaagcacattatcatgtgtctggaaaagattatattggaattgatgaatttttatatgatgttgttatatctggaaatgatacaatgaaggagaaaaggaaacaggtatatttagaagaacttgattatgttgaaaagaatgggaagaaagcagcacaatatatctatgatgatattatagataatctgtttaaaaatgcctgagattatgcatatagcttatctatataaaagaaaatactgttgtaaagagggtaatgttaaaatatatgattataattgatatattatctcctgttggaggaaagaagggtggaattgaaaatgtaataaaacagtggacggaaaatcttccattgatgggatttgaggttagagtaatacatatgtcaccaggaattaaatatttaaatggatatgataaagcatatgcatttaacgatggtgggaataatgatatagatcaaaaactgaagctttttgttcgaaattatgcgggttttattctaaaatatggaatgcctgatatatgtatagcaattaactggccagtaatgagtgtggtagcggatactgttagaaaaatacttaaagtaaattttaaagttatatcatgggtacacaattctataatagaatataaacatgcaggtttaggtggagttgatgagatgttgtgtgctgatgcgcatttgtgtattagtagaaataatgagaaaaatttacttaacaggacaaagaaagaaagtgtgtattatgttggaaatccagttaaaatgcagaaatttatagagagaacaaatggggaaaaacaactgtgttacgtaggaagacttcaggaaattaagagggtagatattattttagaagcattatatagagcacataataaatggaatctgagagttgttggtgatggagaatcattgcaggaactgattaaaataaccgaatatttagaattgcaggaacaagttgagtatataggatggaaagagaatccatgggagtattgtaaagatgcatgtgcattagttgcagcatcagagtatgaagggtatatgcttacgggagcagaagcaatgtctatgggattaacagtaatatctacgccggttgagggattgatagattatcttataccaggcaggaatggatatttgtttgaaaagaataatgctaaggaattagcggcaattctcgattatttgtatgaaggaaaacttcctttatgtgatagacgagaatgtaaaaaatcggttgaagaattaaaggatacatattattttgaaaaaataaaaaaaattatggaggaagtaatggatacatgaacagagtgttgacatttggagtgtatgattattttcatcttggccatctgagattgttcaaacaatgcaaagaatatggagattatctgattgttgctgtacaggatgggaactatataaaaaaatataaaccagatgctaatatattatattcaacagaggaaagggttgaaataatagaggcattaaaagtggtagatagagtggttgtatatcaaactgtatgtacagattttcttgaaacaatagattttgaagtgctagctctaggagaagatcatgtaggagagagatttgacaagattgtagaatggtgtgatacgaatgaaaagaaggttgtcagattaaaacgaacgaaaggtataagttcaacaattgtaaaggacagagtaaaatcattaaaataaagggaaacagccatgacagaagaatgaaagtagatggtacatacaataaaacaaatttgggaataatttttaatctgcgattatatatttgattgcattaattaaattataaataaaaggtgaattgaataaaatgagagttaatgaaaaacacgtgaatattgattatcagaagactaaagattttttcaaacacagagcagaaaagtttcaagaaaataacccatattccgtaacgatgtatcaggataataataaggagttggtaagagaacgaaatgaatatgaaactgaaaattactttctctacttagtatagataaagagtctgaaattttagatgtggcatgcggtattggaagatgggctgatgcgattaaaacagaggtgaagaaatactgtggcattgattttagcgatgaattaatccgaattgcaactgagagaaataaaagagataataattattattatgtgggttcaacaagtcaattggagaaaataataaaacaaaaaaggaaaggaaaatttaacatagttttaattgtcggaattatgatgtacttgaacgataatgatgtgattgaaatgctacagcaaattgagaggtgctgtgaaaaggaagcagttatacgcatcagagaacctattgggattgaagaacgcctgactttaaaagattattattcagatgaattgaagtgtgattataatgcaatatatagaacaagagatgaaataaaagaaattttaaaagatacattattgaataaaaattttgctatagaaacagagagattcctgtttgaagctgatgagttaaataatgatgagttaaataataggaaggaaacaaaacaatattattatattttaaaaagaaaatgataaataggggttaagtatttagaaatgaggtcgataaataatacataagtgataaacagataacaataaaaaatcatgtttattatccgatataaaatggagttatatatatcaaggaggaattaattatggtagtacagcataacctttcagcaatgaacacaaacagacagatgggaatggtaacaagtgcccttcagaagtcaacagagaaattatcatcaggatataagattaacagagcagcagatgatgcagcgggtctttcaatctcagaaaagatgagagctcagatgagaggtcttgataaagcatctgacaatgcacaggatggtatctcacttattcaggtagctgaaggtgctcttaatgagacacattcaattcttcagagaatgaatgagttagcaacacaggcagctaatgatactaatacagcaacagacagaactgctattgatgcagagatgaagcagcttacatctgaaattgacagaatcagaaagacaacacagttcaatactcagaatctgttagatggtagctttactaagaagaatcttcaggttggttcactctcaggtcagactattcagattagtattggaaatatggatgcagcaacattatttggtgatgttgccaacattaatgtaactgataatgagaaatctggaaattctatgtctataattcagaaagctatagacacagtatcaactcagagatctacacttggtgctcttcagaacagacttgagcacacaatcaacaatctggatacaacaagcgagaatacttcagcagcagagtctcgtattcgtgatacagatatggctgatgagatggtacagtacagcaagaataatattcttgcacaggctggacagtcaatgcttacacaggctaatcagcagacacagggtgtactttcattattacagtagaacatatgatacattaagtttatttgctgatatcaaacaaattactgattgtttgatatcagcttttttattaatgtttgaagattaggacaatttatggggaaaatattattttatcaatggaatgcattcatgcaaaggggtattgaggatgctcttaaagcattgcatatagattatgatacctactatgatattcccaaaaattgggataaagatgttgcgttttctaatagatttattaagaaaattgaaaaagaaaattattcgaagatattatcagttaattttttaccattaatttcagatatatgtgagaacagaaagataaagtatatttcgtgggtatacgattcaccattgcatattagaagaaaaaatgctctgaaaaatgcatgtaacacaatatacttctttgatcgtgttcaggcggacacctacagacgagaaggagtagagggagccagatatttgccacttgcatctagtccgaaggtgtttggaataggtgaaactgtatctgataatatagagtacacatcggatgtggcttttcttggacaattgtataaatctgaattttatgatatagctggtggattaagtcaatataatcgaggatacctggaagctgttatggatgcacaaatcgtaatgccacaaggatatattgtggatgagatgttggattctgatgctatgggcagtataaataaagattttctaaaaaaaagcaatggaacatatatggtaacaaaagaggaattatcgtatactcttgctaaagagattactggaagattgcgtgtcactgcactttctgtgcttcagaacagatttgatgtggatgtgtattctggtgatagatcagaacagcttaataaagtgaattacaaaggatacgcagattattacaacagaatgccagaagtgtttacgagaagtagaataaatcttaatatgtcactatgcactatccagtcggggattccattgagagtgattgatattatggcctgcagagggtttgttatttctaatgcgcagcctgagttgtatgaatattttgttccgggtcaggatattgaaatatatgaagatattccagatcttgtatataaggtaagatattatctggaacatgaagagcaacgaaaacaaattgcagagaatggatataaaaagatatgtgcaaaatttaattttgaagacagggtaaagagaatgttagaaatctaaagtgtaaatatcaggaggaatactatggattttaataaatatggatacaatggatttgacccaaaaccccaatttaatacaaagttttacaaaggagaggatttgtactctgatggggatatagaagatgaggttattaaaattattgctaaaaatgaaacaactgactatgaaagatacataaatgagaactactcatggccagttttttatcatttgactagaataagacagaatttgcttaactggtatccgtttaatgaagatgcagatgtacttgaaattggttgtggtatgggagcaattacagaattactctgtaaaaaatgctcaaatgttacagctgttgaattgtctaaaagaagagcaaccgctacatacttaagatgtagggcatatgaaaaccttgagataattgttggaaatctaaatgatatcgaatttgataaaaaatatgattatatcactcttataggcgtgttagaatatcaaaataattatacatcatctgagaatccgtttaaagattttttggttaaaattaagaaattactcaagccagatggaaaattgcttatagcaatcgaaaataaatatggattgaaatactggtgtggagcgccagaagatcatagtggaatacccttcgatggaattaatgattataaatatagcaatattgcaagaacgttttctaagaagcagttggaaaacattattaaacagtcagggtttgataaaacatttttttactatccgttgccagattataagatgccacaggttatatactcagatgattatctcccgttaaatggatcagttgataactggattccttattatcagcctaataataaatcaatgatatcagatgaagaacacctttataaggatttagtagataatggtgtgtttgaattctttgcaaattcatttctggtagaatgtacaggaactaatattgaagttggtagagtatcatatgcagttgatagtccatttagaaaagcaaaatatagcttaattacagcattttcaaaagaaaaaggcttttacaaaaaggcagaagatgtaagtaggtcattgctgtatcagattaaagctaatcatgatgatatagcaaatcatgggattaatatctgcaaaacacaggtagatggcaatattttgtatattgaaagagcaactgggaaaccgcttacagatattcttatagaggcatacgatagtggtaacaaagagaaaatatatggattatgggatagaatctatgatgaaattaaaagaagttctgagacagcaaatgaattatctacaaattccgacttcgcgaacactccaaagttaaatcatgatgataaaataatgttgaatgcatatattgatatgattcataagaattgttttatagatgaagaggggaagtttaaatggatagatcaggagtggtgtgttaagaatataccagcaagttatttgctatactataatatattagaattatatatgtcaaacaggtatttaaatacaattgtttcgtttgatgaagttatggaatattatggattgaaagacaatgtagattattatacagtaataagggaacagataatgaatgaaatttttgatggctatatctgctctaattatgctaaattgtcaaaaaatgataataaggcaattgctgataatgttacaatgttatatcgaagtatgacagaaattaaattaaacgaagtagaatgtaaagtcaatgaggtaattgataagtatggaataaaaggaatgatagaatatgtaagttcattatcaaatgattcaatacttaataatattccagcagtcccacaatttatagtcagatatctaaaaagcagtgaaaaagaaaagcgtataatagagaatcaagttacaagctatcaggatataaaggaacaaatctaatagaggaagagatgcatggataaacaacaatataaacaatatgttactgatttgctgaatgaacataacagacagtcaatagatgaattagttgcattatatgaggatggagattttatcagggattatgcatcagaggatacagagttaggatatatatatatagttacatgtatatatcgtgaggaacataatgaacatataaaaaataatattatgtctgtcaggagaacaaaagaaagactgatacaaataattacatattgtaaatttctattgtggcgtattgagttaatgttcgatgatgaagctgttgtagaactgatgaagtatcttgattatgaaaagctttctgtgatttttttagtggaactgattagaattggttcgatagataaaatttctatgtatataaaattaagtatgctatataagaaacggatgttagatacaaatgcatttcaattattaagatatgctaacaatcaggaaccagggaacgagcagatagtatgtatgttggcagatatgtgcattcaatatggaaatattgaatcagcaaagaaactattagaaacgatagagaagccgggtagaatcacagaagtgttgttaagaaaggtgtattcggatgaatgataaaaagatatgttttatcatgtgtgtcaataatgagatgtatgaagaagaatgtttgtattatatcaatcatttagtgattccaaatggatatgaaatagatgttatatcaatcaaagaagcaaagtccatgacagagggatacaatgcagcaatggtagctacagatgctaaatacaaaatatatatgcatcaggatgtttttttagtgaaatcagattttatacaggatatgttagatgtgttttccaatccagaagttggcatgattgggatggttggagctgagaaattgtctaaggatggatgtatatggaatggtgacagagtaggcagaatttattcgagtaacattataagtacacatctatttgttgcatcagataagcaaaacaaaccatatacagaagtagaagtagttgatggactatttattgcgacacaatatgatgtaaaatggcgtgaagatatttttgatggatgggatttttatgacatatcacaaagcaaagaatttcatagagcaggatataaagtagtagttccttatatggataaaccatggtgcctccatgatgatggaatacttaatctggaaaattatgataaatataggcaaatatttcttaaagaatataaaaggtgaaataatttcatgaatatattgatatttgaatatcataactttggaatagaagatgtaaaagagtgctttgaaaaaaacggacataagtataagattaaggaaacagtgctttatcgtgaagatgtaagtgatgaatttgacgaattgtttaatgcggagtttgataaagggtgtaatggtgagaagtatgattgtgtattcacgtttaattatagtcctgttatatctaataattgtaacagaaggaatataccgtatatagcatttatatatgataatccacaggttttattgtattcatacactataattaataaatgtaattatgtgtttatatttgataaattacaatatcaggaatttaaaaatgcaggaattaatactgtatattatgcgccattggctgttaacactgatagattgaagcgaataactagtaatgtggatgaaagagataagaatgttttatcatgcgatatttcatttgttggttcattgtatgatgaaaaacataatttttttgacaggctggagggaattagtgactataccagaggttatattgatgctgtaattaaagcacagagtaatatttatggatgtttttttctagagaaattgttaacggataatattcttgatgatatgcaaaaagcttgtcctgtaaagccaagtgcaacgggagttgaaacagtcagatatctgtatgctaattattttctagcgaggaaactggcgtctgatgataggaaagaaactttggaaatgcttggaaaagaattgggtaatcagtatgaaattaatctgtatacaaactgttcaaaaaggtacatacaaggcgttaatgttaaaggaccggttgattattatgagtgcatgcctatagtatttaataatagtaatattaatctcaatataacactcagaagtatcaagtcggggattccattgagagcaatggatatatgtgggtcaggaggttttctattatcgaattatcaggcggatttttatgatgtatttgtgccaggggaagatgttgtattatatgattcattagatgaaatgataaaaaaatgcagatattatcttggacatgaaaaggaaagacaacagattgccgataatggatatggaaagatagtttctggacatacatatgatattcgatttaaagaaatatttgatgtcgtttttaataaagatagaggattatatttatgaataaaatacaaaatgatatgcaaacaatcataaagaatgttgtggataaaaaagattattatacagcttatgaatcattattcatatatgtaaaaacatatggaatagatgattatgtaaaacaatataaatggatggtaaatgaatatggaccgcaggtagctgtcatatgtcttgatggtgaagaaagttctgtgtgtgaatatatacagatgcagacatataaaaatattgagattattagtttatcgcaggatgagacaattgaagaggcaatggaatatataaagacaaaggaaagtaaatatgtaacattttgggaaaacaattatttatatgacataaataaaatagcagaaatgatatttataatggaaagtggaagatatgatactattgtatccccgcgaatgtatgcagataaaaatggtaatatatttgctgataaggattatgaatatgatgagtcattaagtggtgctgttatgaaaggaaagatactggttaattattgtgttaataacaatattaatttatttggtacattatcatgtttaatgacaacaaaagataatattagtagaaccatttggaacgaagaaaagtataagacaaaagcaataaaaagactgtctgttttgcttcatataattaatgatgggatagtttattatatggaatcaccttatttagctgtaaaacaaaggaagaaatatgatgataaaaatgaaaaaaaagaatataaaaaattattagatgagctatcaataaaatatttgacaagttctaataatgtcattaagaaattaagaaaagaaattacattcttttatacagataagggtgaatattataatttaaaaccaatagcagatgaggctgaaataagaggatatatagtacattttacatcggataaaaaggaaaaagctgaaataggagtgtattgccagcatatttgttatcctgaaaattctcaattttccctggtgttattgcatgatttggctcaagggcataatagatggccaaatctttgggaattggaaaagtgggatagatttgatataggtattgttccgggaaaatcatgggctgaaagatggagaaaatgcgccagcttatattatgttaatccgagatgtggaacatatgagtttggataccccaaaagtgattatgttaatgatacaagcgtttctgaaagagcagctgaaattagaaaaaaattaaacttgcctgatagatttacagtgttgtatgcaccatcatgggaaaatgataataaagaagatgaattcattaaagtggtagaacaacttgatataaatatgcttgtaaagcaatctgactggtcagaggcatatcaacatattatagataatattaaatatatgcgctcattacatgaaggtaaatatgataatttatattatattgaaccagaagagagcatcatgacagctttagcattatgcgatatggttgtttctgatgaatcaagtgtgatggctgaggcacttatgttcggaaagcctagtattgcggtgacggactggatgataccagatcagaatcctcctagaccagcaagtgttcctatggattatgtcataaaatgtaaaaagaacgatttaagagagaaggttttatcagttatgaatcactcggaagagtatgaaagtatattgcagaagggaagagatacatttagtaatcagggaaatgtatgtagggatataatggatgcaatagactattatactcagggtggaacagaaaaaagctttatgagcaagaagcttgagcctgaataccaaatgtttaatatgtggaattaaaacaagtcgttcccgcctattactgggctgggaacgacttatctattatctggagcatgcggatgtcgtaagtatggttatttacaacggtttcatatccgtgtctggcgatttcatttctttcatcgtcatgattgagataataagcacataattctttgagatgattttcactttcatatgcaacaaggtctttgcctatttcaaagaactctggtaattctgcctgataattagttataaggaagcctccacatccaagaacatcaaatattcggagagaaagaccagaacgaatggatttggctgttatatttagatttattttgctgttgtggaatataacaggcatttcagtaagtgattttgcaaaacctttgttgtgtatatgaggcatgctgctagtgtcgctgcctgtatatatgtcaacattaaatgaatcagacaacagctttaaaagacgcagcctttcctgttcagcaaccttaacgcttaaatattcctgagcaagaagagctttattattggcacggtagccttctggaaactcatagtgatatggtatacagtttaataatcgttttgtcatatcatcagtaagcatatcttcgataaaattgtatccatagacaccgagctgtgcattgataattccgtcgacataacctttttcatattctggaagaattgcgcggttgaaaggacacttttcctgatatgtggatcctatgaaggatatatcacttgtaaattttctgttttcctgtgtacttgcattctttataacctcatcgttacggcggatattagttgcaagtggaatatggaaaacatgtcccttgttataaggttcaaattcattaaataacattttgtcaaagaggaatactctgttaactgaattagataaagaattagaatatagttcaagtacagggctgtctacaatgagactgatatacacgatattaacaatcttgcatacatcagaaagccacgggaaaaagttaattgtgaatacgaatgtataattgttattcattaacttaggagaaacaattgaaacacattcacttggtgataaatttttattacttatttcaatagtctcctgatcaacatcaagtcccagtcttttgaaagagtaaataatatctggctcacatatactgccatatctgtagaaatatattttcatattttcaatctcctataattataaggtagtgtaaaagtttattagtcttttttttcagcaagtgttatatattgaaatgctttaaataaattaggatttttatgagaagataatttagttaatatgttgataaaatcagtatcatcttcagataacgaagttggtaaattacacgcattcatagctattatttgaaaattgttatttttatacatttttataatttcatcgcatgtaaagaaatgaatgtgagttttgtctaaaagtcctgtatcagtatattcaaaatgtccatcaataagttcgtgtaacacagaataatgcataaggttaggaatgctgcttattatttttcctctttcttttaaaatatgatggcaattatttataactttagatggatcgtgaaggtgttccaatacatctccaaataaaatataatcgaatttaatatcgttccatatctcaacggaatcttcaatattagcaacctttactgaagcaagatgggatgcaatattggcagaaataggattgatatcaattccatataggttagaattatggtaaatttcttttattttaagtaaagttgcaccgcaatcacatccaatttcaagaatgttaagtttcctatctgggctttcattaatcatgttgacaagattgatgcttggagctgtattaatgtaattcatgtgccacttttttcgtatgttgtatgtatcattgtttataatgtgttctgtatcataatatgagtgataatttccagtataatattgataaacattagtagctatgtatgtgaattgatcttttaaaatatttttaataaaaaagtcagtgtaacacaatttattggacattattttagaatcgaaaggagtatcttttgtgaataacttgtgactaagtaaaatggtatcattttctggcataataattttcgataatgtgacattgttttgaatattattgtttacataatctaatgcatcagcgaatgaattgatgttacagtgacatttgttgatatcctgtggagcaatagcaaaaattcctttatcaggatttagtgcattagaaatattatacagggttccaggtagaagaaaactatttggatctaatataagaatatcgttatcagaatctataaattctgatatacatgtatttagaatagtagaaaaaccttctagtttttcatcacatataatataatttatttgattttgtgacttaagaaattcatttaaaccatcagatgaatagttatcaactataataattgaatttaatgctacattgtgaaatgtacataattgtttaatttgggatattagtatctctttttgattatgagctatcattattatggaaatattgttcatttgaatcctcgtattatatataagtctctggttgtgttaaaaaggttgcaattaattataaagatgataatattatttattattataacagttattgtacaatataacaattggtgagaaaaatacggagaaaatcatgacagataagaatacattttataatatgttaaagagtaatgccgagagccagccagacgctgtggctgtcgtttatgatacgatgaaggttacttatgcgaagctttttgatgatgtaactaagaaggcattacattttcagaaatttgaaggaaagaggattgcaatattcggtccggcttcatatagatggatcgttaatatgttcggaacgattgttgcgggaaaggagcttgcacttgttgatttcttccttcctcatgattcgagggttgaccttcttaagaagacggaagttaattatacactgacatctactaaccagtatattctctctgatgagaattctattatcatatcaagtgcggagaaggataatgttgacggacttatatatgatgagaatacgcaggagggcgatattatcatgtttacggctacagctaatgaatgtgataagccggttgttctgtctgttgataatattcttaatgcggttatggcgataaacagcagggttgaatgtacaagtgatgatattgtgcttgcacagattccgcttcataatgaatttggatttatatacagcctcatatggcctctgtataatggcgctatggtgtgtataggcagaggcttaagacatgttgatgcagatacttattattataatccaactattcttataggtactccttctatgattgactatcagcgagctataagtgggtttaataaagaactcaatactattatcataggtggtgcaagctgcccgttcagactatttgagaatctctgtgacagtgatttgaaggtttataatatatatggaatgacagagacttcgggttgtgtgggggttaatgagctttacgatggttcgtatactctttttgataataatgcagtatctattgctgatgatggagagattattgtaagtggaccatgtgtcatgaaaggctattataatgacgtggagtctactgaaaatgtattaaaagacggtatgtatcatacaggtgattacggaaggattaacaatgccggcagacttgttctgttgcagcgcaatccggatattattctgttgcctacaggtgagaagataagccgtgtaagaactaatgaacagattacagctattaatggagttgcggaaggttttataacattttataataacaggcttacggcggttattgtgcctattgataagagtgcaactgaggatatattcaagagacgtattgacaagtataacgagaaaaaaggttaccgctgggagattcagaagattgtgttaagaaaagaacctttgccaagaaagtctgatggcacggttgatgaggaagctgtatgtgagtttattggtgattgatattaactttccaccaatccagccgatatatattctataagttcataaagaaaggtgattagaatcatggatgattacagacagcagcagatagatgtacttaaggaagctgttccttacagcgagaagcttattggagcaatagagaaagtctcagaagaactttcaggagttccttttccagagactcatgatgcggtgaatgttattattgaagggcttaactggctttttgaagtatataatggaactaatgatattattgaggctggggcagttgacgaggcagaagctaattctggcgttaaggagctttcagaggctgtaaaggctgatgatgatgtggctgtttctaaagcgcttgtaaggcttagtacatttgttaagcagttacatgatgcaggaagcagactgattaatgaataataagaaacataaaggcatccgccggtttatgtattacatgaaccagacggatgccttattttatattatggtagttagatatagccattgaacatcatgcctgagtaggcagaaagattataagggtcattcacaggcttatgtggattcttataagcgacaatcttattgtttacatagttcatagggttgatggagatatcatcagcctttctttggattgatttcttgaatgaatccaaagcgttaaatacatcggaaagtgtgccgtcagaagcagctttctgaataaccaccttattaacttcaagcgaaccctcatcacttactgtaagtccattgcgttcaagctgtggctggtaagccttcattattcttgaaaattctttctttaacttggcattgccctcaaacttatcgttctctttatctgcggcgatggaaacaagtctgttgtagccggaaacaagttctgtaatgctttctgtgattgaatcagcatcatctttaagactgatggttgccggcttgtcagttgtattatgaaatgatattgcaaatgttttgttaattgttatgtcattcgaagcagatgagcgttcttctccattgacagaaaagattgcattgccaggatactgtgttacacggtcaagaccatatgtttcaatgaagttagtattcttctccatagtaggctcatcaaaaccttccacgaaatcaggattgtctgtctgaatatcgttattaggcctgatgttaaatattgtaggcttgattacacttacacctgtcatgtctgattcaatgttcagcgcagtattgccgaggttgtcttcacttacagaagcattaagtccgatattggaacggttaataagtctggcaagcttgttctgtatgtcagaattgctctcttcctcatctacattaaactggaattcataggtcagattattgatgttcaaatcaaatgaataatctcctggcttaactgtgcggctgttaggctgcaggtaatgtccggtattaatctggcttgttgcaagctggcggacttctatatcaaggcttgtatcatcggcagatgagctgtcgcctataaatgtggctgttaccgcatcaggattgtctgacactgctgatttcttaaataccatgccgtgaccgtcgcttcctgaaagctcattggcaatgttacttaattctctggcattctctttaaggtcgattgcatatttctgcgcagcctctgacatatctgttttatatgtaggagtctgactgttagatttcagaactctgccatatgtattctttaattgtgctttagtgtgtgtatcgtactttgagttagtcttatgtccatactgggcaagataatagctgtacacgctgctgatcataacagtcacctccttgtctgtaataatcggtagaaaatgtaaggaaatccatttccttatatatatcgtatgtttttgtacaaatattataatatgaagttcattttttgtcactatattttctttaaaaaagttgttgacgagttggaatgtactgtgctatattagaacggctatggaagcggtcttttttgcgtgcctgaatttcaacaacccaacattgattaggcgggcaaagaaaccaattggtgttttaacacctacaaaaataataattggaggtggaagttgtgcgagtaaagataacattggcatgtactgagtgtaaacagcgcaattacaacatgactaaggaaaagaaagctcatccagacagaatggaaacaaagaagtattgtaagttctgtaaatcacacacattacacaaggaaacaaagtaattagtacagtgaggagtatttcatgggtgatactgtaaaagctaagaagcagaaaaagaactggttcaaaggtttgaaagctgaattttcaaaaattatttggccagaccgtcagtcgcttactaaggaaaccgtagctgtattggctgtgtccgtattattaggtgtaatcattgcagttgtggatttaattgtccgctttggaattgagttcattgtaaaataaggaataggtgattgtatggatgacgcaaaatggtatgtagttcacacttactcaggttatgagaacaaggtgaaggctaacattgagaagacagttgaaaacagaaatcttcacgatcagattcttgaagttatcgttccacttgaaacagtagtggagattaaggatggctctaagaaagctgctcagaagaaaatgtttcctggatacgttcttgtgaagatggtaatgaacgacgatagttggtatgttgtcagaaacacaagaggtgttacagggtttgttggtcctggatcaaagccagtaccacttacaccaacagaaattaagaatctcggcataagccttgaggaagaacaggaagttaagcctgttatccagttcgctggcaaggtcggcgataaggttatgatcctctctggtgcatgggaagatacagttggtgagattaccaatattaatgagggcaagcagtgccttacaattaatgttgagatgttcggtcgtgaaacaccggtcgagattgatttcacagatgtgaagttattgtaagaagcagtcccgatcctgggacgtgggagaccaaaatgaattagcttcgctaattcatttgcaagaatcacctaaaggtgattcttgggagatggatagcgggtaatattatgatggtcgccaattaccacatttatttttaggaggtgccaaaatggcaaagaaagtaacaggatatattaaattacagattcctgccggcaaggctacaccagctccaccagttggtccagcacttggtcagcacggtgttaacatcgtagaattcacaaagcagttcaatgctaagacagcagatcagggagatcttatcatacctgtagttattacagtttatgctgatagaagcttcagctttattacaaagactccacctgcagcagtacttcttaagaaggcttgcaacattaagtcaggatcaggcgtacctaacaagactaaggttgctactattaagagagcagaagttcagaagatcgctgagcttaagatgccagatcttaacgctgcatctatcgaagcagctacttctatgatcgaaggaacagctaagagtatgggtatcgttgtagaagactaatctacatttgattcatgattattgtgggaggaaagatagaatccttccgatattaccactaggaggtttataatgaaaagaggaaagaaatacgttgaggcagccaagaatattgaccgccagacattatatgaagcagcagacgctatctcattagtaaagaagaacgctactgctaaattcgacgagacaatcgaagcacatatcagaacaggttgtgatggacgtcacgctgagcagcagatcagaggagctgttgttcttccacacggaacaggtaagactgtacgtgtattagtatttgctaagggtgctaaggctgatgaggctcttgcagctggagcagatttcgttggtggcgaggagcttattcctaagatccagaacgataactggttcgagttcgacgttgttgttgcaactccagatatgatgggtgttgttggtcgtcttggtcgtgtacttggtcctaagggattaatgccaaaccctaaggctggtacagttactatggatgtaacaaaagctgttaatgatatcaaggctggtaagatcgagtacagacttgacaagactaatatcattcacgtgccaattggtaaggcttcattcacagaggagcagttatcagacaacttccaggctattatggatgcaatcgttaaggctaagccatcttcacttaagggagcttatcttagaagtgtagttctcacttctactatgggacctggtgttaagttaagcacagccaagtatgtgggttaatcagatttttgattaaaaacggttgacattaatatattttgatagtatactatcagcttgtgagcagcattttgctgttaacataatattttgccgtagacagcaggtccggattcagtattactgatgatggttaaaggtaacacgcctaccgaggatttaaggatttgattaattattccctctctgtcgctggcagagagggttttgtttgtagggaaactatagacgaataatcttcacttaggcaaaatcgcttctatatgaagcaagaatctaacaggaggtaattattcatggctattttaaagaatgtaggccttaagacatctactattgatgagattaaagataactttgatggcgctcagggcgttgttgtagttaactacagcggtcttacagtagaacaggatacacagcttcgtaagcagttaagagaagctggtgtggtttataaggtttataagaacactttagtaaagagagttgttgctggaacagagttcgagccaattactgatgctcttgaaggaactaatgctattgcattctgcaagacagatgctacagcacctgcaagaatcttagctaactttgctaagacagctaatgctcttgagttaaagtgtggcgttgttgaaggaacattctacgatgcagcaggtatcgctacaatcgctactatcccttcaagagaggaacttctttcaaagttacttggaagtatccagtcacctattacaaactttgctcgtgttattaagcagattgctgagaagaacgaggaagttgcttaatcagtttaacactgaattaactatgaaagcagcatagatgctctttcgattttagaataatattaaaaaggagattataataatgacaacacaggaaatcattgaagttattaaaggtttatcagtattagagcttaacgatttagttaaggcttgtgaagaagaattcggcgtatctgcagcagcaggcgttgtagttgcagcagcaggtgctggcgcagcagcagctgaggagaagacagaatttgatgtagagcttacagaagctggagatcagaaggttaaggttatcaaggttgttcgtgaaatcacaggtcttggattaaaggaagctaaggacgttgttgatggcgcacctaaggttgttaaggagcaggcttctaaggaagaggctgaggaaatcaagaagaagcttgaagaagttggagctaaggttactcttaagtaattcacttgattgttctaatgaatataataagaaagacagcgggccttcacggctcctgtcttttcttttttctataaatcacatctttattttattatgccagctatggcagaaacactattatctttatacaattctgaatattcatggaaattttcaaaaatcccttgacatatatatatctttgatgtactatggacaatgcactattgtggtaaattgtgcttattctttgcacatttactgataatgtaatatattaatgtgaagaaaactaaggggtgaaacgtcaatggagaaaaacagattacgcccaataacgtcgggcaaggcaatgcgtatgagtttctcaagacagaaagaagttcttgagatgcctaaccttattgaggtgcagaaggattcttaccagtggtttttgaatgaaggcttgaaagaggtctttgatgacatatctccaattgcagactataatggaagattaagtctggaattcgtagattttgcgttatgtgaagacgaagttaagtattcaattgaagagtgtaaagaaagagatgctacatatgcagcgcctcttaaggttacagtaagacttcataacaaagagacagaaagcatcagcgagcatgagattttcatgggagacctgccattaatgactaagacaggtacatttgtaattaatggtgctgaacgagttattgtcagccagttggtacgttcacctggtatttattatgatatacagaaagataagtatggtaagattttcttgtacagctgtcaggtaattcctaacagaggtgcatggttagagtatgaaacagatgctaatgatatattctatgttaaggttgaccgtaataagaaggttcctattactgttcttatcagagcattaggatttggtactaatgcggagattcttgatatttttggcgaggaacctaagcttcttgctactatggagaaggatacttctactaactatcaggaaggtattcttgaactttataagaagttaagaccaggagaaccattatctgtagagagtgctgaagcacttatttcaggtatgttctttgacccaagaagatatgatcttgcacacgtaggaagatataagtttaataagaagctttctttcaagagcagaattacaggacaggttcttgctgaggatgttgttgatgagaacggaactgttattgcaacagcaggtgagaagcttacaagagaatcagcacaggctattcaggatgcagctgttccttcagtattcattactgtagaagttaaggctgctgatggtacagtatctgacagagttgttaagattctttctaaccgtgcagttgatattaccaaatgggttgatatcagcgaagaagaagctaaggagcttggtgtaacagagtatgtatactatcctgttcttgcacagattcttgctgagaatgagtctttagaggatattaaggaagctattactaagaatattgccgaccttattcctaagcatattacagtagaagatattcttgcttctattaattataatatgcaccttgaatatggtgttggtactaaggatgatatcgatcaccttggaaacagacgtatcagagctgtaggagagcttcttcagaaccagttcagaattggtatctcaagaatggaaagagtggtccgtgagagaatgtctacacaggatcttagcggaatatctccacagtcacttattaatattaagcctgtaacagctgctattaaggaattcttcggaagttcgcagttgtcacagttcatggatcagaataaccctcttagtgagattactcataagagacgtctttcagcccttggtcctggtggtctttcaagagatcgtgcaggtttcgaggttcgagatgtacactatactcattatggtagaatgtgtcctatcgagactcctgaaggacctaacattggtcttattaactctcttgcatcttatgcaagaattaatgaatatggattcgttgaagctccttatcgtattgtagataagtctgatcctaagaatccaagagttactgatgaagtgcgttacttcacagctgatgaggaagatgatttccatgtagcacaggctaatgctgagattgatgagaatggttattttgtaagaaatactgtatctggacgttacagagaagaaacttctcagttcgataagagccagattgatcttatggatgtatctcctaagatggtattctcagttgctacatcaatgattccattccttcagaatgatgactgtacacgtgccctcatgggttctaacatgcagcgtcaggccgtacctcttcttatgacagaagctcctgttatcggaactggtattgagaataagactgctgttgactcaggcgtatgtgtagttgcagaggctgatggtgttgttctttcttctgaatctaacaagattgttatcagagaaaaggatggcaaggcgcgcgaatacaagcttactaagttctcaagaagtaaccagagtaactgctataaccagagacctattgttttcaagggtgatgaggttaaggcaggagatgttattgctgatggtccatctacatctaatggtgagattgccctcggtaagaaccctcttatcggtttcatgacttgggaaggttataactacgaggatgctgtacttcttagtgagcgtctcgtaagagatgatgtgtatacatctattcatattgaagaatatgagacagaagcaagagatactaagttaggacctgaagagattacaagagatcttccttcaac

SEQ ID NO: 560 - DNA, 11005 bp, unidentified
  source 1..11005: mol_type = unassigned DNA
ttattctacagtattcagcttttcaattatattttggttaatcatagaacgaactgctcgttttactgctattctacttccgaaatagagcaagattacagttgctataaaaacaggtacgacatagaaaagatatatatcccataatttgatattgctaccaagtatagagaaaaacactactactgcaccgcccaaaatagttcctaatataattccggtagtcaatgtacgatttatttcattgataatcaatttttgtacagtttctattctcgctcctatcgccctcatcataatataacttttaagatttgagcgaacctgaacatagcttgaaaaaacaatcgctattaaaattattactataaatataaacacactaacgataatttgcaatgtttccagattcacttggtcataaaattccctctgcatctttgcatagttatcatatcttacaccaacagaaattccttccaaattttcgagattattttcaagctcattcacccatacactatcattatggtcaagattttctaaaataatattttcataattcaagtctggataaatcgaaaaaagatattctgtagatataatgagttcatcactattatattgttccttagaatatgttgctgcaactttaactttagctactttaaatttaatatgttcttctatattctgttctgttgcttctgcatcagctataggaataatcatagtaaattcatcaccaactgaacataaataatcaggtgctattatttcaacgccattcttataatttttttcatcaattttaccgttagcaaattcatttatattatttaatactgaatcatatgactgccatttaacagaaagctcaaccaagctatccttgctgctgtcaccgcctgcaagcttaatcatttcatttgtacgcttatgttgaaaaatataattatactcattttttttcgcttcaacaacatacttatataaaagcttattatcaggattttgagaagttaagaaaaaaggtacaaaaagattagaaacagacgcttctaaaacatttattcttttatccgatgttatctcatctgctattttatgtgatacaccacaacctacaggtaaatttatataataaatttttgcagagcttcctccacccatcatatgcaaagaataatctgcgttttgtttaaaatactctggattatcagcatcaaatgaacttcctcttgcattaaataacggaacaaacgaaccaaatattgacattccaacacaaaacattaccaacataacacaagtaaaattttgtagtttatatcttcttccatatgctttatgccaacaacgctttaatttagtttgagattttatctgttttttagatacatatatcgcttctcttaaaggtgcatttttataaaaacgagcgagcaaaatattgaacgaaataaaaatcaatactgcactaagcaaggcaactataatcaaatctaaaatgcttaaatttaagaataagtattgcgacgaaaaagacgatataaattgtaataatagtaacaccaatattgacgcaacacttgaaataaccaaggaacttaaccatataaaaaatccctgaataagtaataattttcttgatttcttctttgaaaaacctatacatctaagtaaattcaaatatcgttcttgttctttaaagaaatataaagaaattgatactattcccataatcgtagtgagtacaaaaaatatcttcactggcattaaaattaaattattagcaaccattttagaagaaatcatttgttgagaatcattatagtatacacttttacttgaaatatttcttatcaaaaatgagttttcagctgctattatatgtatatactttggtgaagctttactatttgttgttaatattgatggaaataaaagtttttcactttgatagtcatagtgcaattttattttatttgaaaaattctttataattccagtcaatataaagcttttcttttctgtgtttccatctgaatttttaatttcaagttctaccttatctcctattttacttttcaatccaagaatatcatatgtacttttttctattgcaatttcattctcagattttggcatttctccagattcaaaatgtaatgataagagtgtacttacattgtcatttacatttcctatccaaatatccgaagggcttttacttttaacttcccaaattccacttataattcctgctttttcttcaactaattgagattccttttctctgaaattctcttggtctacataaaatcgaattgattcataagcaccacctttttctattttataattttctacaagagaatatttaaaactattactgtaccaaagaatagtaagaaaagcaattaagaataatgatatacataaaactatacctatacaccgtttcggatatgatttcatatattttttagtaagatataaataacttttcattatatatcaccacccaaaatgccatcacttattgttataactcttgaaaatcttttagcgatattttcatcgtgagttacaacaagcagtgtaacagaatactcttttgacatatcaaataaaagctccattacagattgtgtagtttttttatcaagatttcctgtaggttcatcacacagtaaaagagatggtcgatttatcaaagctcttgcaagtgcaacacgctgttgctgaccacctgaaagctgtccaggaagatgattcattctgtctttaagctcaagacgctctataagcttatctacatatttatcatctatatttttattttgcaacataagaggaagaattatattttcatatgcagtaagttcgggcaaaagattaaatgattgaaaaactactcctatatgttcaagacgaaaatcatcacattgattttgtgacattttagaaaaatctgtatcaccatattttatacttccgtcagtagcctgttccaaacctccaagcaaatgcagaagtgtagattttcccgaaccacttgtacctgttattgcaatttgttcaccatcgtttatttcaaaattacaaggctttaatgcctcaactacaatatttccttgcttatatgtcttttttacatcttttactactattttcatatcaaattctccatatattcaaaaaaggaagagcaattctgccttttttgttaatctattgtttaattatttaactgtaacattactcaccttatttcatattattaacctcctattaatttataatattttttatcaaaataaattttaattttttaaaaacatcgaaacaccaactttctgtttatattttttaaattcacaattattttatatctcaataataccatattagtttttaaaaagtcaacacattttttattaaaagttatttttttatatatcacttacacaatgttattttaaaatattgtctattcaaaattaaattgaactcaattaaattatagcacattctttttcaaatttgttatatctggtaaaatttgtcgttttctggtaaactttgtaatttaaatataattttgattatatttcaaatcaaatattcttatgtaaacaaaataaaaagccgatagctttaaactatcgacttttattttcaaaaatcattatattttaaggacgaagacctgtaccaccttgaagtgtaagtgtttcgcctgtcatatacttaaaatcaggtgaagcaagctgaacacaaactctgccaatctctgtttcaggatttgcaaaataccccattggaggtgttttaacattcttttcatatgcctctggaaatttactcttaaactgttcaagctgtgcagtccatgcaagtggacaaataacatttacatttataccgtccttactccactcggtagctgctactctactaagtccacgaataccttcttttgctgcggcatatgagcattgtccgaagttacctgaaataccagcaccagatgcaaaatttataacagagcctttagtttcacaaagatatggataacacgctttcatatagtaaaatgttgcataaagtccagaatataaagcaagattgaattgttctgttgtatgttcagcaagagtaactccagaagcagaagcctgtgcattatttataagaacatcaattcttccgaattcatcaatagctttttttacagtattttttgcaatagtttcattatctgcacctgcacaaatatctgcctgaactgcaagtaccttaatagaatatttgctctcaagttcttcttttgcggcatttagtttttctatatttctgcctgtgataacaagattagcaccttcctttgcataagctgttgcaataccatacccgatagaaccacaactgccatcagaaagaacagctctgcccgctccagtaataattgctgttttacctgctaagaaacccatataagcatctcctttaaaaatttttttataatattttacgcctttatccattttataatttctttttcagaaagacttcttgccttttgacaatcagctttaaactttctttcattcttaaaagctaaaggtgtaaacatatattaacttttatgcttgaatttcactctcttaagttagatgtagctaacttgcctttactaaattgtagcaacctttaaacaaaacggtttaattctgcattatattcatagcctattatcgaaagcttttctttgatagtatcagtatctatactattagtctttgcaaattcctcaagagatgaataaaaatctctcaactgagtatttacatatgataataaaatcatagggtcattaggcagtgacattttatcattctccattttcgctattataaatttcattatacaacaaacctcctcataaatcaagctacaaatctttatcatataagaaaacgcatacccaagcggatatgcgttcgatttctataaaataaatttattttattttaaatctaatgtttgtggctgaggtaatgcaggtgtaactgacatcttaaagtaggtgccgagatagtccttagcaaccttagtcagtgcaatcattgctgcacgacgaacctgtggattcggtgaaagtgtatgagccataagtttaaaaaacaataatggactataatacatcggcttttcgatttccattctatcaactcctttctaagatactatgtatataaaatttcttgtaatctatttgatgatataagtttaacacacaaatttaaacaatctataaacaagctgtaaattcatatggttatttttgtaaatatatcattcaaaataatttaagagagttgatttttgcaattgtcttaaaattcgctgattatatcaagcccaaaatcttttgcacgctttacggcaagctccatagacttatcataaacctgctcagggctatgtgcatctgaaccaactaagacttttaagccagcgtcttttgccatcgcccaaaaccttgggtgaggatatgggtctctcctgccatcaggataatcctgctgacctcggcgaataccgtttgcattatactcaacaggtgtattagtaagcattgcggcatctacaattatctcacaagctttatcacagtttttattccacgcaaagcaattcataaacataatatccgggtgaacaagaactgaaaaatacccctttttaagagcctctgaaatagcctttgcataagggatatattcatttgtgctttcagaagcaaaaatactgcaaaatcttccatttatatcaaagaaatgttcacctaaggcgagataatcaagcttcatttcattcaaaagccattcataatattcacagtatttaggaagatattctatctccaagcctgtcataatacgcattttttctgaatagcgttctctttcggtctgaacagctgaaatatattcttgaagctccgaaaactgcatacggtaaccgtaatcaatatctttaaaaggtgcgtggtcagaaaatccaagcactgaaagtcccttatcataagcctcttttgcataatctgcttctacaccaaatgcgtgacagcagcgtttagtatgtgtatgaaaattacttttcaaaatcattccctgctttccaacaatcccttagaaacagcacaatcaatcacacgaataagctcatcataggtcatacaaaaacctttttctttgtttttaagtctgtttttcaagtcctcgatttcaaagaagcgaagttctgtaatctctttttcgtcatatttaagtgtatcaagcgaaacactttcatcgacaaaataaacacgattaaattcattgcttataaaatcgccctgatgaacagtaagtatctggtcgtgcaaaaaatgtaaatcttcaggcttcagcttgagtgaaatttcttcttcggtttcacgaatagccgcctctattggtgtttcacctgcggaaatatgtcctgtgcaagcggcatcatagcaagatggaaaggattccttgtcatctctgcgtttttgcaggagaactttgctatcacgaaaaagccatatatgaacacttccatgcaaatcaccatcgtggtgtacggcattacgctctttgattttacccgttggtgttccatcaggattcaatatatcaaaatattccgacaccgaaaatcagtccttcttatagccgtttgggttattcttttggaatctccaagtatcttcgcacatatcatgcaagttacgctctgcgtgccagccaagaacctcatttgccttcttaggatttgcatagaatgctggaaggtcacctgctcgtctttcgccgattttgtaattaaccttttgaccagttgcgtcctcaaatgcattgataatatcaagaacgctgtatccgatacctgtgccgatattataagcatctatgatgtgtgggtcggctttaagcttattcaatgcacaaagatgagcttttgcaaggtctactacatgaatatagtcacgaatgcaagtaccgtccttagtgtcgtaatctccgccgaatacagtaagctgtggcagcttgccgattgcaactcttgaaatatatggcataaggttgtttggaatgccgttagggtcttcgccgataagtccgctctcgtgagcaccgattgggttgaagtaacgaagaagtgaaatactccattcattatcagaaacatatacatcaccgagaatttgctcaatgaaatgctttgttctgccgtaaggattacttacatcacctgttaccatagtttcctcataaggtataggattattgccataaacagttgctgatgaactgaaaactatgctcttgcagttatattctttcataacatcaagaagtgtaactgtacctgaaatattattatcataatacattattggctctcttgtagattcaccgacagcctttaaacccgcaaaatgaataacagcctcgattgagttttcagagaaaattttctctaagcctgctctatttcttatatcacaatcatagcctgctatatttttattagtgatttgcttaattctctctaaaacttctggaacggaattgcaatagttatcgcaaacaactacttcatatcctgcattgagaagctctacacaagtatgacttccgatatatccggcaccgcctgtaactaaaattgccatattataatacttccttttctttagtaattttatccgaataaattattctatattgtagttaagtatacaatactggcaatcatttgtcaaattaaaggttttatagctgttttagaaagataaatgtatctaattatcacctctttatatcttgaaatgtttaaaacaatttttataattggcaatgctttcttatgcctcgacacttttagcgacctattcgctgcaaatataattaaaaaatcgttttaaacacttattgtgtacctctacatttaattatagagaattattaagcctttgtcaagtacagaaacacttattgtgtaatattatatcagcctctctcttaaatatattaaaagctttttctctctgcgtgatacttgtacctgtgtcattcccaactcctttgccgtttcggattgtgttttatttttgaaaaaccgtaataatatgaggtttctatcgtttggttcgaggctttttatttcatcgtgaagtgatataacctccgttagtttttcatctggagaatcagtaggaatattaagctgtcctgaaccgttttcttcatcggctgtaagtgaaacaggcaatcttgacgcattgagtgcctcggttgcctgttcaggttctacaccaagaatatgtgcaagctctgaaatctgaggttctctgccgttttcttttaagaatcgtgcaacttctcttgtagcctttagggagagttcttttaatccccttgaaattttcactgcacctccatcacgaaaaagtccttttatctcccctaatattactggcacagcataggttgaaagctttaatcccctactttcatcaaaattatcaatcgcttttataagacctacacagccagcctgaaacaagtcgtcatactctattcctctgccacgaaaacgctttgcacaggaatgtacaagtccaagattttcgctgactgccttatctctgtcatacatcttttatacggctcataagccgtttttcaagtacaactgttgtgcctttgccctctcttgatgtaaccttaactttatctgtaaagctctgcataactgcaaagcctaaacctgctctctcctctcctcccgttgtaaaaagcggttccatagcctgttctatatctgcaattccacaacccttatctcttattttaattacaacaactgcaccctcaaagatttttacacttatgtatataagtccaacgctttctttatatgcgtgaactatacaatttgttacagcttcagaaacggcggtttttatatcggttatttcgcctattgtcgggtcaagctgtgagataaacgccgaaaccgccgttcttgcaaaaccttcatttgatgaacggctttcaaaggtcaggctcatctcattttttaacttcatctttttcacaccctttctcaaacagctttaatgccgacaagcccgacaactcaaccattctttccatgctcggcggaatattcaacacacgaacctctccgccgagcaacttcatagttcggtatctgcccataataaggccaattcctgagctatccataaatgtcacaccgccaaaatcaagataaagcactgtcggcttatttctctcggcggctgaatctatggtttcacgcatagaacgagctttatgatggtcgatttcaccgaatagctttgctgtcatttcgccatggtcggtgatgatttttacatccatttttctttttcattcctttcagagtttttagccctccacatatatagatatgcttcttgcttcaataaaataatagctttttatacacaaaaattacggcgaaaaaagtttcaggaatgatatttttgctcgacacacaaggctatattaagtcagatataagcacattacgctgattttaaccaataaaaaagcaattcttttgtaataaaatatcaatgttttacctaaagacagctaaaagttttgctcaggctttttcaaaagcttgcagtttccaaaggtagtcacctacggcaaagtatttggtgggtattaaggacaaaacaatacttaaaatttaagctttataatttttaatagatatgatataatgaaagaaaaatgcaagggtggtataaatgaaattttattgtgaactcaagaaagttgtagatgattcttatgatattgaaatcggtcacaagctttctgacacgctcataaatgacatacagaatggtttagttggtaaaattaagaagtttgctgttgttactgattctatcgttgaaaatctttatgcgaaggaaatctttgataagcttattgaaaaaggttttaaagcagatttattcgttattcctgagggtgaaaaatcaaaaactcgcccaatgaaagaatttgttgaagattctatgttaaacaaaggatatcgcagagattgctgtgtgcttgcaatcggtggcggagttgttacggatttagctggttttgttgccggtacttttggcagaggtgtacctttcatcaactatgcaactacacttctttcagcggctgacgcttctgtcggcggaaagactgctgtcgatacaccgctcgcaacaaaccttataggaatgttcaatcagcctaaaaaagtctatatagatatagatacttggaaaactctacctgcaagacagctttcaagcggtctttcggaaactataaaacacgcttgcctcggcgatttagaaatgtttgaatatttagagaaaaacattgaaaaggttcttcaaaataatgttgaggcttgcgagtttatcgctgagagaaattgcagagttaaatataatgttgttatgaaggacgagcgtgaaagtggtttgagagaaatcctaaatcttggacatactgtcggcagagcgattgaaactgtttctgactataagctcttgcatggtgaggctctgtctattggtatggtcgctcaagttaagcttggtaatgagcttggatttatttctgaggaaaatatgaacagagttattagcctctataagagagctaatttgcctataacaatccctgattatattgataaaaatgttctcgttaaaaagctctatactgataaaaaagttcgtgacggaaaacttagatttgttttccaaaaggaaattggcgatgttatgtgctttggtgataatgcttatggtttagaaattgcagaaaatcagattgcaaaaattatagaaaatatgtaa

SEQ ID NO: 561 - DNA, 17290 bp, unidentified
  source 1..17290: mol_type = unassigned DNA
  misc_difference 14979: note = a, c, g, or t
  misc_difference 14980: note = a, c, g, or t
  misc_difference 14981: note = a, c, g, or t
  misc_difference 14982: note = a, c, g, or t
  misc_difference 14983: note = a, c, g, or t
  misc_difference 14984: note = a, c, g, or t
  misc_difference 14985: note = a, c, g, or t
  misc_difference 14986: note = a, c, g, or t
  misc_difference 14987: note = a, c, g, or t
  misc_difference 14988: note = a, c, g, or t
gccgatgagcatgatctcgggcttcttttccattaccacatcgcagatgaccttggtataggcatcggtggtgtagtccttcagcagggggtgctcacatacgatgatacggtcggcgccgtagccgcccagctctttggccagcccctctaccttatcgcccagcagcaggccgcacagctccacgcccaggtcatcggccagcttgcggccttcgctgatgagctcgaaatcggtgggcatcagcttgccctcgcgctgctcgcagaatacccatacgcccttgaaggcggtgggatcggtattcacaaaagtagacatagtcattttctcctttctatcagatgatgtgcttctctgccagcagagaaaccagcttttcgcaggtcgccttatcagcgccctccagcatcatgccggcacccttctgagggggagagaaagacttgtaaacattggtgggagagcccttgaggccgatggtatccagctcgatgagcggatcatccttcagagtctcaaagttgtagatctccagaggcttattgtagcactcgaagataccgccgacgctcatgtagcggggagtattcagctccttgatgcaggtgagcaggcagggggtgtgggtcttgatggtcatgtagccatcctccagcatacgccggcagatgacatgctccccatcgaccttgatctcggaaacataggtgatctggggcatccccagcttttcggcgatctgggggcctacctgggcggtatcgccatcgatggcctgacggccgcagaatacgatgtcacccttctccacgccgatcttcttgatggcggcggcgagaatctggctggtggcaaaggtatcggagccgccgaattcacgggcggaaaccagaacggcacggtcggcgccgcgggccagcagctcacgcagcatcccctcggcgggaggggggcccatggaaacgaccacgacctcgcagccggtttcgtccttgagggtcagggcagcctcgatggcattgaggtcatcggggttggtgatggtatccatggaggcacgatccatggtaccgtcttcttttacagcaaccttaccggaggtatccggtacctgctttacacatacgatacatttcataacggcatactcctcctatcagttgaccttaagattggcggcgatgaccatgcgctgaacctcggaggtaccctcgtagatttcagtgatcttggcatcacgcatcatgcgctccacggggtaatcacgggtgtagccgtaaccaccaaagagctgtaccgcgcggcgggtgacatcgctggcagcctcggcggcaaagagcttggccatggcggcatccacgctgtaaggctcgtgggcgttcttcttgcaggcagcggagtaaaccaaatacttggcagcttccatgcgggtgtgcatatcagcgatctggaactgggtattctggaactgggaaatgcggcggccgaactgaacacgctcgtgggtgtacttgatgacctcttccacagcgccttcgccaaggcccagtgcctgagcggcgataccgatacggccgccatcgagggtagccatagcgatattgaagcccttacccttcttgcccagcagacggtcggcggggatgcggcagtcttccatgatcagctcgcaggtggaggagccgcggatacccatcttcttttcgtgcttaccaacgctgaagccgggatcggtacgctctacaatgaaagcggagatctccttgcgggtcttcttggggttcttcttatcggggatgatgccggtaacggcaatgatgatgaacacattggcaaagccggcattggtgatgaagatcttggagccattgaggacccagtggtcgccatccagcacggcaaaggtctgctgaccctgtgcgtcggtgccggcgcccggctcagtcagaccgaaagcaccaatccactcgccgctgcacagcttgggcaggtaatatttcttctgctcctcggtgccgttctcatagataggagcgcagcatagggaggtatgggcggaaagaataacgccggtggtgccgcagaccttggagagctcttcgacagccatgacataggagaggacatcgccgccggcgccgccgtactctttggggaagtagatacccatcataccgagcttagccatctttttgacggtttcttcggggaagcgctcttcctcatctacctcggcagccaggggctttacttcattctcggcaaactcacggtacatcttctgcaccatggcctgctctctggtgagtttgaaatccataacagatcctccttatcgcttactttctgtaatcgtagaaaccaacgccggtctttctgcccagcttgccgccgcgaaccatcttgcgcagcagggggtgaggacgatacttatcgtcgccggtctcggcctgcagaacttccataatggcgaggcatacatccagaccgatcagatcgcccaaagcgagaggacccatggggtggttggcgcccagcatcatggcattatcaatgccctcaacggaggcaacgccttcggcatagatgccgacagcttcgttaatcatggggatgaggatgcggttaacaacgaaaccggcagcttcttcgacctgtacgggggttttgccgatgttttccgcgatcttcttgatggtttctaccatctcagcgggggtattcaggccggcgatgacttcgaccagcttcataacaggagcgggattgaagaagtgcatgccgatgatgggacgatcgagcttagcgccgatttcggtgatggagagggaggaagtattggtggcgaacatgcactcgggcttgcagatctgggagagctcctggaaggtctgcttcttgatctccatattctcaatggcagcctcgatgacgaggtcacaatccttgcagatctccttggtgccggtggtgatcttggcaaggatggcatcggcagcagcctgctccatcttgcccttggccacgcggccattcagacccttggcgatcttgtttttgccattagcggcaaactcttcgttgatatcgcacaggagaacctcgtagccattggactgagcaaaggcctgagcgatgccggaacccatagtaccagcgccaataataccaactttcattttcagttacctccgtaagtatagtttttggggctttaattatttattgaggaatgcgtcgaccttgcgcttttccaagaaagcgttcatgccttctttctggtcgcaggtctcaaagcagctgccaaacagcttttcttcgatgacgatggcctggtccatatcgacctgtatgccttcattgatagcgcgcttgcagttgcgcacagcgatgggagcattgcgggcgatggtggaggccagctttttggcggcgggcatcagttcttcggcagggtaaacattgttcaccaggccgatgcgataggcttcttccgctttaatattgcgggcgccgtagatcatctctttggccttgccggcgccgacgatgcgggccagacgctgggtgccgccgaagccgggggtgatacccaggccgacctcgggctgaccgaacacggcgttttcgctgcagatgcggatatcgcagctcatgctgatctcacagccgccgcccagcgcaaagccattgacggccgcaataacggggatggggaaggtctccagcttgcggaacacatcgttgccctttttgccaaaggcttcgccctcggccttggtcagggtgctcatctcgccgatatcggcgccggccacaaagctcttttcacccgctccggtgaggatgaggcaacggatggcttcctgatcgaccgcgtcgagggtcttatccagttcatccagcacggcgctgttcagcgcattgagggccttgggacggttgatggtgataataccgatctggccttccacttcataggtgataaactccatggaatgtcactctccttgacttattttgcggagcaccggagagccgtggctctccggtgcactattgatttgtgaaaaagattagtcgcgcttaacaacggtggcgcagcccatgccgccaccgatgcacagggtggcgagaccggtcttggcgtcccggcgctgcatctcgtgcagcagggtgaccagaatacggcagccggaagcgcctacggggtgccccagcgcaatggcgccgccgttgacgttcagcttctccatatcaaagccgaggtcatggccgactgcgagggactgtgcggcaaaggcctcgttggcctcgatgaggtccatatcagcaaccttcatatccagcttcttcatcagcttattgacagcggcaacggggcctacgcccatgatggagggatctacgccgcccagagcgccgccgatccaggtagccatcggcttaacgcccagctccttggccttctcttcgctcattactacgatggcggcagcgccgtcattgataccggaagagttgccggcggtgacgatgccgtccttcttgaaggcgggcttcaggcgggccagggtctccacagtggtgccgggacggggaccctcatcggtatcaacgatcacagagcccttcttgcccttgacctctacgggaacgatctcgtccttgaacttgccctcggccatggccttttcgcacttctgctggctgttggcggagaactcatcgagcatttcgcgggtcaggtgccactgctcggcaacattttcggcagtgatgcccatgtgatagttattgaaagcatcccacagggcgtcatttaccatggtatctaccagggtagcattgcccatgcggtagccgtaacggcccttcatcatggcgtagggagcgagggacatgctctccataccgccggctactacgatatcggcatcgccagcctcgatcatctgagcggccatattgacacagttcagaccggaaccgcagacgacattgacggtaacggcgggggtagtcacaggcaggccagccttcaaggaagcctgacgggcgacattctggcccagaccagcctggataacgcagcccatgtaaacatgatcgacctgctcggcgggaatgccggcgcggttcagggcctccttgataacgacggaaccgagttcagcggcgggaacggtgctgagagcaccgcccatggtgccgatggcggtacggcaggcgcctgccaaaacgattttcttcataagtgtgtgcctccttgataaaataaaatgaaattgaaaacaaaattattttcacggccgaaatgcagccggatgaaacgggggaagatcagctgcccagcttttccttcaggcgagcggctacgcagggattgacgaacttggagatatcggtgttatcgtagtgggctacctcttttacaatagtgctgctgaggtaggcataacgcaggctggtggtaaagaacatggtatcgatggtgggatcgaggatgcggttggtctgcgccatctgcatctcatgctcaaaatcggtgacagcgcgcagcccgcggatgatgatctgtgcctgattggcccgggcaaaatcgacagtgcggccatcaaaggttttgactgaaacatttttgagttctttgacgctctcttggagcatttctacccgttcttccacagtgaaaagcgggttcttatcgcggttgatgagcacgccgataaccaactcatctactacgcgggaggcccggcggataatatccatgtggcccagtgtaacgggatcaaaacttccgggataaacagcccttgtcatatggtgtcctttcgccgtaaaacggctttcacttaatatttatccacatcaaaagcaacttcagtataactgcaaaaaggggtggtgtcaaacaattgctaaaaaattaacaaataaagaattggagaaaagtgtaaattaggaaccccgaaaatttgaacaaaaaaagacgagttggaatttaactacaaatgagccctaaaatattgaataaatgtattatctatttgttatatagcaccaatcgctaaaaacaagtgcaataattccgcctattttatggtggcaaaatccacaaaaagcaagattaaactttggcgggggaaatccgcaaaacgaacggtgtttattgtctttccataatacagacgctataaaagagctaaatttaataggatattaggcatatcgaaagcaaaaacttgtttcttctccataaagcgtgggaggggatttgccagccgcggatgcttgtggtacaatgacaatagaaacagaatgaaacagcggggagggaaagggtatgatcctttcgacactgtgttacatcgaaaaagacggctgctggctgatgctgcaccgggtaaaaaagaagaacgatgtgaaccatgataagtggattggtgtaggcggcaagtttgaggagggggagagccctgaggactgcctgctgcgggaggtgagggaggaaaccggcctgaccctgaccgaatatcgattccgtggtttggtgacctttgtatccaatgaagcgcccaccgagtatatgcatctttttaccgcaggcggttataccggtacgctgcgggactgcgatgagggtactctggagtgggtgcccatcgggcaggtggaaaacctgccgttgtggcagggagataagatctttctggagctgctgcggcgagaggaagcattcttttctcttaagctgcggtacgccggagatacactggtggaagcggtgcgggatggcaagcccctgccgctggaggaggacagatgaagctattggtaagtgcctgcctgctgggggtgctctgccgctatgatggcaaggcgaaaacacatgagggcgtgtgctccctgctggaaaagcatacgatgatccctttttgtccggagatctatggtgggctgcccacaccccggtcggcatctgaacggctgggggagcgtgtggtggcaaaaacgggcggagaggttacagagcagttccgccgtggggcggaagaagcgctgcgcctgtgccggctgtacggctgtgaggcggccctgctgaaggagcgcagccccagctgcgggcacggtgttatttataacggtctgttcaatggcggactggtagagggggacggtgtaacagctgagctactgctgcaaaacggcattgctgtttatggagaaagcgagtgggaaatgctgctgtgatttttgagagcaataaagccgggcttgtcgaaaaggacaggctcggcttttctatatagtttatattccaaggaggctgtgaatggcatgtgcgacgccgtcttcttcgttggaaagggtgatccaatcggcagctgcttgaacttccgggatggcgttgctcatggcgaccccgataccggcggtttgcagcatgccaatgtcattatcggcatcccccagggccatgacctgtgccgtgggaatgttcagcatctggcaaagagcggccaaagcggcgcctttgctgccttcccgatcggtcagctccagattgcactccatggtgctgacggcgcgtacccggtcgccataacgctgcgccagccataccttgatctcggccttttgttccggagtcaggtagggcatattgattttctccaggtgggtgccgggctggcgggcgcgttccatcaaatcatcgacaatgctttcttcactggaaaagagcgttttgagatgaaatgccggaagatggatgaaatcgcggtgttcccaatcggtacgggagagatacattttttgatcggcataaagctgcacagcaaagtcgcccatggtggtcaaatgctccaggatctccaaggtggtatccagaggcagcggtgccgcccgcagaatatggccttcccggtcggtggttatgctgccgttacaggtgatgaagtagtggagaaagggcagttccaatacctgtggtgcaacagcggcaagactgcgtccggtggcaacaacgacctcaattccggcatcggcggcacgggtcagcgcctcacggttggcaggggagagggtgaggtggtcatcgcgcagcagcgttccgtctaaatcagtggcgatcagcttaatttcggtattcggcatggcggctccttttcaggcagatttcagggacggcctttttgcttgggcttacggtaccgttcggtgatctcctctactgtggtgggctgtaccgtcagcagttcctccacaaatggggctagtacaggccgccagccgattccctttttcttcagtaatgcggccatatcctccggcaggggagcggtaaggcatagctgttccccggtgatggggtgggtaaaggcgaccccggcacagtgcagcgcctgccgggggaattcctccatggggccgccgtaaagctcatctcccagcagcggccagcccttttctgccatatgaactcgaatctgatgggtgcggccggtgtgcagaatgaaccccaccaaggcgcagcttttatccggtgctgtggcaaggactttatactcggttacggcgcgttccccatcgggggaaaccatacgcttcatttcgagcgggatctcccgctccagcggcaggtcgatgaggccttcggggggctgcggaacaccacttactacggcaacataacgcttggtaacggctttccacagcttgcctgcggcaatttgatggcgggcgactactacagctccggtggtgtccttatcaatacggtttaccgcccgaaaggtgccgctgttgccctctttttcgcacagggtggcatatacgctggccagcgtgccgaagatgtgcccgccagactgatgcaccggcataccggcaggtttattgaaaacagcgacatcccggtcccagtagaggcggggaacatcgatttcgcagggaggcagtttgcgggcctggtccggcaggttgatctccagcgtatcgccttcccgcagcagatcgatggtgcgggcgtgggagccattgagcaggatgccctccggcaggtgtttgagagagatgaccaccttgcggctgatgccctgcttaaagcgcaggaagtgctggatctgatcgcctgcgtcctcggcagtgataagatagcgaaaggttgtcatgggtggtatcctccttgggtgttttgcggagagctgctggctgggggactatgataccggattataccataaagcgaattcaaaggaaagccccgatagcagtaagctgtcggggagatagaaacgaaaattatgccacgcccaggtattcctccagcgtcaggttgttctccatgatgtaggtcgcgatttcaacgccgacatagcggaagtgccacggctcaaagatgatgccggtcacatcctgcttgcccttggggtagcgcaggatgaagccgtattcggcacagtgctccgccatccagatggcttcagcatcatactcgaaggattcctccatggtgctgtggtgatagtaataatcaccggaaaggatatccaccgccaggccagtgttgtgctcgctggttccgggaggcgctacacgggtagcggccacctgctcagccttttcccggctgtaaccattatatttcatctgcgcctgcacctcattttccagcagaatggcgctgcgggcaaaggtgcggtaggcgctgatgagctgcaggtcatagccatccgccttggccgccgccataaagtcccggagtggctgggcaatgcgggcatcaaccttcaggtcaaatccggcatagttgcagatgaattcccgctccatatccagctcttcggccagcgggtatttggcgctgaccagaatggtgcgccaatcatcgctgccggggttggtcaggttggtgccggaaggctccggatcaggaactggcttcggctgaggctgagggtcaggctcgggatcgggggttggctccgggtcgggcattggttcggggtcgggggtttgatcaccctgctctccgtcggccgcatcggattgctgaccggcattgggatcaggagtggggtcgggctgggcggcattgcggcgtaccagtgcggtaacgccccatgcaatgagacccaacaccagcaggatcagtataatgccgcgcacgcgcttataggtgcggctgcggtgggcgcgggaatgttcgttttggctcatggtttctccctccgtttgttcacggtaaagtgatttatatagtaagtgccgtttaggcggcgatttgctgcacggcttatgctttttgcattagcagagcgcaccagccatcctgttccttctcctgggtgatgaacatgccctcagtctccaatgcggcgatgacttcctctttccgggggaggataatgccggaagccaccaggtgcccaccggactttaggtgatggtaaatggcgggggccagcgcgataatgacatcggcgacgatattggccagcacgatgtcgaagccgccgcaggtcagctcctcttccagcggctggtgtataagatcggcggcaacagcggtaaaacggtcaggaccaaagccatttacctcggcgttttcggcggcagtgcgcacggccaccttgtcgatatctaccccaacggcttcctgggcgcccagcatcaatgcggcaatggaaagaatgccgctgccggtacccatatccaatatgcgcgtatgttcaacggggagctgctccagcagctcgcagcacaggcgggtggtgtggtgggtgccgctgccaaaggccatgccgggatccagtgtcatcaccagttcttccggggtgggggtgtattcctcccagctggggcataccaccagccgtttacccaggtgggtggggtgataaaaacgcttccaggcattggcccagtcctcctcggccagcgtttggtcggtctcgatgcgatagggaatgccctctgcttccagccggtgggtaaggaaggcggaggcttcggctggattttcctccgggggcaggtacaggtgcaggatcgcttcggtgcggctgcgggccagcagatcctcatcgatgagatcaatgtgggcaatttgcggcaccagctccagcatatcgctataatcctcgatgtagatgccgtaggggacggccatctgcgcaatcgcttctgctgtctcggcatccttggtgcttacggttattttcaggtcagtccagttcatggcagttcctttcttactaggtttgtcccatctattatagcgggtgatgtaaaaaatctcaacagtttgcgggagctttttgcatagcggcggtatagcggcccatactgcctgcataaagatggaaaaggaggcgcgggatcatggcagagatgagccgatgcagggaaccgcaaaagacgggaacacaggagactctgcgggaagagctgagcagggtaaacaaggaactccgccgggcggaggagctttttgatgtagtgacggaggacacattgattgaagcttgtacctaccgcatccagacactgctgacctaccggacctacctgctgcgcaccgcgcgccgacaggcggaacagccggaacccattgccctgtaagcaccacaacaaaaaaggaggacatcatgggagtttggattattgctggggtggtacttattctggcgctgctggtgcgctggcggcatgccctgcgaggctggttgctttcggcagccggtggactgggggtactgtgcctggtgcaagctataggtgcgctgctgccggtgaatttatttactgtggcggtgtgtggtattttgggcctgccgggagccattagcctgttggtgtgcaatttgatgtggtgaatctccgaggcaaccggaacaaactgcgaattgtgagagtcggccgcaggcggcccggactaagcctgggccgatgccctataagggcgttgacgatgcgaaacatcgtagcctgcggccggtacttgtgcattgcagagggtaaaaagaaagacgccatcccggcatcgaacctgtggatggcgtctttcttttggaatggcttacatgccattcaggtagtcctccactacatcaagcaggtggcagggttccagatcttcctgctgcatcaaagcagccagagcttctgcggcattgcggtcatctgtaatatcagaaacagcctgctgcagttgccagccgtgtttgggaagatagctttcacacacgataccatagcaacagtagcggcccagctgcgggtgggtgatccattcttcgtaaacgcggtagcggacggtttgtgttctcatcttactctctttctctttttcctctaaagtgcacaagggtcggatcctcctctttttggtttatgctgatttactttggctttggtatgaggctttagcaatgctgctggatagattttaccatactttttaaggaacggtatgacaaaaatttcatttagattttttacagagcgcacaatagattgacaattaaagtcgaaaaacatcgacctggtctaaaaagaggaaccacagaggagaaatgaggacaaaaacttagcagaaaaagggcatgttccataaaatttgagataatttttctaacaccaaaacgagaacaaggcgtgaaaaatagactcaaaaacaaaaatatcggcctgtgagatccaaggtggaaaaacaggccggtattttttgtggaagatgacgaatcagtcgcagcgattttccgtgttctgcttttcgctgcggttctccgtgctgtttttgttttgagtattgttctgcgtgttattggtgccgttctgggcattattcttagcgttgttctgagaatttttactcatttgaattcacctcctttgtggaaatattatgcgctccacaatgccatcttatacgataaaaaacagccgtaaaaaatgcaaaaaaatttttcagattaggcttgacaaataaataggatatgttataatgaagttacagaaacgataattattactaaaaaggagatattatactatggctaaatatgtttgcactgtttgcggttatgttcatgagggcgatgaggctcccgaattctgccccgtttgcaaggctccggcttccaagttccagaaggtagaaggcgagatggcctgggctgctgagcatgtagtgggtgttgcccaaggatgtgatcctgagattctgcagggtctgcgcgagaactttaacggcgagtgctgcgaagttggtatgtacctagctatggcccgtgtagcccatcgcgagggctatcctgagattggcctgtactgggagaaggcagcctgggaagaggctgagcatgctgccaagtttgccgagctgttgggtgaggtcgtaaccgactccaccgagaagaatctgaagatgcgtgtggaagctgaaaacggcgcaaccatgggcaagaccgagctggccaagaaggctaaagctctcaatttggatgctattcacgatactgtgcatgagatggcccgcgatgaagcccgtcacggccgtgcctttgccggtctgctgaagcgctacttcggtaaataaccaaaagtaagttttagagagaatgaagaaagcccccggtggaagaccgggggcttttgcgctttcaattcaccgtcaagacagaaacggcaaaaaagagtttatccccgcatagcgcaaaacgcagccaaatgaagaaccaaaaccggtggagaagccgcccctttgtcgccacgacgaaaaacagactggaataggggaaagcgctttgtgaactttttacatactgaaaaattgcttctaaaatttttctcctaaactctttacaaaataacggccatttgctatgatatttctgtattcaacccccgaattttagccaatttggggaattacgccggaagaaccatagaaaaaacatacaaaaggagaaactgctatgtccagaattgttatcgccctcggcggcaacgccctcggcaacaccccctatgagcagctcgagctcgtgaccgagaccgctaagcccatcgttgacctcatcgaggccggcaacgaagttatcattgcccacggtaatggtccccaggtcggtatgatcaacctggccatgagcgctgcggctgaagctggcgctgtaaagagcgatatgcccttccctgagtgcggtgctatgtcccagggctacatcggctatcacctgcagaatgccattggcaacgaactggtcaagcgcggcatcaataagcccgtagcgaccattgttactcaggttctggtagatgagaatgacggcgctttccagaagcccactaagcccatcggtgctttctataccaaggagcaggctgatgagatcgcagctaccaagggctttaccatggtagaggatgccggccgcggctatcgccgcgtggttccctcccccaagcctgttgatgtggtggagaaggatgtagtagaggctgttgttaattccggtgctgttgtgattaccgtaggcggcggcggcatccccgttatcaagaaggacggcaaactggtaggtgttcccgcggttattgataaggactttgcttcctccaagatcgctgagctgctgcatgcagatgctctgttcattctcactgctgtggatcgtgtcgccatcaactggggcaagcccgatcagaagagcctggaggagatgagcattgccgaggcagagaagtacatcggtgagaaccagtttgctcccggctccatgctgcccaaggttcaggctgccattgcctttgctcagtccggcggccgtgccatcattgctgatctgcacaatgctgccctggcgctggaaggtaagtctggtaccgctattcacaagtaattgcaagtcatagctaaaatgcatagcgcccggccgtagatcggaagagcggttcagcagnnnnnnnnnnggccgttttggccgggcgcttttgtgttgttgtcagccatcttttgtggtaaaatagcaaaagtggtagggcagggtacccaccccccagcaaaaggagtgatcatatgcatctgtttttgacaggcagcgtccagattgggaaaacgactgccttgaataaaacgctggagctgctgaaagttatccccggcggctttcgctcctactttggggtggatcgcaaatctccctgccggtacctgtatatgagcagcgctgcggagccatgtgcctttacgccggagcacgccattgtaaaatacgggctaaatgagaatggtatgccggtgcacatcgtcctgccccggtttgaggagctgggcctgcagtatctctcggaagccttatcttatcctctcatcgtgctggatgagtgcggccggctggaacagcagctgccccgcttccgggcacgggtgctggagctgctggacggggatgtgccagtattgggcgctgtccggcaggatgccatgggctggctggaggatattcgcaaccaccctaaggtacagttgataacggtgacggaacagaaccggaatgatttgcctctgcagttagcggaatattatgccccgtttatcaaacccatcaaggaggaataaaaatatgaagcatcaaaatcaatcactgagaaacctgctgctggcggctatgttcctggccattggtttggtgctgccctttttcaccgggcaaatcaaggagatcggcaacatgctgctgcccatgcacctgccggtgtttctgtgcgccttgatctgcggctggcagtatggcaccgctgttggttttattatgccgcttttgcgtttcgcgcttttttccatgccccgcatgcctggtgcccttgccatggcattcgagatggcaacctatgcctttgtagcgagcttcctttacagccgggcacgctggcagtgcacccgcatgctgtaccgctgcttgattgtcgctatgattgccggccgcgtggtatgggcagctgctatgattgtcctgctcggcttttccggcggtgcatttacctggcagatgtttatttccggcgcattcctcaatgccattcccggtattattctgcaactggtgcttatcccggctatcatggtggcgctggaccgtgccaagctggtgccgttccgccgcagtgaagaaaatccccacactcatcgtgaggaaacaatatgatttatgacattgcggtggtggggggaggccctgccgccgcaatgtttgcccgtcgatacttgattctttgtccaggagcctcgctgctccttatagatggacagaacgagcagcataaaaagccctgtggcggcctgttggcccccgattcccaaaaggcgttggcgcatttcgatctcaccttgcccaaggaggtgctggtcgatccgcagatcttcacggtgcagaccattgatctttgcagccggcaggtgcgttattaccagcgctactatctcaatatggaccgctacgcctttgaccgctggcttttatcgcttgtgccgtcgcaggcggagatactccccggccgctgcacagcagttgcccgcagagaggacagcttttccctgactgtaaggacggatgggaaggagcgacattttaccgcccgccgggtggtgggcgctgatggtgcgtcttctttggtgcgccgcaccttttaccgggagccgaagacccgctacacggctattcagcagtggttcccggccggggagaaccgcgcgcccttttattcctgtattttcgatccggtcaccagcgaaagctgttcctggatcatacggaaagacgacaccctgatttttggcggttgcttttctccgcaggacagcagggaagcctataatcgacagaaaagccgactggaggagtacctggggcattcgctgggccgccccattaagaccgaggcctgccaggcggtgcgtccacgcggcttttcggattttatcactggccgggatggcgtatatcttattggggaagcggcgggctttatcagcgccagctccttcgaaggaatcagcagcgccatccgcagcggcagcgccctggcggagtccatgagccaaaccgatgatgaccgcgaacttgcccgcttttaccggagaaaaacgacttcattgcgtctgaagctgtggcttaagaccatcaaacgctggtttatgtataccccatgggtgcggcatattattatgcgactggggctggcagccatccatgtagagcaggagaacaaataa

SEQ ID NO: 562 - DNA, 16288 bp, unidentified
  source 1..16288: mol_type = unassigned DNA
ctatatctcagaattataattttcttcgacctctaatgccttctttctcaccgcctcatcataacctttaagtgccgcaaaagatgcaaactgtgccgccctgtcatgcagactcataggcttatgttttttcgatacaggtctctccatatctattatatcctgatactttttccagtcatcattttcaagcattatgccctgtgccctccaatctgtctgtttctctccattgctgttgcaccttcttcgaggttcatgccttttaatatagcattttttccatactttttcttcacatctatcatagctttctgcagccttttctctttagcaagcatatctttttctttctgcttctgcttttcaagctcgccataatccgtaaaaaggtcaagctgttcaaattctttcttttcgaccacatcttcctgccttgtaacatgatttgcaactacattcattcttctcacaagaagttcgctgtttataatctcatcatagagttttgcgacattttccattattatttttgtagatgaagtcatttttttaagatttattgttccatgtgcatgttttggaatcttccgtccgtatctgtcaaaagtatattctcctttatatttttttcttatctcggaatttttaagattttctatatcgtaacccaccgtaagaaccatctggtcggtcacaagtcccttttccacaaggtctaatacaagcatatccgtcatttccataaccacaagttttgccttttttgcatcatacgggcatgtgagcacctgtcccgaacttatgctgttgttttccggtttatatgcctttatgtcggcaatggtacacggctcatatccccatgcatggtcgataagaagctctgcgtttatcccaaacaatttataaagcagctcttcattataaaaatcccctgcttttccgattgaacaccttgcaacatcacccattgtataaataccgcacccggcaagtcttttcgcatatcccctgccgactctccagaagtcagtaatcggtttatgtccccacaatattcttctgtagcttatctcattgagctccgcaattctcactccgtccttatcaggttttatatgctttgcaacaatatccattgcaactttgcaaaggtaaaggtttgtcccgattcctgccgttgcagtaataccggtttcctttaaaacatccattataagcatcattgcaagttctcttggcgttttctcatatgttttaagataagatgtcacatctataaatacctcatccacagaatacacatgtatgtcttcgggagctatatatctaagatatatattataaatttttgtgctgtactccatataataagccattcttggctttgctacaatatagtctatttttttgccggtagcagcttttatttcatttgctttctgcaccacctcaaaaagtctcgctcttcccgaaatgccatacgctttcaatgaaggtgacacagcaagacatatcgttttttcagtcctcgactcatccgcaaccacaagatttgtcgtgagcgggtcaagtcctctctccacacattcaactgatgcataaaacgattttaaatctattgctatataaatatgtccggtatcattttgtttatatttgtccgaactttcaaaacccactgtaaaatcccccttaagcctttttaaattcaatattgactataaaaatattatcatgaagtgatgcagaaatttttcctcccatgcactctgtcatctcttttgcgatagccattccaagtccggtagaagttttactcctcgctgcatcagctttataaaacttctcaaaaatacggtttatgttaatctcatcagggtttagtacctcgttttgtattgtgagagatattttatccggagaagcatataaactgatttcaacttttttctctccatgttccaatacattttttataacattctgtaaaatacggcgcataacctgctcatttccataaaaacaaagcgattcgtctgtcaatctcaaaaccggaacaatctttttcatttcccactcttcataatatgaaaatagtgtttccctgacaatctcattcaaatcacatttatacaatttaatattataagtcttattttctaattttgtaaatgtaaataattcctccagcatgtccctgagtgctttaattctctcttgaattatcgcaatataccgtttattcttctccttgtcatcagactccgataataattggaaatatccgtcaagtgatgtaagcggtgttcttatatcatgtgataaatttgtataaatatccgcaacctcattttctctcttcttccatacaatcctctctgccctatgtttctcaaataatttatttaggacatctttaaggtctttcagccctccaatctctatctgtgacgtcaccagcgcattgctttgatttttttcaataaactctatttgctctgtaatgtcttttatctggcttctcaacttaacataaagatatgtaactataacaaacattattgcaaaaaatgctatgatacactctctcaccaaaaatcatctccttcccgacaacgccataaagccacacacgaaatataactatagtaatatactatatatcatacaccatatgtgactttattttaatcagcttttatttccaaaatcttaaagtaaaaactccttcatcacaccatatctctcttttccgtactaattataccggctgctgccgcaatggcaagataaacaatcacaaacatagtaagatttaacagctgtgacatgctttcgcctggaacaagattgtttattttggtagtaataaggtatttttcaatctcaacagtaaagcctgtgagcttatgcaccccgacatcaaccgccatgcagataaacggtcccactccaattgacaggcacactgctgccgtcatgccaaaaaccctgttttttatcacagcctcaattgtagcacataccatcaaaaatgcatattgaagtaacacctgaaaaacaataaaacttatatatccatcaaaacttcccgctcccagacttatttttttcgtgcatatcatccacacaaccgcctcaaccaaaaacataatcaaatcaaataaaaccgtataaatccctataaccgccatttttgaaataaatagctgcctgcggtgtcttacctgaccacctatgtttttaatatatccgtttttgttttcgcttgatacaaatatcatcacaaatattacactaaaaagcagataaattcctgatgacaataattttccgtatacatatactgcattcggcgtagtattttttataccggtagtgtcaatctgaactcctatttttacttctgaattatcttccgaatctgaagcactgttcttatctgtgctttctaccaccgtcttattactgcttgtatttgtatctgatgtttcaggcatcagattcattgccataataataccaaacgccattgcaattatagttaccacataaaatgatttcattttaatcatcttatacaaatccatctttataatattcaacataaactttattctccttttatacgcactcataaacaaataattgatttaatctgctgtcatattcaaaaaataactttcaagctcttcctgattcaccttaatctctctcgggcatactcccgagtttacaagtctttcatttatataagcactttcctcaaacctttcataaatataaatatgcgacttgtcaaccacctcataattgtgaactcctatttcatcaagtgtgacaagtgctcttttaggctcatcaagcactatctcgattctcttactgcactgctgcattaactgttcctgcgaaagctcctgtaaaagttttcccttgtgtattatcccaaaatctgtgcagacctttgaaagttcctctaaaatatgactcgatataagtattgtaatatttctttctttggcaagaccggcaagcatatccctcacttccactattccctgcgggtcaagtccgtttatcggctcatcaagcacaagaaaatcaggatttccaaccatcgcaagtgctatgccaagtctctgtttcataccgagagaaaaattctttgtctttttcctcccgacatctgaaagtcccacctcatcaagcagtcccaaaacgtattttttgtcatttatgccaaacatctttgcctttatcatcatattgtcaaatgccgacatattcttgtaaagtcccggttcctcaataaggcatcctactcttgacctcaccttcgataaatcctttcctgaatacccaaacaatgaataatctccggatgacggagctgtaagaccgcttatcattttcaaaaaagttgtctttcctgcaccgtttcttccgataaagccataaattgctcccctctttatatgcatatctatttctgaaacagctttgtgcctgcgaaactgtttcgtcaatgcatgggtttctaacaaaatctcactcataataatcctttccggctgctaactcccattcctacagcctgtcatataatcctgtaaaattcttcatcaggactcgtttttatcttacaaaacttattttaaatatcatttcataataaaacgctaagaaaaagtaaagatttagtaaagatatttattttccgtccgcaaagcggtatccaatcccccaaaccgtctgaatatactctttgtctgttatatttttaatttttttgcgtatgttgcttatatgtacgtcgagtgtttttgtctctcccatatattcttcctgccatgcatatgtaaaaattgcttctttgctaaatactcttttgggattttgtgcaagaagtcttaaaatctcaaattcctgccttgtaagctttttaagttcctctccttctatccatatctggtatgtttttatatccagttcaaatccgtcaagttttatcttttcatcctctttttcatgtcccgcatgcctaagctgtatctttacccttgctgccacctcatctatattaaaaggttttgtgatataatcatcagcaccgtttcgcaaaagttcaagcttttcatccatcccatctttcgccgtaagcacaataacaggcatatcactgttttctcttattttcgccagcacctcttctcccgtcatccccggaagcataaggtcaagcaatataagcgatacatcatccctctcaagaagcagtaccgcttctgttcccgaaaatgcctgtctgcacacatacccctcacgctcaagagcctctttgagcagattgtttatatttacatcatcctctgctatcaatatatttctgcttttcaatctaataacattccttccatatataataaatttaattctcgtcaataaaactttttccaacaaaaataagaccacacagaaacataacaactctaaatccaaattctatatttctgcatagtcttatattaaaacaacctaaaacagtccgtcaaccatctcttttgtaacagtaacgctctcaaccttgtccacctcaatctggtaaagcgtgtttgccgcaatatgttctgctgcctgttcaaggtcacgtattcctgttgtatttgaaaatttatcaactactgctgcaactgcctcaggagtgacgatacattcctcatttctcatacccattctcttaagaaccttaggcatacagaagttcttgaagataacctgtttttcttctgtcgtgtaatcaggtatatctataaccgcaaatctcgacataagcggtgcgcttatctttgacttgtcatttgctgttgctataggataaacacctactgtcggaaccatacactctatgtaattgtcagtaaatcctatattgtcaagaagtgtaagaagtacatctgccggatttccatgtcccttatttgacgtagctttgtcaagctcatttatgataaatacaagatttgactctcctgccatttcaaatgcatctataataataccggattttgcatttgaatatattcttgaacttcccgtaagctgctcagggtcacttattgaactcatgtcaagtgttgtccatggaagtttaagtattcttgcaacggcatatgcaatctgtgatttacctgttcctgccggccctacaagcaatattccatacgctggaagtgtatgagtacgatttatctgtactatagtctctataatgcgctgttttactctctccattccatagagttcttcatcaagtatctttcttgcctcaacaatatctatcgtctcaaaataattgctcttccattttatgttcatcataatagacaatgctctctgtgcatggcgtctttcttccggagacacttcatgtgactttgctaccgcaagatttcttcttgcccaaagcctgatgttatcaggaagtgttgcaccagcacagtttataaagtcagtaatactctgaagacttgtgagcttcattccatctccactctcatcatcttcttcatcatccgaaatcttcgcaggtgcgtcactcgcaaaaagtctctctatcatatattgaaggaaaccatcctccgcggacaattttgaagtgttgccgtgtgcaacttcgctaatcttataaaccgcatatccggcatcggtattttcacctgaaagtctcacatttatatggctctctccaagccatttaagcagacttacgaatctcgcatcaacctttaaaatatctgaaacttcaactccatcatcctcattaaattcaaatgttgtacgttttatcgggtttgtaaacattccatatgaatgatggctccactgtttatttttgttgtcaataatcaatatcggtttttccggtgtggcactttcctcattcgacataaatgtctcatatgtgcacaccgcatttttcttttcttcatcgggtacactgttaaaatcaaataccggcatcgtattctcctttcgctttaaaactcaatatctttaagataacgtccaactgcatcctgccatgaaggtagtggcttaaacccattgtcgataagttttttcttgtcgagtctgctgttaaacggtctcgccgcttttgaaacgccatactctttcgttgtaacaggactaacctgaacattttgttcactgtattcatctcttcaaagttctacagcctgtctgaatatctctttagcaaaatcataccagcttatataaccgccctcatttgttgcatgataatatccatacctgtcagtttctatcatatcgacaagaagtcttgcaagatcaaatgtgtatgtcggagttcctatctggtcatttacaacagtaagtttatcgtgagtctttgcaacattaagcatagtctttataaagtttgaaccgttctttccaaatacccaggcaattcttactataaaatatttatctaaaatgtccgatacggcaagttcccctttaagttttgaatctccgtaaacgtttaaaggcttataatctttacagtcaggctcccacggcttttctccctgaccgtcaaacacataatcagtacttgtatacatcataggaacatctatctctttgcatgctttcgctatattttctgttccctctgaatttatcttatacactttgtcctgcttatcttcatcttccgcagcatcaacagctgtccacgctgcacagtgaattactgcatcaggtttaatttctttgatgtttttaagaacagcctctccatctgttatatccatctgaacatacggtgcatcaatagatgcagcctctttcaaaatatcacttccaactccttcataaccacgctttgcaagctcgttcataacatcaaaaccaagctggccgccaactcccgtaaccaaaactttcatgtttacactccattcccgcactgtctgctgcgcatatatcaaattttataatttcaatatcacagagtactactttctgtttccatacattttttcataatagttctgatactctcctgaaatgatagtctcccaccattccttattgtcaagataccactttattgttttctttataccatctgcaaactttgtctcaggaagccatccaagttcgttgtgaatttttgtagggtcaattgcataacgcatatcatgtcccttacggtctgcaacatatgtgataagactctcaggctttccaagctccttacagataatcttaactatgtcaatatttgtcatctcattgtgtccgccgacattgtaaacctcaccaactcttccgttgtggatgataaggtcgatagcacggcaatgatcctcaacataaagccagtcacgcacattctcacctgttccatatacaggaagcggcttatcattaagcgcattcgcaatcataagcggtataagcttctcaggaaaatgatatggaccatagttgtttgagcagcggcttattgtcaccgggagtccatatgttctatggtaagcaagtaccaaaaggtctgccgaagccttagatgaactgtatgggctgcttgtgtgaataggtgtttcctctgtaaagaaaaggtcaggtctgtctaacggaaggtctccgtaaacttcatctgtcgatacctgatggtatctcttaattccatatttgcggcatgcatccataagcactgcagttcccataatatttgtgcgaaggaaaacctcagggtcttcgatagaacggtcaacatggctctctgctgcaaaatttactactatgtcaggcttttcttcctcaaataatttataaacagcctcacgatttgtaatatcctcttttacaaatctgaaatttggattatccataaccggtgcaagtgttgaaagatttcctgcataagtcagacaatcaagacagattatacggtaatccggatatttatttaacatatgaaaaacaaagttgcttcctataaatcctgctccacctgtaactataatattcattttattttgttcctccataaactatttctaaaattgtctcttcttgaccgaaagtcaaaaagcatcgctccctcgcttctgctcggtcactctagtataaattctcctgatattttccatcgagcacatctttgagatactggccgtactggtttttcttcattatttcgtatacttccaaaacgtcctctttagaaatccatccgtttagatacgctatttcttccaggcatgctatctttctgtgctgatgctgttcaactgttttaacgaaatttgtcgcttctacaaggctttcatgtgtacctgtatcaagccatgtaaatccttgtcccaaaagttcaacatttaaatttcccttttcgagataaatacggttgaggtcggtaacctcaagttcccctcttgctgacggtttgaggttcttagcatactccacaactttattgtcatagaaataaagacccgtaacgcaataattgctcttaggcttctccggcttttcctcaatagaaacagcctttccgttcttgtcaaactctacaataccaaatctttccggatcatcgacataatatccgaaaactgttgcaccttttccgttctctgcattcttaacagcttcattgagacgtttctttaatccgtgtcctgcaaaaatattgtctccaagcaccatggcaacattgtcatcaccgataaactccgctccgattataaatgcctgcgcaagtccgtcgggacttggctgcacctcataggaaagatttacgccaaactgatggccatctcccagaagttccttaaatctaggtgtatcctgaggtgtcgagataataagtatatctcttatccccgcattcataagcactgacataggataatatatcataggcttgtcatatataggcaaaagctgtttacttgttactcttgtaagcggataaagacgtgttcccgaaccgcccgctaaaataatacctttcatattattaatcctccattcgtaataatattccatatctttctactgtgattacattataaaaggtgccctaagggcacctgcaagcactttttttattttttatattttatttctcttaaccgctttaaaaacacctgcttcttttgtcaccgtaaaaccatcctgtgtctttttcttcacaaatgttacaaagtcactgtacctgtcaactataaaacgattctggtttccgtggcacgaaagaacatacgatataagtgcctccggttttgtcacctcaaggctgtcctcgtattcagaccaaaaaacatcatcaaaatattcacagagcagactgcctccgttttgttttccaaatttttcatacagtctgtctgccgacaaaacaattctgctgtcaaaatcctttacaagcatactaatctctttcatatgctcactgccatatgtgctgcataaaatcctcccgcccggttttaaaacacgctttatctcctcaaagactttttttagatcttcacaataaaataatacatgatttgcgataacgagattaaaactttcatccggagcatttatatgatgtgcatccataacttcaaacgaaaaactgtttcctgcgtctttcattgaacgccttacatcccttatcattccatccgaaatgtccgataatataacatttatatcatttaaaatcctgtgcctgttcatcctccacagcgaggcatcaccacatccaagctcaagtatgctctccccggctttaatatcgcactgttcaaaaagccaaggaaaccatccctgtttattttttgaaaattcttcgtggagatttattctcgcagaaatatttgatgaattttgatattgtactttaagcttatgctccatctcattgacattgacaagctgcatcatcttactccagtcaacatttttttcctcatctacagcttgtgcggcatctaaaagtgctgtttttataagctccatctgttcaattttttcttcaataagaccaagctgcatatgaagtgattctgagaaaaaatgtttgtcagaattcctcactgtcatttcctttatgtctgcaagcgaaaaaccgagatattttaaaaacaaaatctgctgcagccttgcaaaatcctcatccgtataaaaccttgcaccgctgtcactgacaaaagatggttttaatatattatgttcatcgtaataccttattgtctttttggtcacatgagctttctttgcaaactctccggacgaataatacccttctaatttcatatatcttccctttatctaatcaacgcttcattgccatctgcttttcatcatatctcaagtgtatcaaacatataaggtatcgtcaaaccgcagcttatcatacatcagcacttttatgatattttgcccggttgccacaaataatcggggataccatctttataaggaacttctatctcgcctcttataagtggttttatataatctgtgatttcttttgtaacatcattttgttctttatttatccactcaaccggcactttcttttctatatttgcgatacatccaagctctatatattctatatcatatctatatggcttctctgataccctctttaaaacaggaataaagcctgaattgcctgcaaccgcatactttaccgctgaaacaccaagttcaaaagcttccctgatgtctgtagccgatgccacatgtgctgcacaacgctgcataatatttatttcaacgctcctgcatttaataccaattttgtctttcaccagaatttcaagtgcttttgctgctcctcccaattgattgtgcccaaacacatctgatgttcccgcacttatataatttccttctctgtcatgtattccctctgaaacagcaaccatcacacaattagattttttgagttcctttttcacatcttccataaatctttctttgtcaaaatcaacctcaggaagatatacaagctgtggcatttcattaaattcatttcttgcaagagctgctgccgccgtaagccagcccgcatttcttcccataagttcaacaatcgtcacacacggtatatcataaatttttacatcatgtgccatttctgccatagacgcagcaatatatttagccgctgagccgtatcccggagtatgatccgtaacaggaaggtcattgtcaatagactttggaacacctgcaaaccgtatatccgaatctatactccttccatacgttgacagcttgttgacagtatccattgaatcatttcccccgatatagaaaaacataccaatgtcatttttatccagtatagaaaaaatcttttcgtagacttctgccccctcttcaacagacggaagcttataacggcatgagcccaaatacattgacggagtaatggcaagtctgtcaatcattgatttcggactccatgtatcaaaagccccatccggctgcgaaattttgatttctgaaacactttcttttccgttttttacatcttcctgaaactctgaaagattaataaaactctcatccaatacgcccttaatgccgtttgccgccccaaaaacttcataatctcctgactgtgcaactccggcaataactccggcaagagaagcatttatagcaaccgtaggtccacctgactgtgcaactaaaactttttttctcataatattatctgttcccttctaaatttacttacatattattatcctaatgtattatacattactcttctcatttggtaaatctaatttttcaggtaacaaatatctatttcttcatgcaatatatttaaaaatcaaatcacagaattactatttactccacgtttttaagcgcatcgctctttggtattttccttatttttgccatttgaataacgcaaaccacaagataactgagcactcccataataaacatcttcatataacaactgtttgatatgatatacggaacatatcccgtcatctgagtatacagatacgatgtaaacatttcatgcaggaaaatgtttactattgggattgctaagagaagcgagataactacaaccacaaatgtagttataatataaagtccacctatctccatatccgaatatccgagaattttcgtaagcgctatcgaattgctgtttttttcgataatctgctttgacaaaaggtacatcagaagaataaacattataactccgaaatatttaaccatatccatgaaactgcccatcgacactttcatctgtgttgatacttttctcaaatcttttaccgttataatactcgctatataatcgtcatctatatctgttaattttttattgctgaaatatccgctgtaatattcatcatccttgtcaaaagtcttaataaacatatccctgttcataaatactgatattaccgcatcatatgtatatgaacctgcaacttcaaatttatatgttttgttgctgtacgggtcttttaattcgattttatcaccgttctttactccaaatttgtccatatatccatttgatacataaactttgtcatcagggatattagcatcaatatatgtactgtcatctgatattccatatattgttatctcatcttccatatattttcccggaagagttttaagactctccacacaatatttttcagctccggattcttttgtttcaaccggtgctttcaaaatatactggtaatctgctatcgtactctttcccaccagttctgaataatcatcaataagcggaccaaacataagactgaatataacaatcattgcggcaaacagtatgccaacaaataatgttatataatttgaaacattttgaaataccactctcaatctgaatctgtgcataaacggtatttttgtatttaaccttatagctttctttcttgttttctttgaaagttccctgcgcaaaaactggagcggtgaaatctttaatttagatgacaaaaccgcataatttatgataaacataagtataatcggaataaccgtcgtatccacaaatgcttctgcattccataacgtattgtaagtcggcaaactgtaactgttataatacattgacgccatagctttcaccataaccgtatacccgataatatttccgataacagccgatataaatgtcacgagtatcggatttatcatataatgtcttactatctcgccccttgtgtatcccgatgctcttaaagtacctatcactcccgcttctttgactattgtattggacgttgttattgcaaaaacaaatgcaagtatcgctataacaatataatcaaacaagataaacattgctttatcgccacccatatcatcaccggtaaagttaatcgctttattggaataacgtggtaaataagatgtaacaacagcctgcttgctcagattttcaagaaaatcatctgacatatccttttgctttttgtcactttcaggctctttatcatacttcactgcataacaataacttaatttactctttttaagtttgctaagaccgctgtcagtcattgaagcaacaccaaagttcaccgaatcaaacatcatatcggcattatcttcaaacacacagctgtaatcaggcattgcaatgaaacccgttattttatatgtatttttatcaattgttatattgtctccgactttatagttattattttttgcaaacactctgtcaagtgcaatctcatcatcattttttgcaagctttcctgacattacacataacttatttacattttttctttccccatatattcttatagtcgcatttctttttgattcctttaattcgtaatatctctggtcatatatcttaaccttattttctttttcaagtttatctatcgtttcatcagacaacttgtcagccgtaacaaaatttatatattccacattatacttgtcaaatccctttttatacgcgtcatatacactgttatcggctacaagaaatcctgatacaagacttataagcatagtcataaataaaaagataacaatatacttcccaatatctccctttaattctctaggaagtctttttgtaagtggatttttcattttctcacctcctaccattcaagttctttcgctgaaattttattttcatttttataattttttcttatctctccatctctcagcgtaataactctgtcagccatattttttatagcatcattgtgagtaacaataattattgtatttccgtatttttcattgatactttctatcaatttaagaatttcctttgaagtattgtaatcaagcgcacctgtcggctcatcgcacaaaagaaggtcaggattttttataatcgctcttcctattgaagttctctgctgctgtcctccggaaagctgattcggaagcttatgtctgtgctcataaagtccaagacctttaagtatttcgtctgtatccatcggattgtcactcagatacgcacccgtttcaacattctcctttatattgagatttggtataagattatacatctgaaaaacataaccaagatgctttcttctgtagcttgtaagctgcttttcattcatatcctcaattttgtcaccatttatggctatgtacccggcatctgcctcgtctataccgccaataatattaagaagcgtagatttgccggaacccgaaggcccaagtaaaacacatatctcccccttttcaatttcaatgttaattccctttaaaacctcaactctgctttctccctctccgtaatgttttctaatatctttaatttcaagaaacatagcgtcactcctcccgatgtttttacatcttaaatcattttttcttttcatctcatgtgaatacttgttcatatgaatatatgtatcacatttcccaaaaaaagtcaatacaaaacagtaaaaaagttagtacatactaactcatattcttagtatatgctaacttcgattagttatcaatatcttattcatataaaattctcgtttttatataatctgcgatgacaaaccataaaaacaatatatccgattatagttcccaatatatttgttactacatcgtcaagctgacaatacccgcatcccgtcctatactgtatacattcaatacatacactgcatatcgcacctgcaaatattgtcaatgccgatacttttttaggcagatcggaagagcgtcgtgtagggaaagagtgtag

SEQ ID NO: 563 - DNA, 11582 bp, unidentified
  source 1..11582: mol_type = unassigned DNA
  misc_difference 568: note = a, c, g, or t
  misc_difference 569: note = a, c, g, or t
  misc_difference 570: note = a, c, g, or t
  misc_difference 571: note = a, c, g, or t
  misc_difference 572: note = a, c, g, or t
  misc_difference 573: note = a, c, g, or t
  misc_difference 574: note = a, c, g, or t
  misc_difference 575: note = a, c, g, or t
  misc_difference 576: note = a, c, g, or t
  misc_difference 577: note = a, c, g, or t
  misc_difference 6182: note = a, c, g, or t
  misc_difference 6183: note = a, c, g, or t
  misc_difference 6184: note = a, c, g, or t
  misc_difference 6185: note = a, c, g, or t
  misc_difference 6186: note = a, c, g, or t
  misc_difference 6187: note = a, c, g, or t
  misc_difference 6188: note = a, c, g, or t
  misc_difference 6189: note = a, c, g, or t
  misc_difference 6190: note = a, c, g, or t
  misc_difference 6191: note = a, c, g, or t
  misc_difference 6566: note = a, c, g, or t
  misc_difference 6567: note = a, c, g, or t
  misc_difference 6568: note = a, c, g, or t
  misc_difference 6569: note = a, c, g, or t
  misc_difference 6570: note = a, c, g, or t
  misc_difference 6571: note = a, c, g, or t
  misc_difference 6572: note = a, c, g, or t
  misc_difference 6573: note = a, c, g, or t
  misc_difference 6574: note = a, c, g, or t
  misc_difference 6575: note = a, c, g, or t
  misc_difference 7329: note = a, c, g, or t
  misc_difference 7330: note = a, c, g, or t
  misc_difference 7331: note = a, c, g, or t
  misc_difference 7332: note = a, c, g, or t
  misc_difference 7333: note = a, c, g, or t
  misc_difference 7334: note = a, c, g, or t
  misc_difference 7335: note = a, c, g, or t
  misc_difference 7336: note = a, c, g, or t
  misc_difference 7337: note = a, c, g, or t
  misc_difference 7338: note = a, c, g, or t
tcagttgtccgtgtcgttcggcatgccggcggccgagtagagccggagcaggtcgtaggcttcgccgatgccgagttcgcccgccttgctgatgtcgagcagccccttgcgggtatccttcatgtatatctgtaccaagcccctgttgaaataggcttcggcgaggcccgggtcgagggcgatagcgtgcgaatactcctcgaatgcctccgggaagcgtcccgacagggcgaacagattgccccggttgtagtagatgcaggggaggttcggattgagtttggccgccttgttcaggtcggagatggcttcgtcgtagtcgtacgtccgtgccgcgtcgcgcatcctggccgaacggtcgctttcgggcgaaatgcgcgaataaccgttgtccatggaggagatgaaatccgtcatttcggcctgtacggcgctgcgggcgatgtagaggaacgggttgcgcggagagagcgtgatggcagtcgaaagggctccgaccgcgttggtgtactgtttcagcagcgcctgtgtcatgccccgcatgaaataggcctgccagcggctgccnnnnnnnnnntccttcctgacgagggcggcggccgccatgtcgcttccttcgcatccgaagacgaccgatgcgtcgcccagcgaagcgatgaactcttccgcctcggcctctccggggtgcaggatgaggccccggcctggctccgcatccgaacggagggtgaagccgtaggaggggcgcagcgttattcgctctttcgttcccattgccgtattgcgtaccggtccgtcggagagctgcgtgtcgaacgacagcagtttgtcgaattgccgggaggtgtcggcaaaggagacttcgctttccccttcgagccgtgcccggtattcggcgattttgcgttcggcgacactgcggtcccgttcggcgccttcgctgtcacggagcaggtatttgaccgaagcccggccgaggtaggcgttggcgaagtcgggatagagttcgatggcgcggtcgtagtcttccagcgccccctgcaattcgccgagtctgaagcggaggccggcccggttgtagtagacgatgacgttgcccggcgagtaggcggctacctggtcgtaatcctccagggcccggttgtagtcacccgtttcggtgcgcaccagcgcccggttgaagtaggttaccgaactggtcgggtcgagctccaatacccggtcgaaatcggcgagtgcggcctgcaggttgtgcttcctgtaatagaccatggcccggctgaagtaggccggtatgtacgacgtgtcgcaccgtacggccgtatcgaaatcggcgagcgcttcgtcgtacctgccctgctccatgtagagcgaaccgcgttcgaggtaaccgcgcggatactcccgattggtgcggatggccctgccgaagtcctcgtatgcggcgaccgtatcctgcaggtggaggtacgctgtgccccggttggcgtaggcgtcggcgtcgcgctggttgaagcgcatgtacatgttgaagtcatcgacggcttcgcggtagcgccccgtgaggatgttcgtgacgccccggctgtaatagggggccggataatcgggacgcagttcgatggcttcgtcgaagtctttcatcgcgtcgtcgtagttgccgagccgcgaacgggtgagtgcacggaattggtaggcgttggtgtaaaccggattttttgcgagtgtcagggtgaaatcccgttcggcgcccagcaggtcgtcgaggtgatacttcgcgataccgcgccagaagtaaccttcgtaggcgtccgggtcggcgcgcagcagaatgttgagcgtctctatcgcttcccggtagcggctgtccataaccatgtcgcggcctacccacacgaaatactgtttgttgacctgcgctccggcgttgtctgcgaacatgcagaaaaggaatagtatggccccaatgaatttacgcattcccggattttaagcttgctaatataacgattataatcctaatacggatgcgccggaggcgttttcggagcggcagcggtctgagaggacttgttaagtggctggatgttagtgtattcgtatccgatggacggtcggccgacgggaaagccccgaaaaaacgggacgtttatgcacctttctcggaaaaaagagtaaatttgcatccggccctaatttggaacggtgtatttgcagctatcccggctatgtagagatagtattgtcatacagtatgttgcaatgcaaaggcaggatgccgggccgtcttgcagggccgtggcggggcatgtcggcggcggtgtcggcaggagctttcggaaatcggtgatattaaaaggaatcccgtgcggcgcagcccgcacgcgggtcggttactaaataaaagttaagctaatgggaaaacagttgaaagtagttgtactcgccaagcaggttcccgacacgcgcaacgtgggcaaggatgccatgaaggccgacggtacggtgaaccgtgccgccctgccggccatcttcaaccccgaagacctgaatgcgctcgaacaggcactgaccatcaaggacatgtgcgaagggagtacggtatatatcctgaccatggggccgctgcgtgctgcggatatcatacgcgatgccatgttccgcggtgccgacggcggataccttcttacggacagggcattcgccggtgcggataccctcgccacctcctatgccctttcgcgggcgctggccgagataaagcccgatatcatcgtggcgggccggcaggccatcgacggcgataccgcgcaggtggggccgcaggtggctgagaaactcggtcttccgcaggtgacctatgcggaacaaatcgtgtcgatagacgacagccgcatcgtcatcaaacgtcgtctggaacatggcgtggagaccgtttcgtcgccttatccgatgctgatgacggtgaacggttcggctcccgaatgccgtccccagaacgcgaaacgggtgatgaagtacaagcatgcccgtacccgcagcgaactgcaggagctcggcgaggattactacatgcagctcctcgaagccaagagttacctgaaaatcaatgagtggaacgtcggcgatatcgatgcggacccccagcagctcggactgctcggttcgcccaccaaggtaaaacagatagagaacgtggtattccaggccaaggagtcgcgcagactgaccgcttcggacggggatatcgattcactgatggtcgaacttatttccagccacacgctcggatagaggaggaatgtaagatgaacaacgtattcgtatatattgaaacggaaggcggcaaggtggctgatgtcagcctggagctgctcaccaaaggccgcgaactggccgaccgcctcgggtgcaaactggaagcgctcgccctcggtcacgaactcaaggagatggataagattgtcggacgctacggagccgatacgctctggctggcggacgatgcggagctcgctccgtaccgcaccctgccccatacggcggtggtttgcggtatcttcgaagaggagaaaccccagatagccctgttcggtgcgacgccggtggggcgcgacctcgctccgcgcgtctcctccacgctgcgcagcgggctcacggccgactgtacgagcctcgtcataggcgaccataccgatgccaagagcggccggtcgtacgagaacctgctctatcagattcgtcctgccttcggcggcaacatcatcgccaccatcgtcaatcccgaccatcgtccgcaaatggcgaccgtccgcgagggcgtgatgcgcaaggaagagctcaaggagccgaagcatccggaggtgaaacgggtggacgtggcgaagttcgtgaaggagagcgacctcgtcgtgaaaataatcgaccggcatatcgaggagcggggcatcgacatcaagaacgccccggttatcgtggccggcggttacggcatggggtcgaaggagaatttcgccatgctgcatgaactggccgacctgctcggcggcgaggtgggcgcgtcgcgtgccgccgtggatgcgggatttaccgaccatgcccgtcaggtggggcagaccggcgtgacggttcggccgaaactctacatcgcctgcggcatctccggtcagatacagcatacggcgggaatggaccaggcctccatcgtgatagccatcaataccgacccggaggcgcccatcaacaaattcgccgattatgtgattaccggcagtgccctggaggtcgtgcccaaaatgataaagttctataaacaaaactccaaataggcgggagccgtttccggggagggccgagagagacgccgcttcccgtatccgggaacctgccgcaaggcaagatatgggaaacttttttttagacaataaagacctgcagttccacctgaatcatccgctgatgaagaaaatcgtggagctgcgcgagaagaatttcgccgacaaggatgtgtacgactatgcaccggcggatttcgaggatgcgatggacagctaccgccgcgtattggagataacgggcggaatatgcgccgacgtgatagcggccaatgccgaggatgtcgataaggagggaccgcgggtggtggatgaccatgtcgtctatgcacgcggtacgcaggctaacctcgatgccatccgcaaggccggattgggcggtatccacctgccccgcaagtacgaaggactcaacatgtcgctcatctgcttcgtgatggccaacgagatggtggcccgcggcgatgccggtttcgagaatatctggggattgcaggactgcgccgaaaccatcaacgagttcgccagcgaggagataaagcagaaatatctgccgctcgtatcgcggggggctacctgcgccatggcgcttaccgagcccgatgccggttccgacctgcaggcggtgatgcttcgggcgcattacgacgaggccagcggcaagtggttgctcaacggcgtgaagcggttcatcaccaacggcgacggcgacatctcgctcgtgctcgcccgctcggaagaggggacgaaggacggacgcggtctctccatgttcgtctatgaccgccgcgacggcggagtgaaggtgcgtcgcatcgagaacaagctgggtatcaaaggctcgcctacctgcgagctcgtctatacgaacgctccggcagagctcgtcggcgaccgcaagctcggtcttatcaaatacgtgatgtccctgatgaatgccgcccgtctcggtatcggcgcacagggcacggggctgtgcgaggccgcctaccgcgaagcgctgaagtatgccaacgaacgccagcagttcggcaagcccatcatccagttcccggccatttatgaaatcctgacgaacatgaaggcgaaactgtacgcatcgcgtgcgatgctgtacgagacggcccgtttcgtcgagatatacaagtgctgggcggagataggcaaggaacgtccgctgacggccgaggaaaagagcgagatgaaggcctataacaagctcgccgatgccttcacgccgctctgcaagatgttcgccagtgaatatgccaaccagcttgcctacgaggccatacagatacacggcggttcgggctacatgaaggactatcccatcgaacggatttaccgcgatgcccgcatcaccaacatctacgaaggtacgacccagcttcaggtggtggccgccatccgccacgtgacgaccggcacgttcctcgcgcagatgaaggcatacgaggctgccgagcgcccggccgagttcaagttccagctcgacaagctcatcgccatgcgcgaggagtacgaacgggcgatagcccgcgtaacgggcggcgacagcgaacagatagagttccatgcacgtcggctcgtggagatgaccgggcacatcgtcctttcgcacctactgctccgtcaggcggccgagagcgaagagtatcgggtgcctgccgaggcgtacatcaagtatgcccaagcgcagaacaaggcggcggccgaattcatcgccaactcctgctgcggcgatatcgacctctacaaggcggttctgaacgagacgctggaataagataagaacggttgcgcggaaagcgtagccgattgggacgaggggtgcggcaagattgnnnnnnnnnnccctacacgacgctcttccgatctacccctcgtctcgtctttgctccgtggacagccgtaacggattgcctgcgaaacggtgcggtaaagtgggtgtcgttgtcgggcagtgtatcccggccggtgaaacccagccggacatgacgctgtttcgggaagacgttcggcggcggtgacggaatcgggagttgtctcggtcggagctgagccccttgcctgcgtgtggttgttgggcgatttccgtgcagaacctgtatgcggttcagtcggaatgccggaaagcggcgacagggaaatggccggtcggttttcggaatctctgtggccgtactgttgcgggggcaggaacagtacggcacggaatgctgccggttnnnnnnnnnncgatgtccgggaaaggatggggagaggctggcaggtcagagttcctctatgaaatgcggatatttgttccggtattcgtcataaatccgttcttcctgtccgtcgaggttgagttgatacatgcgaaagacgaccgggatgtttttgggctgccagagctcccggtaggagtaacggtatttcatacctatggcctgcatcacgtttccgcttctcgggttgttcacgtcgtgcgtcgccgtaacataagggagaccgtctcgccgaagccggtcgatgatggcctggcaggcttccgtacacaggccccggtgccagaatgcttttcggagtccgtaccccaggtcgtggctgccggcgccgcttacgtggacataaccgacgggtacatcgctgcctttcatgcagacggcatcgtataaaagcgattcgccggaacgcagtgctgcaagtttcttgtgcaggtatgcctcggcctcttccaaatgcttcagcggaaacatgggcaggaatgtattcacttcggtgtcgcccagaatgtccagcagggctttcgcatcctgttcggcgaacggccgcaggtgcagccgttccgttcttatgtcatgggacatgcgttcgttttgtgagggttgtcgcattgtatccgggcatttatcggtgaggcggtgccatgccccgtacttttgccggaaaggcgggaacgacggattcggggaaattggccggaggacgtccgttcgctgccgcacgnnnnnnnnnntttccctacacgacgctcttccgatctatagaagaggtcgctgatgatgctgttggagaccatgagcttttcgggtggtatcctgtacacattgccttcgcggactatcaagccgtttcggagaaacttgccggcacaatattcgaagtagagcagtcccttgaacccgaaccgttcggagagcgcgtcgcgtcgaataccgtaatcggtacggagggcggtcatgatatattcgttgtacttgtctatgcgggagaggatttcccgtccgtatatccggtcggtaccggccagttcgatgtacttttcgaggttgttgaccgagtagatacgttggtccccgtcgtaggagtgggccgatgggccgaggccgagataggttttgccgcaccagtaggcccagttgtgcagcgagcggaactcttcgccgcgggcatagttggagatttcgtagtgacagaaaccgctgtcggtcagaatgcggtggcatatcatgaactgctcctcacatatttcgtcgctggcaggtatgagcgttcccgcctccgccatgtcgccgaagacggtgttgtcggagatggtcaggcagtaggccgagatgtgctgtacgccgagtattacggcacgcaggacattgttttcccactcgcggagcgacatgccggggatgccgaagatgaggtcgagcgaaatgttgccgaacccctttgcctgggccgcccggatagcctctaccgcctgttgggcgttgtgccgtctgccgagcagcttgaggtcgcggtcgatgaaggactgtacgccgaaactgagccggttgatgtcggtacgggcgagttcgtccagatagtgttcggtgatgtcgtcgggattcgcctcgaccgtgatttccgataccccttccagattccagagcgagcgggccttgtcgatgagccgctggagcagggcgggcggaagaagcgacggggtacccccgccgaagaataccgtgtctaccggggtgtcgccgaaatagccgcgccggtactccatctccctttcgagggcttctatgtaatcctccgttttggcacaggatgtgcttttataaaaatcgcaatagttgcagcgcgttttgcagaacgggatatggatgtacaatgcggccatttctgggtggaatgatggtgtgtttcgatttcgtaaggtgctgaacacaaaaaacgtgcgaaagttagcaaaaaaaccgtaataatggccgccgctgccgtcattatgcggtgggggaagatgtgcagataggtattcccggtttccggtacggtaaaaaaagtcgattttatacggtggaattagtaccgcaagacggaattattccatatctttgcgccgttgttagtgtgctaacaataattccggcgggaaagagttatataaccggattcgcagaccggaccgttccgggtgtccggaggcgcatataacaggtgagaatagcataaacacataatatacagaagattatggcaaagaagattgatttgaccaagtatggtatcaccggaaccccggagatactgtacaatccgtcgtacgaacggcttttcgaggaggagatgaacccggccctcaccggttacgaacggggccaactgaccgataccggtgcggtgaatgtgatgaccggcgaatataccggccgttcgcccaaggacaagttctttgtgatggacgacacgacgcgcgataccatctggtggaccagcgacgagtataagaacgacaacaagcccgtgagcgaggaggcgtggaaggagctcaagaagattgccacgaacgagctctccaacaagaagctcttcgtgatggatactttctgcggcgccaatgcgaatacccgcctcaagatacgtttcatcatggaggtggcatggcaggcccacttcgtgaagaacatgttcatccgtccgaccgaagaggagctggagaactacggcgaacccgacttcgtggtgatgaacgcttccaaggcgaaggtaacgaactataaggagctcggcctcaattccgaaacggccgtcgtcttcaacctgaccgaaaaggtgcaggtcatcatcaatacgtggtatggcggcgagatgaagaagggcatgttctcctacatgaactatctcctgccactcaagggcatcgcttcgatgcactgttcggccaacaccgacaaggagggcaagaatacggccatcttcttcggcctctcgggtacgggcaagaccaccctttcgaccgacccgaaacgcctgctcatcggcgacgacgagcacggctgggacgaccagggcgtgttcaacttcgagggcggctgctacgccaaggtcatcaacctcgacaaggagagcgagccggatatctggcacgccatcaagcgcgatgcgctgcttgagaacgtgacggtggacaaggaggggcatatcgacttcgccgacaagagcgtgaccgagaatacccgcgtgtcctatccgatatacttcatcaacaatatcgtgaagcccgtatccaagggcccggctgcggagcgtgttatcttcctgtcggcggatgcgttcggtgtgctgcctcccgtttcgatcctcactccggagcagacgaaatactacttcctctccggttttaccgcgaagctggcgggtaccgagcgcggtatcaccgagccgaccccgactttctcggcatgtttcggtgcggcgttcctctcgcttcaccccaccaagtacggcgaagagctcgtaaaacgcatggagaaatcgggtgcgaaggcctacctcgtgaacaccggctggaacggtacgggcaaacgtatctccatcagggatacacgcggcatcatcgacgccatcctcgacggctcgatagacaaggccccgaccaagcagattccttatttcgactttacggtgccgaccgcactcccgggcgtagaccctgcaattctcgacccgcgcgatacttatgccgacgcggccgagtggaacaggagagcggaagaccttgccggccggttcatcaagaacttcgagaagtttaccggcaatgcggagggcaaatcgcttgtcgccgcaggtccgaagctgaaataagagtgtagtgttgtcactcatcgaacggcggggcggcgtaatgtcgtcccgcttttttcaaaaggagaagagatgaagacgattcgaaggtacatgtttttcgctctccttctgctggcggcagtcgcctgccggccgggagcaggggcggaacggggagcggccggattggattacggtcgggccgacatgtggtatcggggcggtacggcggcttcggcggagaatgccgatgtgttttacatcgccccgacctgcaattggggacggacggatgccgacggcaccgtgcattggcagatggatgtgtacgataccgtgcagcgtgccaatctgcaggcgccgctcagactggccgagcgcgtgttcgccgaaggcaaccgcttctacgcgccttattaccggcagattaccatggagtcgtggttcgagcccgattcggttatcggggcaaggtttgccgtggcgatggaagatgtacgggaggctttccgttactatctggagcacttcaacgggggccggcctttcgtattggcgggacacagccagggagcccggtgcgtgttggagctgttgaaggaggagatgaacgacagtctttacggccggttggtggccgcttacgtggtcgagtaccggattaccgacggagagttggagggagcgcggtatgtcgtgcctgccgccgactcgctcgatacaggtgtcgtgatatgtatcaacagtgtggcgaatacctctgcgctctctccgctctttcggggaaaccgtgcctgcatcaacccgatgaactggcggacggatgctcttccctcccggccggaggagaacctcggtacgcttttcctcaatccggacgggacggtcgcccggcaggtggaacccgtgacggcacgtatcgatacggcctcctgtacgctcatcgtggacggtcttgttccggaggagcatttcattccggccatagcccccgtagcaccgctgggaaattaccatgtgcaggaactgaacatctatttcggcaacctgcggcacaatgtggcgcgaagggtgcgggcgtattatgaagaaggccgtgcggcacgtttcccgaccgcatgccgggctgccgcagtccgggaatga

SEQ ID NO: 564 - DNA, 14368 bp, unidentified
  source 1..14368: mol_type = unassigned DNA
  misc_difference 951: note = a, c, g, or t
  misc_difference 952: note = a, c, g, or t
  misc_difference 953: note = a, c, g, or t
  misc_difference 954: note = a, c, g, or t
  misc_difference 955: note = a, c, g, or t
  misc_difference 956: note = a, c, g, or t
  misc_difference 957: note = a, c, g, or t
  misc_difference 958: note = a, c, g, or t
  misc_difference 959: note = a, c, g, or t
  misc_difference 960: note = a, c, g, or t
cgatatgcaattcaacgctgttgctgttgcattaaaaagttgaattgctataatgtgagatgatcagcaactgcctgccgctcagaccagataaccctcaaagcagtgcagatcctcggtcttgacgataccttccagatacagcccattctcccggtattcctctgcctgcacgctgccgcgctcccgcatgggggcggcaagtcccagcttgtcgtagggcagcagcacccggatggtgtgcacccggtcgctgagcacctcgtccagcttttgcagcagcttgtccagcccgtagccggtcttggcgctggtcagcaggatatcggggtcaaagctcagggtgttgggcttgtcgcacttgttgtacacggtcaggcggggaatgtcggcacagtccagcccgtccagcacctcatcggtcacagacagctgctcctcgcgctgctcgtccccggcatctgccactcggacgatcacatccgaccatgcggcttcctccaaggtggatttgaaggcttccaccagattgtggggcaggcgggacacaaaacctaccgtgtccaccagcagcaccgccatgccgctgggcagcaccagtttgcggctggtggggtccagtgtggcaaacaacatatcggcttcggctacgctggggccgcacagggcgttcatcaggctggattttcccacgttggtgtagcccacaaggcttaccaccggcattccggtcttggcgcgagccttgcggctctcgccccggcgcttttccatctcagccagcttttcagccagcgcgtcaatacgggcgtgcacatgacgacgatccagctccagcttggtctcaccggcaccgcggcgggcaccgccgccgccgccaccgccgccgccctgacggctcagcgcttcgcccatgccctgcaggcggggcagacggtagcgcagcagcgnnnnnnnnnncgccagctcggtctgcagcttgccctcgttggtcacggcgcggctgcggaaaatttccaaaatcagcatggtgcggtcgatgacctccaagccgcccagcgcattggagatgttgcggatctggctgccggtcagctcgccgtcaaacacagcgcattccgcgcccagcgtctgggcggcaagggaagcttcctccagcttgccgctgcccagcacgatgccggtctccggggtctggcgtttctgggtgatctgtgccacggcttccatgtggttggcctcgcacagggcagaaagctctgccagactgcgctcacagtcccacagcccctgatccagtgccagcagcactacctttgtgggaggggtctcggtcaaaatatcataaagctcgctcaaagtaagtcctttctgttattatagcgttcttttgtcagaaggtagcaccggcattccaccggtgtgccgtcaaatttgtggtaaacatcgttgtggtggtacacaaaaccagccttttccatcacccggccgctggcggggttctgcaccgcgtggcagcaggtgaggaaggcaccgcccacctgtctgaaccagaaatccaccacaacttgcagcgcttcggtggtaaagcctttgccccaccacttctgcccgatgcagtagcccggctcccagatgccgccggagagttccagccccggccatttggtcttttgctgcggctcacccagcagggcgttgtacacggagagggagccgaacacctgtccggtggccttttccactatggcccactggtaataatccgggttcggatacagctctgcccacgccgaaagcagttcccgggtctcggcagggcttttgtgcggttcccagcgcaaaaaccgggtcacagccgggtcgtttgcccagttttcgtacatctgcggggcatcctgcgacagcaggcggcgcagcagcagacggtcagtttccagctcaagtgtgccggtgtggcgcatgatccatcctctcccttttataaaaacttattccttgggtgtatctgaaaagtcgaaaatttagtctatttctacaaacacagctggattttgcgtgaatcagccttgaaatccacaaaggattcctgcggctatttgccttaaatcccgcttgtgtttgcgaaatattcgtcattttctttgttttcagatacaccttaagatagcacaaaaacagccacgccgcaagcgaaataaagaaaaccgcttgaccggatgagtgaactacgataaactgaaagatgaaatcttttataggaaagggaaagtaccgatgttagatgtgcgcaaactgttagcccagcgtccgctgctgttcgatggcggcatgggtacctattataaagcaaagccggggcaggagtgtgaacaggcaaacctgaccgacccggatggcattctggcggtgcaccgggcgtatcttgctgccggagcggacgccatcaagaccaataccttcagcctgccgcgtctggcggcggcgcagcagccgggctgggagcagctggcggatgcgggctggcagctggcagcaaaggctgcaggggagaccggcgcggcggtgtttgccgaccttggccccgcgccggacaccgagaacctcccggcggagcaggtatatctttccgtagcaaagcgctttgcgctgcggggagcacggaattttctgttcgagactctgagcgccgaggaaggtgtgctggaagcgattcgtgcgctgaagcagaccgtgccggaggcctttgtgctggtatcctttgcggtgctgccggacggctacacccgcgagggccgctactgcgccgaactggtgcgccgcatggcgcagagcggcgtggtggatgccgtgggtctgaactgtgtatctgccccgggtgcgatgcgggcactggtgcagcagctgggagatgcgggactgcccctttcggtcatgcccaatgcgggctacccggtggtggcgcgggcacaggtgcgctatcagggcaagccggcgtattttgcccgggaactgagccgccttgccgccgagggcgttcgcattctgggcggctgctgcggcacgaccccacagcacattgctgccctgcgcaccgcgctggatgctttgccggaagcgctgcccgccgccccggcggcaaagcccgctgcagtagcaaagcctgtagtggaaacggacgatgccttcttgcgcaagctgcgcaccggacagcgggtcattgcggtggagctggattcccccaaggacgctgacctgacggcctatctcgaggggacccgccgtttgcaggccgccggtgccgacctgctgaccattgcggactgtcccattgcccgggcgcggatggattcctctctggtggcctgccgggtgcaccgggagctgggtatgaacgtgctgccccacatgacctgccgggaccgcaacctgaacgccaccaaagcactgctgctgggattgtacgccgagggtgtgcgggaggtgctggccattaccggcgaccccatccccaccgcagagcgggacgaggtgaaaaacgtgtaccagttcaactcccgcaagctggcgcagtatatcgtatcgctggccggggaggggcgggagatgcccagccccatcacggtgttcggtgcgctgaacctgaatgcccgcaactttgaggtggagctgcgccgtgccgcagaaaagcaggaaaacggcatgagcggtttcctcacccagccggtgctgtcggcacaggcggtggaaaatctgaaaaaagcccgggagatgctgggtgagcaagcaaaaattctggccggcatcctgccggtggtcagccagcgcaatgcgatctttatggaaaacgaggtcaacggcatccatgtggacgaggccatcatccagaagtttgaggggctggaccgcgccgcaggtgaggagcttggactggaagtctcggtgcaggcagctaaggcggctgcgccctatgcggacggcttttacctgatgacccccttcaaccgggtggcgctgatggagcggctcattgcccgcctgcgcacggaggtgacggattgaacaacgtaaaacgggcgccggaaggggaaaaagcaccgctgctcagcatcattgtgccggtgtataaggtggaaagctatctgcccaaatgtattgattccattctggcgcagacctttacggattttgagctgatccttgtggacgatggctcaccggataattgccctgcgctgtgcgatgccgccgccgcgaaggatgcccgcatccgggtgatccaccagaaaaacggggggctttctgccgcccgcaacgccgggctggatgtggcaaggggggaatggatcggctttgtggactcagatgactacattgcgccggaaatgtacgaagcactgtataaggctgtgcaaagcaccggggcggaccttgccctgtgcgattacgccgaggtggacgagacgggcgcactctgcccaccgatgcatatcagccttgcagagcaggtctttaccggacgggaactattgaaaaatgccacagatacgatgatccagcctgcgtggaacaagctgtaccgccgtgccatctttgcacagctgcgctacccggagggcaagctgaacgaggatctgttcctgatcccggaggtctgtttgcagatccaaaaggccgtggtggtgccaaaagcactgtattattatgtgcagcgcggcggcagcattatgagcggcaataaaacgctgcgccatttcgatgctgccgcggcggcacagcggtattgggaatgtcttgtggaaaacgctgcatacgatgcgctggcaaatgcggcaaagtttacgatgggcagcgtgagccgggggtaccggcagctgccaccggcactgcgcaaggcatcccgcagccgggaaatgctgcggatgcagtttgaggtggtcagccgcacccggcagtactgcaacgttccgggcgggctttggctgcaaagctggctgctgtggcgcttaccgcagacatatagccggctgcgagggttcaagggctgaggagaaagagaaaaaacgcatgagaacacgctattctatcatcaatatgctggtcaacatcggcgggcagtttttgacgatgctgctgtcctttatcggccggatggtttttatccactgcctttcggcagcctatctgggcgtcaacggtctgtttaccgatgtgctcagcatccttaacttcgcggagctgggcatcggcacggccatggtgttcagtatgtacgagccggccgcccgggatgacgagcagaaactggcgcggctgatgaacctttataagtggatgtaccgggcggtggcagcttcggtgctgttgttcgggctggtgctgctgccgtttttgccgtacctcatcaagggcggcgagggcattgagcatatcaccctgatctacatgatgtatgtgctttcctctgcctgctcttacctgctgaactataaaagctctatttatcaggcctaccagaaaagctatatctgcaccgggtggacactggtatgcgagtgcatccgcaccgtcgtgcagatcgtggctttactgctgacgggcaactttatcctgtaccttgccatccagcttgtggtgcagttcatacccaacatcattatctcccacatggcggataaggaatttccctatctgaaggaatgccgggagctgccggaaaaggaggaacggaacggcatcctgaaaaacatcggcgcaatgagtatgcacaagctggctaccgtcatcgtgcgcaacacggacagcctgctgatgtcctccttcatcggtctggcaacggtggggctttactccaattaccggttggtactcaacgcgctgaacaacctgctgaacaagtttgccacggctttttccggcagcgtgggtaattttgcggcgctggaaaactctgaccggctgtatcgggtatataaggagatggactttctcttttttgtgcagtctgcctatctgactggcgggctgatgatgctgttcaatcccttgatcgagctgctgtttggcagggaatactgtttcccgatgacgaccgtggcgatcattgtgacagaattctatatctcgcggatgcggcagacgaacctgttgttccgggaggtcatgggtctgttctggaacgaccgctataaggctgtggcggagtccatcatcaatctggtggtctctctggcgctggtgcagcggtacggcgtggtcggcattatcgggggtaccatcatcagcagcctgtgcacctgtgtctgggtggagccctatatctttttgaagtatggcgttcaggatgcatggcagaagaagctccgggtttattttgcggagtacctgaagcgtgcaatgatcgtggcggcggtctcggcggcagccatgctctgggtaaagcgctttccggtgggcaatttcggcgtttttgttttggacgggctgctttatacggcggtgtttgcaggagtgatcgtattgctctaccggcgcagcgtggagtacgaagcgctgaagcggcgtgggttggaaattttaaaaaggagagccggatgaatacagaaaaaagtcccctgatctcggtgatcgtaccggtctataaggtggaaaagtatctgcccgcgtgtctggacagcctgctggcgcagacctaccggaattttgagctgatcgttgtgaatgatggttcgccggacgactgctggcagatcatgcagcgctatgcggcgcaggatgcccgggtgcgcattttcaacaaagaaaacggtggggtgtcctcggcgcgcaattttgggctggatgtggcaaggggcgaatacatcggctttgtggattcagacgaccttgtgctgccgcagtatctggaatggctgtacgatgccctgtgcagctgcggtacccggatgtccatgtgccgctaccgcggtatacaggaaaaccagtccctgtggacagtgacagaatgcccggcaccgcagaggatcacggcggaaaattattcgtggatgcgggaatggagcggcgggcactgctggcggatgctgacccaccgggagatattacgggatatccgttttgatccggcattgctttatggggaggataccctgttttttgtgatggaatttctcaaggctggtagtctggcgtttttgaactgcccgctgtatgcctatcttgaacgaccagattctgccgtgcggcagaagccgagcctgcgcttttatacggcggcactggcatgggaacgggtctggcagctggcaaaggagcagccggaccccttccgcagtactacggatcagcgctgcatcatgtcctgcgccgaggtgtatttccggctggtcaaccagccggagcgggacccggaaaaggaaaaaacactgctggagctggcttccacgcaccgccacgctgcgtggaagatcccgtcggagcacaaaagccagaagctgcaggcgctgatgatgggttactgcccacatctgggcgcaaaggtatggaagctggtgcgttgggtgaaaggtttgaaaaactgattgacaaatctcacaaaaaacgctatattctttttataaatgcgttgaaaaagagtgtgcatcgtctgggaccgcacagagagccgggggcagctgaaaacccggcgggataccggcggggcactgtcactttggagcagaagcggtgagccttgccggtaagccgctttcgggtctgccctacgttacaggggcatcaaggggcgcggagttttccgcgcaatttgggtggtaccgcggtcatgtatttacagccgtcccatggaacgctccgtgggacggctttttgcgtcccacttcatcaaatttttgggaggacactatgaaagaacttgcaaagcagtacgatcccagtcaggtggaagatcgtatctaccagttctggctggatggcggctacttccacacgaaagccgatccggacaagaaaccttacaccatcgtgatgccgccgccgaacgttaccggtcagctgcacatgggtcatgcggtggataacaccatgcaggatatcctcatccgcaccaagcggatgcagggctatgccgccctgtgggtgcccggtaccgaccacgcttccattgctaccgaagccaaggtggtggaggccatgcgcgccgaggggctgaccaaggaaatggtcggccgcgacggttttctggagcgcgcatgggcatggaagaccaagtacggcaaccgcatcgtcagccagctgaagaagctgggcagcagctgcgactgggagcgcgagcgctttaccatggacgagggctgctctgaggctgtcaaggaagtgttcgtgcatttgtacgacaaggggctgatctaccgcggcaaccgcatggtcaactggtgtccccactgcaacacctccatctccgacgccgaggtggagtacgaggagaaggacggcagcttctggcatctgctgtacccggtcaaggagaccggcgaaatgctggagctggccaccacccgccccgagactatgctgggcgatactgctgtggctatcaacggcgaggatccccgctacgcccatctgcacggctgccatgtggtgctgcccctgctgaacaaggagatccccatcgtctgcgatgagcacgccgatatgaccaagggcaccggtgtcgtgaagatcacccccgcccacgaccccaacgactttgaggtcggcctgcgtcacgacctgcccatcgtgcgcgtgttcacctacgacggccacatgaccggcgctgccgacaaggccgccgccgatgccctgtttgccgccggcaagaacaccgtcaacgagcctcaggtgctggactgcggcaagtacgccggtatgaccacgctggaagcccgtaaggccattctggctgacctgaaggagggcggtttcctgaaggagatcgagcccctcaagcatgaggtaggcacctgctaccgctgccactccaccatcgagcccatggtctccaagcagtggttcgtcaagatggagccgctggcaaagcccgccatcgagagcgtggagaagggcgagatcaagtttgtgcccgagcgctttactaagaactatatgaactggatgaagaacacccgtgactggtgcatcagccgccagctgtggtggggccatcagatcccggcttggtactgcgatgactgcggcgagaccgtggtggcaaagtctgctccctgcagctgccccaagtgcggcggcgcaaagctgacgcaggaccccgacacgctggatacctggttctcttctgccctgtggcccttcagcacgctgggctggcccaacgaggacagcgccgacctcaagtatttctaccccaccaatacgctggtcaccggctacgacatcatcggcttctgggtcagccgcatgatcttctccggtctggcctacaccggcaaggcgccctttgacaccgtctgcatccacggcatcgtccgcgacagtcagggccgcaagatgtccaagagccttggcaacggcatcgacccgctggaagtcattgcccagtacggcgcagacgctctgcgctttatgctggtggatggctccaccccgggcaacgatatgcgctatatcgaaaagaaggtggaggctgcccgcaactttgccaataagctgtggaacgccacccgttttgtgctgatgaacctgcccgaggactttgagccgggtctgcccagcgaggagctgctggacatgagcgacaagtgggtgctgaccaagctgaatcaggtggccggtgctatgaccgataatctggagcactacgagatgggtctggctgctgccaagatcaacagctttatctgggatgtctactgcgactggttcatcgagatcgcaaagccccgcctgaactccggcgacgcacagcaggcagatacagcccgccgtgtgctggtgtatgtgctggataaggcgctcaagctgctgcatcccttcatgcccttcatcactgaggaactgtatcaggcgctgcccggctctgccgagaccatcatgacgcaggcttggcccacctttgacaccgctcacaactgggcagccgaggaggaagcctttgaaaaggtgatggattatatcaaggctgtgcgtaccatgcgcaccgagatgaacgtgcaccccgccaaaaagaccagcatgatcatcgagactgccgatgcagcccccttccagaacgcacaggtctatctggctaagttcgcctttgccacggatgtgacctttaccgaaaagtacgagggcagcaccgacggcatggtgcaggtgtccacccacgccgcccgcggctttatccccatgatggagctgatcgaccgcgagaaggagctggcacgcctgaacaaggaaaaggccaaggctgaaaaggaaatggccatgtttggcaaccagctgaacaaccccaagttcgtggagcgtgccccggcggctctggtggaggaaatccgcgcaaagttcgccaagagtcaggacaagctggccaacattgagcagagcatcaaggcgctgggttgagactgtggaacgctataacgatacggagtgcacctcgttgtgggtcattgcggggcgggtgatctttaccgctgcactgattgcctgcatctggttcatcttttccaactccatggcggtggcaacagtctccaccggctccagcggccgggtgctggcatggatgcgcattatcctgcgccgcttgggtcatccgggactggctgaccgcctgaccatgcacatcgtgcgcaagctggcacacttttgcgagtatatgctggagggctttctgctcatgctctgtatgcgggtgtacagccgccacccgctgcggcatatcaccgtgcccatgctgggcggtgtgctgacagcgctgaccgatgagaccattcagctcttctcggaggggcgcagcagtcaggtcaccgatgtgtggctggattctgccggtgttctggcaggcatccttgtcgccatcgtgctgctgctggcctgcgaggggctgtattatcacatgaaaaggagacacgaatgaccatccaacaggcaaatcagtattttgcagctctgccggacggctttgccgacccggcgcagctgggtgcgctgctgcccgcctcggtgcagcaggtgcagtttgtgggcgtggcaggcactgccggtaaaacggcggtggcgcgcctgctgacggccatcctgcacgcgcagggcattcgtgccggtgtctatcatgctgggtgcgagccccttgcggcccgtatccgggtggcgggcgagccggtggacgagacactgctgtgccgcgccgccgatgctcttgccgcccatgaggaactgcctatgcaggcggcggagcttgccgccgctgcgtactgctttggcgaagccggctgcacgctggcggtggtggagttgccggacgcgggtctggctgcggcactgccccaaatgccggtgtgtgctgtcacagcggtggggccggacggcgtgagccgctcggtggagcgtctggctgcgctggcaggcggcgtgatacgcaaggacagcatctgcgtcaccgcgccggaacagcccaaggcggtgctcagtgagctgattgttgctgcgggcaagtgcggctgtgagctggtagtgcccgacccggaggatatcacctttttggaagcagaacagttcgccagccgggtggactacggcggctatacggtgccgctggcctttctggggcgtcacgccgcaggcaacgccgccatggcggtggagctggcactggcgctctgccgcaagggggcagacatctccgatgaggcgattctggatggcattgctgccgtggacaaccgctgcagcatccgggtgctttctcagcgcccgctggtcattctggatgcctgccgcaccccgcagcaggctgctgcactgctgcgtgtgctgaacatggccaaggtgcgccacatgagcgccatcatcggcctgaccgaggaggagggtgccgaagccttcttctccgcgctggaaaccggcctgagccccgaggaacagaaaaaggataaatcaaccatgccaggcatgagcgagagcccctttgataaggtgtatctcgtcacgcccgccggtgtggaggagcagctgacccggcgtctgaccgagaaggcaaaatatcactttgacgctcagctctgcaccagtctggacgaagcagtgcagctggcgcacgccaacacccgccgtggattgctggtctgcggcagcgaggcggcagcgctggaagctgccgagctgctggcaaaggcataaaccgccgacagctttttctaaaaaataacccgaagatcccgtacactgaagctatgtgtacgggatcttttattttgcaaaaaaggagatggacaagcaatggcaacggtgaccttcagcgcggcaggggagaccctgtacgcctatctggcgggcgagatcgaccacgatgccgcccagagcctgcggatgcagctggacgatgcactggtcagccgcagcccgcgtaccttgatcgtagaccttggcggggtggggttcatggattcctccggcatcgggcttattcttgggcggcagcgctgcgcccgcgttctgggcacgagcctgcggctgcagcacgcccccgcgcagctgcaaaaagtcctgcggctggcaggcatcccttgtacggagaacatagaaaaggagaatgcgcaatgaaagcagagaacagtacccgcatccagttcgattccctcagcagcaatgaggcatacgcccgcggcgtcacagcggcctttctggcgcggtacgaccccaccgtgccacagcttgccgacctgaaaacggcagtgtccgaggcggtgaccaactgcatcgtccacgcctacccggagcggatcgggccggtgtgcatgaccatagcggtctatcccgaccgggaggtgcacatcaccattacagataagggcatcggcatccccaatgtggaacaggccatgcagcccttgttcaccaccggcaacccggaggaacgctccggtctgggctttgcagtgatgcaaagctttatggacagggtcaaggtcacctcaaagcccggcaagggaacaaaggtgctgctggtcaagcgtctgtcccggcgggagcctacataaaaaggaaaggcggtccggtatatggtaacggataagacccggcgggaagcattcatcacacagaatctggggctggtgcacgcctgtgcgggcagattccgtgggcgcggcatggagtatgacgatctatacagcgcagggtgcgtgggactgatcaaggcctacgataattttgacgagagccggggcgtgtgcttttccacctatgccgtgccggtgatccttggcgagatcaaaaagctgtttcgggatggaggtacggtcaaggtgagccgctccctgaaggagctgggaatgcgggtgcaggcagcacgggagcataccatgaagttgtgcggcgcagagcctaccttgcagcagctggcagaacagctggatgaaccgatagagaatgtagcccttgccatacaggctgcgcagcccgccatgagcctgaccccggagagcggcgaggatggagatcggcagttggatatcccggtggaatcaccggaggaggagctggcggataggatcagtctggcggaggtgatcgaagcgctgccagagcaggataagcagctgatacgcctgcgcttttatggcaaccgcacccagagcgagactgcaaaagcactgcacacgactcaggtgcagatctcccggcgggaacgcaagatcctgatccggctgcgcacccggcttttggaggaataagggaggaagtgtctataataaatgtaaaaaactgggcaaaaagtcaaaagaatgattttggtgtaaaaaatgtaaaaaagtgcttgctttttgaaggatgctgtgctaaaatacattactgtcaggcggacgtccgacagaatgaaacacttcaaaatgaacgtcaaatagaaagattcgacagaatcaaaaatgaatctcgaaaatctttcaaaaaagtgcttgacaacttatcacgaaagtgataaaataactaagctgtcagccgcaaggctgcagcgcacaggaccttgaaaattgaacaatatcgaaagaacttgtaacggaacctatattcgtgttggaaaaacacggtaaacaattccaaacaaaagtaattcacacaggacgcaagcgattgcgtgctgagcgaaacaagatttaac

SEQ ID NO: 565 - DNA, 11780 bp, unidentified
  source 1..11780: mol_type = unassigned DNA
  misc_difference 8662: note = a, c, g, or t
  misc_difference 8663: note = a, c, g, or t
  misc_difference 8664: note = a, c, g, or t
  misc_difference 8665: note = a, c, g, or t
  misc_difference 8666: note = a, c, g, or t
  misc_difference 8667: note = a, c, g, or t
  misc_difference 8668: note = a, c, g, or t
  misc_difference 8669: note = a, c, g, or t
  misc_difference 8670: note = a, c, g, or t
  misc_difference 8671: note = a, c, g, or t
agctcccatttctcctgcattttctcctgctgtatctccgccgtctacttctgacatccatagattcttgccttctgtttctgccagagtacgtaatgcttcacgtctggaaccaccataggtatgtgtatcgattctgtctacaacgtcctttgcttcctggcttaactgaccataggaaagaatctgcacatctatgctggtttcgtctgttcctgacacctgcacttgatccagacctttggcatccagggcatttctaagggaaagtatcagctgtgactgggattctcccatatcaaaatggcagccttcctgcttccagctgtaggcaccccaataatctgtgtaaggctcattcattgctgaatagcttgaaaagtccacattatatgtgtctttgtaatattctgtcacgtctgcaatgtactgtgcaaaggcatcataagcatcgtctttgagattattcttattcgataactgtgctcccgaactacatcctgaattggtcatgaaatacggcgcagaattggagaatccctctacgacagcatcctctccacatacttccagcgcctgtagcagcacatttcgctggttggcgtctgcactccagtcatattcccacgtatactcaccggctgcttcatcataggacggattgattgcataccccggcatatcagaatccgttcttgtaatatggtcatgctctggatcatctccgcctccgacattataccggataatgttcagcccaagtccctgctccttatcatagaatgcctgtgctgcctgttgggtcagcgtatctgaatagccgattctgttcgcccaccagcaaaagctcgttccccagccttcaaacttaccagcatgaaatgtggaagcgtttgccgggtcgattaccactgtagcatcaaccgcctctttgcctgattcttcagatacctgtacctcctgtttttcttccatacctgcctcctgcgtctgttctgatggattgccctgctcattttgtgcacagccggttaatgtcacagccgctgctactccaagcaatatcagctcttttccttgccaatgcaaaattaccccctccttatgcatttctgtttcagacatttgtaaaactctattcttaataagtgacggtatgtatacctgttatgttgaaaatctgcgttttacaaatgtctgctttcctattcttattctatcatggtaagacatttatcaccaccgttaattcatccaattgcataacccgttcaattcctatataattaacttccagaagaactgatatttgcgaataaactataatgtactctcggaatcttcttcaaacgaagcattctggctacatttagaagactccgagagtacattatataaatacggaggaaattcatgaaagataatgaattacagggaaatgagaaaatagaagaagcgattgctgccttacagcaggagcccacacaggaaatgctggcacatgcactgaccgtaatccgcagacgcatgcaggaaaaaggacaattcgtaattgcagtagaaccgcccactggtgataaccaactgaaattacaggcaattacgactgatgatgggaaagtctggtggatggcatttaccagttttgatgaagaattaaaaggaagtaatagtgttatgtcaacctttatgacagatatcaagcaactcttcacctctgcccttcaggctgatactatttccggcatcattctcaacccatggaaccgtaccattatgctggataaaaatctgattcagattacacttggattataaaaaaatcatttcttgacattttgcttttttttagtataatgaggaatcgggcttaaatttgcccatcggtcagttcgagaccttcctgaccttaattaaaactaaaggagcataacaatatgaagaaaaaattatcccctactgtgtttctggcacaggcagcaatgattgcggcactgtatatcgtgttgacttttattgcaaatgcactcggtctggctaattatgccattcaggtccgtttctctgaggcgctgacaattctgccctatttcactccggctgcaatacccggtctgttcgcaggctgtctgctcagcaacattcttaccggctgtatgccattggatgtcatctttggaagtctggctactctggttggtgctttcggtacttatgcactgcgtaagcacaaatggctggcaccacttccgcctatcattgcgaacatcattgtcgtacctctggtattatcctatgtttatcagtttgaaggcagcctgccttatttcgcattgactgtaggcatcggcgaattcatttcctgcggtatcctcggtatgatcgtcctcaacaccctgcagaaacatgccggtaaaatctttcagggaatctacaaataaatgataagtcacgcaagacctctgacggttaattttatgaacacgtcaaggctgtaaggacttctatgcacctacagaagaaatgcttttattacaagccctgcgcctgaactcgcctacggctcaaacaacggctcgggcttgcaggcatttcttctttgctgctaagaagtactaacagccattcctaatgttcataagaatcagccgtcagaggtcttgctgttacatacaattttttgtataactttctgaatacagccgccggtcatgacagttcggtgaatgaagcttaggcagtgatgtctagtatttcttagaacaaagaacaaatgcttgcaagccaggcgcaactgtctgagcccaaagggcgagttttgcgctcggcttgtatgttaagcatttgagatgcagttcttagaaatacttacatcacgtacgtggcgaatgaaccgaactgtcatgaccggcggcgtcccaaaagtttataaatccagtttcaagtccccttccttgatccagccaagtttgcgtaagaagagtccgaatgcccaggcaaggattcctggcaggataaagctgatcaggataagtcctatccagtcaaaggctgtaatagcactcttcgtaccagctgcaatgtcattaatccatcccgtgtatacaccaatctgtccaaccagaccacaagtacccataccagatgcaaccgctgcaccattcatctgcagcttaaatatacaggtggcaatcggtcctgtaattgcagaagtaagaattgcaggaagccatattcttggattacgtacaatattgcccatctgcaacatactggttccaattccctgggcaaataatccgccccacttgttctccttaaagcttaatactgcgaaacctaccatattggcacaacagcctgctactgcagcgcctcctgctaatcctgtcagactcaaagccgcacagattgcagcactgctgataggtaatgtcaatgcaattcctacaatgacagagatgataattcccataaagaaaggctgtaattcagttgcccacataatcgctgctccaactgcactggctgccgcaccaatcgcaggtgcgcaccacatggataacagacttcctatcgtaatcgtaacaaaaggcgtcacgataatgtcaatcttggtttctttggaaactgccttaccaaactctgcggctacaatcgttaccagtaataccgccagaggtcctccggcgccacccagtgtattggctgcaccacctacagcaaccagtgagaacaataccagcggtggacagtgcagcgcatatcctatggcaactgccattgcaggtcctgtagcagcctttgcatatcctcctatattgaccagtacttccattcccaactgttcacccagcgtagcaatgattgttccaatcagcagtgaggcaaataacccctgtgccattgctccaagggcatcaattccatatcttttggcagatatttcaatgtccttacgttttagaaaacttttaaacttctccatactctcctcctgtatagttacatatgtctttacatatgtaaagtagtctgttacagtgtaacatgaccagaagaagaatgcaagcttatcaaaacgcaaaaatcccacctctaatgaggtgggactttctttatcttatattaatcatcatatccgttaggattctgtgactgccatctccagctgtcttcacacatttccttaataccatactgtgctttccagccaagctctctctctgccttagatgcatcagagtagcatgtagcaatatcgccagcacgtcttggtttgatttcataaggaatcttaatgcctgtcgcagcttcaaaattcttaacgatatccagtacactgtagcctacgcctgtacccagattgtaaatgcacagaccagccttctcctgaatcttcttcaatgcctttacatgaccaacagcaagatctactacatggatataatctcttacgccggttccatccggagtatcatagtcattaccaaatacaccaagctgtttgagcttacctacagctacctgtgtgatatatggcatcagattattaggtataccattaggattctcgccaatcagaccactcttatgggcaccgataggattaaaataacgaagcaggatgacgttccattcaggatctgctttctgcatatccatcagaatctgctccagcatggatttcgtccagccataaggattcgtacactgtcccttagggcactcttctgtaataggaatgaatgcaggatctccatatacagtagcagaagaagagaagataatgttcttgcagttatgctttctcataacatctaccagtgttaaagtacctgcgatattgttattataatattcccatggctttacaacagactcacctactgctttaagtcctgcaaagtgaatacaggaatcaatcttttcttttgtaaatatctcttccagagcttctctgtcaaggatatctgccttgtaaaaggtaacaggcttacctgtaatcttctctactcgctgtaaggatttctcacttgcattggaaagattatctaatacaactacatcatagcctgcattctgtaattcaactactgtatggctaccgataaaaccggcaccgcctgtaactaagattgccataacttacctctttctgcgcagtattgcgcttataaattttagtgcgttaaattattatcatgctttgtttttactatatcctttttaacagtaaaaagcaatagcatattcttctgattttcacccattatagaccacgatacttgttatatttatcatcctttaagactttctttcataaaatctgtatcctttatctgtctgtaaatatataaattgcctgaatttattgtcaattttacatatttttatgaattttgtagtgatatctgtggatattgtggataattttgtggatatttatatgttgtctgctatctcggactgcagcatatactcatattgcataccgtatccttaccctgtaatttcacattccattgcagcagatacaccggctcctgctgcccattgtgattactgtgagactccgataatatttgaatgtccccatctgcaccttctactgtaatctccatctttgccctgttaccctgtatctgaatcacattgccttctactatcggcagatactgcgttaccagattctccgtaattgttcttgtctgttttgatacctcaaaagaatcctctacacacaaatgtaattgtacatcctcatcccaggcacgaatactacgctgtattttatgaatacatccatctgggtaagctccaccaaaggatatcgtcaaggtcttgtctttttcctcccagcagaaagcatctgctgcatattcctttcccgcacattgctcctgtccattcatcagaggtacagaatgccccagggagcggttgcacagaatcccgtatcttccgtccgagaaataatctctggtatactcaccggcgcccagatccgtcagcagcatctcaccttcataaatgcacaggaaatgtccgatatcattatgattatggttctcatcattgttaccgccttttgccgcatatccatttcctgccggatccttgcacatcatccactgagcagccgcaagcagttcataactccaatccttagctgtctcattttctgtttccgcattgtcatactgtttcagccagcggatattccgctcattggaaagccagcggtagcaggcatccccgttaaaagacctcgcaagagaataatcaggtgtcattacctgaggatagcaatgcttgagataagaagtaagtcccggcaggaaagtctcatggctgctgccatctgagaagcttacactgacccctccgccaaaataacacttctgctggaataatgcgattttttcacattttggctttttcatcagatctatactgccttttgtctcctgatacagagcctgggcaaaaccggtgtaatagctcattccatatgcaaaatagcccaatccttccgtgcatgcgccatcctcttccattccatccagatagcattgcagcgcatcacagacacggccgataatagattgtttccaatcctctggcagtctctcatccttcggctgctgccttttctcataccagtgggatagataaatggccgccattcctaccgaacctgcacatactgctgcccagttgcagcgatcctgttcccaccagctgtaaggtactgttgatgtcacaaaaggcacaatcactctatcagttacctcacatacaactctttctacggtctgcaatggcagcttgtctcccagtatatccacaatctccagcagactctgtgcagtctctgctgcaaacaggtcaatcgtcttctcatccagtgcgtcaaaatccacatgtgcaggcagtgcccagaacttctctgtacaaatggcatccagcacctgtgacagcatcttcaaatcctcttccctgccctcaaattccgataaaatgccaaatacagttaagtattttctgcgtccaaaatactccccctcataaataaggcggttgcctgtttccttaaacagaaagaagtcttcctctcttagttccggcatgggctgattacgcagctcattccctgccctctctatatccgtccaaaatttctgcagatactccttttgctcttgtgtcatatccattcccccaaattataagattcctgactgttataaaccagttccggaagcacatcgctttctatatgaattattgcgcaaaatatcaaatttggctactgttttatgaaggttatactctcttttggtattcctgaatccgttcattgagtttatttgcctcagctactgcctttttccaactaatcacagatattaccccataaatgatcgtaatggacagaaccatatatacaacactttttatatgagtgaccgtgtaccagccaaataaataaccgcaacccagaacgatagcaatgataatgaaataatgaataatcgtaatcataatggcttttctggtagatattctgtcatccggatagattagtgtactgagtgcacaaaggaaggacgtaaacagaatctgccagaatatatccgaagggatagaatcaacgggatacagaatattggtgaaaaagccgactgcaagcaattcacccgtagtaatctccataaatttattgagaaccatttttgtttttctcattttttctcccccctaaccttttaacccaagcttacgtttcaaatcaggcacatattgtctggaaatcatgagtttttccccatttttcatgcatacctcatatctgccgcccagtgatgggcttagattcttcacatgaaccagattgatgatcgttgacttggaagccctgaaaaaatctgtattctgaaaattgtcttccagctcatacagtttcagcttcgtttcataaacttccttctccatatagacaaacaccctgttatccactgcttcaaaataataaatatcccctggctgtatctgcatgagtttatcctctttggatacagtaattttatcccgtcctgctttcagtgcatagattgtacgaaggagttgttcgtccatgttccggcattttatgataatttcttcctcttccccttcactgcaatccagtatcgtaattttcacccaattaccccctcttttacctgtcctttagcttcctgttccttgtcacgataactgctaatataatagcgcaaaaagtatatgccattaataataacacctgttctcttatactccatatattgcctgccacagtaactgtgattcccattttatcacgatacacaggaatcagtccctccggcattcctgcaaaggtctgttccacgatctgctgtgtactgaccgccctcatcatggacacgctatgcaatatcggaagtgccttgagaatcttctgtactccgatagaaagctgtgacatcggcagataaatgcctcctgcaaaaccaaccagggtaccgataatcgtcagaataccgctccacgcactgttactgtgtacgaacaatgcgattacatatcctatggaagaatatgtcaatgcgctgcacatgatcattcctgtcaatgnnnnnnnnnncagaaagcatatcataccctttcaggaaaaagaatacctctcccattgcaaatgtcagaagacacataaaagttccaataatccatgctgagaaaatatatccaagcgccagataaagcctttttaccggtgtcacataaaaagccataatcctctttctcgtctcgtcctgcaccatatttccaagcactgtcattgtaactgttaccgcatttactgaaataattccagcaagtgtccacatctgtatcagatatgctgcgttctccctgtcctgcgccgtaattttgcgtccaccatattcttctattactgacagcacattctcactgttcatctttccaaggaaaacgaccatcagtcccaatacgatcagcatagacaataaggaaaaaaatactgcgcttttatcccttaaatacaccagacaatttctctttgtcaaataaaaaatctctctcatctcaaactcccgcctttctacaaaccttccccggaaccagctccaagtgtttttcccgtaatattcaaaaagacatcatccatcgttccctgtatcatctcaaatccattgatatatggctttgctttggcaagtaccggtaatgcatccatgctttttgcgacctgcagatgataagcctcctgcactttctgataagaatgtccctgcaaagcctctgtcagttctctttccttatcctgcatagggattaatcgtaacgtatcttctgcatatttttcctttaaatcaaaaggcgtaccaacctcttttatcttcccgctgtccataatcgcaatgtgctgcgccttggctgcctcttccatatagtgagtcgtaagaaagactgtcatctgattccggatacgcatctggtctatgctctcccataccagcctgcgcgttgcaggatccaaacctgtcgttggctcatccaggaacaatacttccggtctgttcaataatgcagccgcaatctcgcagcgtctcttctgccctcccgacaggttctcatatcttctgctccatacatcctgcagctgtagtctctcacacagttctgtcacatgctccctgaatgaattccttttctccccgaaaagggcacctcttacatacagattttcctttacggtcaacttatcatccagacagttgttctgccataccacgccgattctctttctgatctgcgcatcttccttacctgcgagacagccatcaatcactatctcccctgccgttggacgaaacagcgtacacatcatattgattgtcgtagacttgcctgctccattcactccaaggaatccgaataactcacctctctccacagaaaagctgatatcatctacagccttcacttccttaaaatacttttttaagttctctacttttatgattgcatccatcctgtatccgctcccttcaccttttctacagcatagacgcaaaaacagcttaccgcaatcaaattgcggtaagctgttgattttgaatggtaagatgtaatttttgacagaaagattagcaaacaccctgagcgagcatagcagcttctaaggtgtccgcagatttaccggggttttgaggtcggttgtatatcacgtgtatagagtgattgtctgagaatttcgattaagacctatttttgaaaataccataatatatgcaaccaatgctcatatgagtaagaattcaaatagtcgcataataataattttctcaaaacccacaattaaatagcttgaatttctactatgtaatattaacaaacgctacaggcgaggccttctttacattcaattatccatttctcatctctatcatcttgtcaatcttattgactatatatttttcaaaatatctatgttcaaaaaattccgaaaattttttatctgtcataaaacgatattttatccaattatataattcttctcttgatgctttttttaatgaactattcattcctgcaacaataccatttatactttttaacatatgctccatattatcatcccaatacagttcactcacaatacatttaagcaatttatttggatcacatgctccacattccggaacagcaaagtacttttccttaatatataaaatactaaatgcattgcttaattgtatatgattacatgtaaatccataatatttagctatgctaattatttgtgtacaccctaaccctctatagaacattctaagtgggctagtattattacaaagagtttttataattgcatcatcattaataaaaaaaacaacataattttctggtattgcatttaatacgacatctaaaaatggcaatacttttataggttgattttctgaaattgcattcaacaacttatataaattttttccacaagaatgataagtatatataataacttttgtagttgggcacggtaatacttgataatatattacaccatattgagaaatcttacattcctcttttttctcgcatataacatctaaaaattccatgtttttctcagcaagataattccagctaatagtacatgtatttacactactaaaggttctccaatattcatctgtctcctttttcacaaaaaaaatgttaccactgggcatagcattttcaagtgcaaaaaaacatgccatagttgatgtttgagcactttcagttatatttcttactaatatttgaaaaccttgctctagatattcttctatcttttcttttacccaactagtaggcattaacaattccgaagcaaaaatatttgcttctaattcttgagtatctaataaacgtttaccactaacttgaatatagtgttcacctgctatacacttaacgtctccattgtgccacggtatacatatatgccccagctcatgtgccaatgtaaatcttcgccttggtatatatgttatttccgtatttattattactttattatcattcaactgtgaatatgcttctattccgtattgattttcttcttccacaatttgaatatccatttctgaaaaaatattacttacatcaattggcggcatcaaatcaaatctatctacaattcttcgtgcaaattttctcacagcttcgaatctattcat

SEQ ID NO: 566 - DNA, 12349 bp, unidentified
  source 1..12349: mol_type = unassigned DNA
  misc_difference 2860: note = a, c, g, or t
  misc_difference 2861: note = a, c, g, or t
  misc_difference 2862: note = a, c, g, or t
  misc_difference 2863: note = a, c, g, or t
  misc_difference 2864: note = a, c, g, or t
  misc_difference 2865: note = a, c, g, or t
  misc_difference 2866: note = a, c, g, or t
  misc_difference 2867: note = a, c, g, or t
  misc_difference 2868: note = a, c, g, or t
  misc_difference 2869: note = a, c, g, or t
tggtctccatgaagaagccctcggcacccagagcgccgtagacctcatcggtggacacctgcagatacttcttgccctctttccaagtcttggcgtcggcgtcgtaccaagcctccttggcgcgctgcagcaggttgacggtgcccatcacgttgctctggacgaagatctcggggttcttgatggagcggtcaacatggctctcggcggcgaagttgatgacatagtcgaaatcgtactttgcgaacaggctctcgaccagctccttgtcgcagatgtcgccctgcacaaagacgtggcgggggtcgccctcaacgtccttcaggttctcaaggttgccggcataggtcagcttgtcgaggttgaccagcaaaatttcagggtacttcttgagcatatagtgcacgaagttggaaccgataaaaccggcacagccggtgataagatattttttcataaatttcctcttttattttctgcaattactccgcattttcattattttcaccagtggacagacaatctgcaatctgacccagtgtcgagtccattgaagccagaatttcattgttcgcttttgtatactccactaaatccgcaaatgaatacaacgtccatacagaaagcatcgacaaaaaccaaacaacaactgcaacgattaccccgagcagtaatcctaccgcattattatctgtagcagctgcggtagaataaataaccgcgcctaaaacaatcgcaacaacactgaaaaacatgccttgaatcgtcgcccatattttcagtttcttttctgactggttaaacataatctttttcctcacaaaagccaattaagctttcattccgttgtcgccgtcccagtgctcgaagaagcaggccagcgcgtccttccagtcgcggacgtcgttgccgacggtgcagcggagcatccggttgtccagagcgctccacttggggcggtcggcgctgtccgggtgcttcgacttgtactcctcgctggtgcagggggccacggtggcgtctacgccggacagacgaatgatctcagacgcgaaatcataccaggagcagattccctcgccggtgcagtggtacaggccgtactcgtgggtgacgcagagctgtaagatctcgtgggccagatcgacggcgttggtggggttgccgcactggtcgttgacgacctccagcttgccgaactttcggcctgcgttcacgatggtcttgacgaagttcttgccgtagtagctgtagagccatgcggtgcggacgataaagtggcgatggcagaactgctcgacgtacttctcacccatgagcttggtggagccgtaggcgctgatggggccggggatggtggcctcatcctgcgggatgccgccgttctcacggccggagaagacatagtcggtggagacgtgcaccagccgtgcgccggtcttggtggcggcctgcgccagattgcgggggccgatggcgttggccttgaaagcggtgtcatggttcacctcgcagccgtccacgttggtgaaggcggcgcagttgatgatgacatccgggcgctggcggcggatgaagtcgtccaccatcttatagttggtgatgtccagctccggcaggtccaccggaatgaccgtggcgttcatcagcttctcggggagagggccaagctcactgcggccctcccggagctgcttgatgatctcggtgccaagctggcccttgcagccggtaacaatgattttcatgcggataccgcctctcttaatacttcagtttgccgtcagccacattcttgaggtgctggccgtagggactcttgccgtagcgctcggcgctttccagcagggtgtcgcggtcgatccagccgtacttgaatgcgatctcctcgggggcgctgatcttgatgccctggcgcttctcgatcatccgcacaaagtctgctgcctccacgaggctgtccatcgtaccggtgtccagccatgcaaagccacggcccagcagctggacgtccagctcatcctgcttgaggtacatatcgttcagggtcgtgatctccagctcgccgcgggcggagggcttgacctgctttgccatccggacgacttccttgttgtaaaagtacaggccggtgatggcgtagttgctcttggggtgctgaggcttttcttcgacgctgagcaccttgccgtttccgtcgaactccacgatgccgaaacgctcggggtccggcacatagtagccgaagacggtgcagcggcccttgttctctgcgttggccacggcggtcttcaggatcttggagaagccgttgccgtagaagatgttgtcgccgaggatcatggcgcagcagtcgtcgccgatgaactcctcgccgaggataaaggcctgcgccagaccgtccggagacggctggaccttatattgcagatggatgccgtactggctgccatcgcccagcagcgcctcgaagcggggcgtgtcggtgggggtagagatgatgaggatgtcctgaatgcccgccagcatgagggtggacagaggatagtagatcatcggcttgtcgtagacgggcaacagctgcttgctggtgaccatcgtaagcggataaagccgggtgccggcaccgccggccagaatgatacctttcattttgtgcactccttatattatgaaataaaaaagttgtgcagcttgtacaaggcacggcggcgtatccgccctgccctgtatggattcaaagcggagctgcgtccgctgtaaacaatgttgcgcaatacactctgctcaccgtgcaggcttgcgatagtattacaccttattttactatcaaatcgaaaaaaaagcaaggaaagagcgnnnnnnnnnnccgcctcaaaaattttgtggcgggcgctctcttgtttcgtcgcggcagggactcagaacctgaacccccatttacagaaataccgcagcaggctcccggtctgccacagaaagggcctgaggctgcggtgggccgcacgatgccacgcatggatggcggtgtactggggcacgagataagcctttcccttggtgcgcatcttctgggtcaggtccgcatcctccacatacatgaagtaatgctcatcaaagccgcccacggccttgaactctgccgtccgcaccgccgagaagctgccggtgcagaactcgatctccacgggggcagacaggtcctccccttccatgagataggcgcggttatatttctcccagaatttcaggaacggcagctggcggtagaccatcggccggagggcgcagcgccgcaggggcagatgctgggtgcggccgtccgggaagcacagccccggccgggtcatcacagcatccgggtgggcggccatccagtcggccagatcgctgagggtgtcggcagtgagctggatgtcggggttcaggatgaagtgataatcgctcgtcagctcgggcaggatggtgttgtggccggtgccgaagccgccgttctccttccggcagcgcacctccacccgctggcccggcagggtgctcagagcgccgctccggacaccgctgccgtcggggctggcgttgtccaccagatagagggtcagcgggtggcggcgggtgtattgcagcaccgtctgcgccgcccggagggcttcgtcgcagccgttataaacaacgatgcaagcagagagttccaagttttatgctccttgttttatggctcagacctttccgccatgccaaagcctccttggtagggaagctggcgagcgaagcgagactgagaggttgttcctcttttgtttattccagcggcagaatcttcaggctgaaatcctcgcgctggatgtcgaagttggggttggtgcaggggtcgcctgcagccagcaggtcgccccagcgggcctgaaaacgcagcacctcaccctgaaagcgcttctgcttttcggggttgtcctccacgccgcggctcttgctctcgtagtggtagagctgggcgaagggagtgaagacgttggtgtagcctgcctgacgaacacggacgcagaagtccacatcgttgaaggccacggcatagctctcatccagaccgcccacctcgtcgtagatctccttgcggatgagcagacaggcggccgtgtcggcgtagacgtcctgtacatagttcagccgtcccatatagccgtcggagctggcgggataatacttgtgcagatggcccgccacgccgccgatgccgaagccaacgccggcgtgctggatggtatcgtccgggtagagcagctttgcgcccacgcagcccacccgcttctgctgggcgtacatgaccatctcttccagccatgcagccgtgatgacctcagtgtcgttgttgagaagcagcagatattcgccggtggcgaacttctcgccgaagttgttcagggcgctgtaattgaagcccttgccctcccacgtgacgaccttgagggtgtcggggtgttctttctgcatccgctcgtaggcccggaaggtctcgggggccttgctgttgttttcgatgaggatgatctcaagatccggataggtcgtgcgggcataaatggactccacgcaggtctccagatcgtggatgtgatcgcaggtggggatgaggatgctcacccggcccggatgggcgatggtgtagtcggtcttgtaatagcccggcgtacccgggatgagggagacttcgtccacggccacgccgcagcgggcataatgggccttgagggccgcgatgcccgcgtcgatgcagtaggtcttggcggagatgtcgctggccgtgctgccggggctggagcgccagtaatagagggcatgggggatgtggacgatcttcctcgccttttccgtcaggcggaggaacagctcgtagtcctgactgccgttgtactccatccgctcggggccgcctgcggcgtccatcagccgacggctgaagagggtcaggtggcagatatagttgttggagcggaggttgtccagcatgaaatcaggcttgaagtggtagagcaccacattctccaccttgccctcgaaggtcgcctcgtcggtgtagacgaagtcggccccctgctcggcgatggccttggcggcataccagagggcgcaggggtggaggatgtcgtcgtgatccagcagggcgatgaagtcgccggtggccatctcgatgcccttattggtgttgccggggatcagctcgttcttttccagcttctggtaacggatgcgggggtctgcggcggcacgctgccggaccatctcccccacgcccggggcggtgccggcgtccacacagcaaagctcccagttccggtaggtctggttcacgaccgagtccagcagctcctcgaggaagtccagcggggtgttgtacaggggcaccacgatgctgatcttggggcctgcgggctgatcttccgcctgatgcaccagcagctccaccgaggcgaagcggtccgcgcgcatgaccctgcccgggaagagggcggcatactcgcggcgggcacgggcctgctcccgcacgccctcgatcccgccccggcgcagctcccgcagcaggacgaagaggggcagagtgtgccagagctggcggctcttgctgacggcgtagcgcatgggccatgtcatcttccagaaggtcgagccggtcacttcggccagcgtcttttccagctgctgctcgtggctgcggctgagggaaaggtcgctgcgcagccgggcgatcagctcggcttcctcgccgcaggtgcgttcggcgcgcaccatccggtcgcgcaggatgtccatttccagctcatagcccctcaccatcttatacccggtgggctgggagacgcagaagagggcggactgctgggcgcggcccttgctgcgccagccgaagtcgcggaaatatcctctctgcgccagctgctcggcccagcccgccatgacgatgctctcactgctcaccagcagcacccgggcgggcagcttctccggcagcgtctcataggccggatccaccacgatcagaagctctgcctccgagccttccgcccacgcctccgccgctacgcctgcccggcgcagcgccttggtcagcagaaggctctgctctcccagcagggccgccgaggcggcagccgcctcctctgcgatgcgctgcgccagtgcacggcagcgctcccgctcctgcttttctttcttttccttctccaactgcattccgttctctccacctaatatcatttatcgtatcgtcccagcgatttcgggacgtgaagcgcaaaagagccgtttcttgagtacaaacgtgtacagtataccaaatcgcgcctcatttgagaagtattttgcgcaattcctttcgttttttacatcccgagcaggcggcgcagccagctgaacagtccgccgccggaagagctgccgctgcccaccgtccggatggaaacgccggagtagtagtgcttgaggatgtcgcggtagcccatcccctcctcggcggcatagcccaccgcgccgcactggctcatgcccacgccgtggccaaagccatagtagttcatgcagggcacgcccgcagcatctgcgctgaaatcgaagcagtagcgggaggacacgaactggttgatgtagcggtagctgcggccgttggacaccagcgtgttgtactggacgaagccgccgaggtctttgtgggtggtatcggcgctctggtaaggctcaccggtgcggctgtccttgtactcggtgtagtcgtagtccttgccgatgacgcggcggagcttttcgtggtactggcgctcgtaggggctttcgacgctcttgaggtagggcacatccgacccccatgcatcgaggctggagcaggtgccgtaaacgccggtctgggtgttatagcccgcgctggccgaccagacggcatcgatgacgctgccgttgtaggtcagcacctcatccttcaccgactccaccgccttacggatggccgagcgggccgaggcggggatgtcctccaccggggtgtagatgagggcgttggccgaagagccgtactgcttgtggtactcgaggtaggagtggatggccacagcctgcgctttccacgcctcctgcgccgcgctggcgctgacatagctgccgatggagccaagctcggtataggtgatgcccacgaggcagtccacgaggtcgagggtcacgttcctgcgcaggcccttgcccttgatgttcagatagggcatggtgatcttatctttggagccgaagagccagctcagacaattttcttcttcccccgggacgagggtggtgtttgcgccgccgatggtggtggccccgggcgcggcatcctcggcaaacaccgccgggacagccacacacagcatcaccgctgccagcaccagcgccgccagacggcgcgcgaaactcagactctgcttcacagtcattttcctcctgtcgttttcgacattttcatagtcagtatcagtgtaacacactgtgcccccgacggcaaggacggaagttgtgcgaaaatgtgaaaagacgcctttgcaagctccgggaattgtgataaagtatagcaggagagaacaggtccgcctctgacaggcaggacaaggagggccggaatggacagcagagagttataccccaccgacgagcagcgccgccgcatcatggatttcatcatggcggcaggcgagacgttgctggaaaacggagcggaggtctttcgggtggagcagacgatggagatcatggcccgcagcttccatctgcgggagttccacgtctatgtgctgaccaacggcatcttcgccagcgcaggcacggcggagatcgccgaggtgcggaacgtaccggtgcggacgacccacttgggccgggtggtggcggtgaacgccctttcccgtcagatcgccgccgggggcgtcacgctggacgaagccgagtgccgtctggccgaggcccggcgcatcccctttcccaagggccggacccagcttctggccgggatgagcggcgcagcctgcttcgccctcatcttcggcggcacggtgcgctcggcgctggcggcggctgtggccggcttcctcgtcagcggctatctgctgctctgcgagaaaaaggggttatccagcggcttccgcaagatctcggcggcggcccttatcacgctggtctgcatcgtcgggtgctccctgctgggcatcgagtccagccatgccatcatcggcaccctgatgatcctgacccccggcatcgctttcaccatgggcatccgggacttcgtgcagggcgactacctctcggggaccatccggatgatcgacgccctgctgatcgcggccagcatcgccatcggcaccggtctcgtgctgagccttacttcgatcctgacgggggtgacggtggtatgatgacgctggcaaatacccagatcggccagctggtggcccagttctttctggccggggcggggacgctgagcttcgccatcctcttcgcctgcccccggcgcaccctcccctgctgcgcactggtgggcgcagcaggctggttcgtctatgagctggcggtcttgtatggggccgatgccgcggcggcttccctcatcgcggtcatcccgctgacgctggtgtcccggctcttcgccatcctgctcaaaacgccggtaacggtctttctgctcaccggcatcttccccctcgtgcccggcgcaggcatctactacacggcctactacttcatccaaggcgaaaacgccctctcgctggccaacggcatctccaccttcaaggtcgccgtcgcgctggccgtgggcatcgcgctggttttgggcctgcccatgccgaaggggcatgggtggaagagcaaataagctgtaacaacaaaaagcacccgcagcgcggtttcccttggaaacgcctcgcgggtgctcattattttaagtcaaagaatccatcagcagatttccagatgaacctctgcgacaggattttcagtttcccaattagtaacctcgaactcttctgcattgtctaccacgccgaggctacccgtgctcagaatctcgcccagcttcgtcaactgcgacttcttgaccttgccgcccttcacgacgctgacagtctcatcatagccactcagatagtgcggctccccgccccaagaatcgttgcggtagtacttgacagtgacatctgccatcacaggatttttgctgctatcgcagccagagagaacacccgctgctgccacggccagagccatcacaccagcgctcttcaggaaattacgacgagtcatattagtcattttcttgcacctcataaactgttttgtttcttcttgttttcctttgcgcatctccgcaaaaggcggttagttcgctataactaatgataggctatctcctgctttttgtcaatatttttccagtatgttagcgttcattaacatcatatcgtcatttttatctccggtttatggatttttctctcatttcttcattcctcagacaggcctttcccgtgtttgccgccgcatccaaattccttgcactgcgcctgcgcctatgctataatcaggctgtacttatatagtaaaggagtgtccgctgatgtctattatggaaacgcttgccgcccgccgcacctaccgccgcttcgcccagaagccggtgccgcaggatgtggtggaggatatggtcgaggctttgcgcctttcgtcctgcggcgcgaaccgtcaggccgtgaagctggtggtggtgcaaagccctgaaatggtggcgaaagtccacccgctggtcaagtgggccggttatctgccgccggagcagggcacacccaaagccgacgagcagccggtgatgtatctggccgtcgtgcaggacagcgccatccccggcgacctcaacaccgacaccggcatcgcgctggccaacatcacccttgccgcgtgggacaagggcgtgggcagctgcatcatgggtgccatcaacaagcctaccctgagcgagctgctgggcatcgccgagccggacaagctggccttcatggtggcgcttggctaccccacccacaccgccaaggtcgtgcccatgaccgaagagacgggcatcaaatattatctggacgaggaccgtaactactgtgtgcccaagcggagcagggaggagctggcgcggagcgtgtgatggctctttctcccgggcggcttgctttctgcatatatacatcgttctccggctttattctgcataattgtttgcaattcggtttcaatttgatggaatttttgcacaacacttgacttttcaaattgtacaacctatactaaacacgctctctgatttttcgatgaatcgcatcgcagcagagaactgcaaatgatatgcacataaagaggagtgtttgaatatgaaaaagatctctcgccgcagctttctcgctgcttccggtctgaccattgctgctctggctctgactgcctgcggcggctctgcctccaccgcttcttccgctgcaagctctgtggctgcttcttccgaggctgcttccaccagcgctgccgctgctgagctgaccaccgttgaggctggcaagctgaccatggccaccaacgccgccttccctccgtacgagatgaccaccgatgcaggcgcatttgagggcattgatatcgataccgctcaggccatcgccgacaagctgggcctcgagctgcagatcgacgacatggactttgacgctgctcttctgagcgtccagcagggcaaggccgacatcgccatggctggcgtcaccgtcaccgacgagcgcaagaacgtcatggacttctccgacagctatgctaccggcatccagtccatcatcgtgcccgagggttctgacatcgcttctcccgacgatctggccggcaagatgatcggcacccagcgcggcaccactggctacatctactgctccgatgacttcggcgacgatgcagtcgtggcttacgacgatggtctgaccgctgtgcaggctctgaacaacggtcaggtggacgctgtcgtcatcgacaatgcccccgccaaggagttcgtcgctgccaaccccggtctggtccttctggacaccagctacgccgaggaggactacgccatcggcatggccaagggcaacaccgctctggaagacgctgtcaacgctgctctggaagagctgaaggcagacggcaccctgcagtccatcgtggacaagtacatcaccgctgaataatcagcgcgtttctttccgcgtcagggggaggcggcctgaaaaggctcctccccttttttgaaatccatcggttacaaaatttttacaaaaagaaaggtgaggatgcgaatggccgcacaatacgagctgctgaaagagcttctcaacagcgggacgccgctcagcttcgggcagaacattttctttaagttttatcaggcattcatcctgaaggaccgctggctccagtacatcaacggcgtgggcaccaccctgctggtcacagccatcgcgctggcgatgggcgtcgcgctgggcagcgtggtggcgctggtgcgtgtggcccacgaccagcagcgcaccggccgcatgaacccggtgctgggcttcttcaacgcggtgtgtcaggtgtacaccaccatcatccgcggcacgcctatgatggtgcagctgctcatcatgagcatggtcatctttgccaacagccgcaacttcacgatggtcggcgcgttggcgctgggcatcaactcgggcgcctatgtctccgagatcatccgcggcggcctgatggccgttgaccccggccagatggaggccggccgcagcctcggcctcaactacataaccacgatggtggtcatcatcatcccgcaggccatccgcgccgtgcttcccgccctcggcaacgagttcatcatgctgctgaaggatacgtccctcatcaccgtcatcggcggcaaggagctgctgtatgcggcacagggcatcatgaaccgaacctacgaggccatgttccccctgtgcggcgtcgccctcatctatctggtgctggtgatgctgttcacatggctgctcgcaaagtttgagaggaggctggcacaaagtgaccgataagatccttgaagtccgcggtctgaccaagacctacggcggcgaaaagcggaagggcgcaaagcagcccacccccaccctcgacgtgctgaagggcatcgacatcgacatctaccgcggcgacgtggtctgcctcatcggcccctcgggctgcggcaagtccaccttcctgcgctgcctgaaccggctggagatccccaccg

SEQ ID NO: 567 - DNA, 8876 bp, unidentified
  source 1..8876: mol_type = unassigned DNA
  misc_difference 5589: note = a, c, g, or t
  misc_difference 5590: note = a, c, g, or t
  misc_difference 5591: note = a, c, g, or t
  misc_difference 5592: note = a, c, g, or t
  misc_difference 5593: note = a, c, g, or t
  misc_difference 5594: note = a, c, g, or t
  misc_difference 5595: note = a, c, g, or t
  misc_difference 5596: note = a, c, g, or t
  misc_difference 5597: note = a, c, g, or t
  misc_difference 5598: note = a, c, g, or t
ctgccgcacctcgctcgccgtatcggcacttagaattatgcggtattgcctaaatttcaatttcaaatgctgtgccgcatacgacagcaaaccaatgcttgaaattagtcacattattatacaataaaagccaatccggcacaagagcagtcaacactttaaatatcatcccaatcactaagaggaaattccccgagtacttttttcaacgcttgcaaataaaggcgcatttacgcctgagtttgcaggcgtttttatctataggtggcggaattgtcaatagacggagcgggggagtgccctcacccaaagtattgcattgcgtctacctgtcagcagcaatggcagcgctgcaggggatgatgctgtgcgaatttttgcatgatgttcgcttctggtagagagaataagagatcagcataattagataaatatttttacctaacaatattgacatacaaggtaaatgtgatataatagccttgttgacaattgagtcaatatttttagataaataattacgaggtataaatcatgagctttgaagaactgaaagaagtatttgttgataccctgaactgcgatgcagacaaagttacgatggaagccagcctgaccgaggacctgcaggcggatagcctggacgcggtggagctgaacatggcgtttgaggacaagtttggcatcacgattgccgatgaggacctgggaacgctcaagaccgtgggtgatatcttcaactatctggttgcgcgggcagcctaaagggtattagggatgaatgccattgaaaagctgttcccagtcagccagcaggagcgcagcttccagctgaaagtccgccgcgatgctggtacggctgcgcccggctgggtgcagccgcaatttgttgaatgtaaaaaatgcggccggcgcgccacccgccaggtctggaccaaaagcctgtatgtatgccccaattgcggggtacatctgcccattggagcctattaccggctcagcacgattttggaccacggaacctttaaggaactgaatccagaccttgcccccaacgatgtgctgcattttcccgattatcaggaaaagttggccgctgcttcggtcaaaacgggcctgaaagaagctgccgtcaccgcaaccggcaggatcgggggtgtgcaggcggtggcagctgtgctggacagccgattttttatgggcagcatgagcactgccgtgggggaaaaaatcacccgtgcaatcgaatatgctgctgataaacggctgccgctggttattttttctgccagcggtggagcgcggatgcaggagggcattttcagcctgatgcaaatggcaaaaaccagtgccgcgctggaacggttcagccgcagcggcgggctgtatgtcagtgtgctgacccaccccaccaccggtggtgtcacagccagttttgccagcctgggagacatcacgctggccgaaccgggtgcgctgatcgggtttgccgggccgcgtgtgattgaacagaccatcggagaaaagctgcccgatggtttccagcgcagtgagttccagctggaacacggctttgtggatcaggttgtgccgcgcactgaattaaaagaggttttgacgcggattttgcagctccatacacaggggaggaaatgcagatgatcaaagaggttttgcagcagctggaaccgctggacgcgcagattgatgcattgtgtagcagcaccgatgatgccgaaatggcgaatacgactacccatgccgctgagctggcagagctttccgcgcaggaaaacatgcttttgcagcgctgcacatcactgacgccggaggacagagtttttctggcgcgccgccctgaccgcccgcatatcggcgaaatcatcgacaacctgtttaccgacttttttgagcagtgcggtgaccggcaatgcaaggaggacgcggccattttgtgcggtatcgcgcgattccatgggatgcccgttacggttttggggcaccgcaaaggaacgacgctggaagaaaacctgcgctgcaactttggtatgccgggaccagaaggctaccgcaaggcgctgcgcgtgatgaagcaggcggaaaaattcaggcggcccatcatcacatttattgatacccccggtgcttaccccggtaaggatgccgaggagcgcggccagggggaggccatcgcccgcaacctgatggagatgagcggtctgaccgtcccggtactggccatcgttacgggcgaaggctccagcggcggtgcactggggcttggcgttgccaaccatattctgatgctggaaaacgccgtgtattcggtgttgagccccgaaggatttgccagcattttgtggaaagatgcctcccgcagcggcgaagcctgtaccatgatgaaactgacagcgcaggacctgtatgcggatggaattgtggaagagatcatccccgaaccgctgggcggtgcacagcgcgggcggcagctgcttttcagccggttggataccgccattgccgcgcaccttgccgccttgtgcaagatgagcggaaaggcattggccgaccagagatacaaaaaataccgccgtatcggagaaatgaggggcgcatgaaaggcttacagctgctggccaccggcggggcactgcccggccgtgtagtgacgaatgaggatttgagccgacaggtggacaccagcgatgaatggatcacgacccgcaccggcatccgccagcggtattactgcaccgaaagtgaggatgccgccacgctggccattgccgccgcccgccaggccctgacgcgccgcgggctggcagcaagcgagattgcctgctgcgttgcggcaacgctttcggctccaacggctacccccagtgttgcctgccgtgtgcaggcggccttggggctgccggagaaccggcccgcttttgatgtaaatgcggcttgttccggttttatttatgctattgctgcggcccacgggctgttgaacaccctgggcggacgctatgcgttggtcatcggctgcgaagcgctgtcccgcatggtggacccgaccgaccgcacaacctgcgtactgtttggggatggcgctggtgcggctattctggaactggccgaagatgtgccgtttgccgtcacgttgggcgcgcgggggagcgaagccatccgtgtcggcggccccgcagcctgcgatacggccccgatcacgatggatggcaaggcggtctttcgttttgcggtggaaaccatgccgcgttgcctgcaaaccgtgttggagcgcagccacaagaccttggctgacctggattgggtcgtctgccatcaggccaatagccgcattattgaccattgtatcaagcacttgcacgcagaaccgtcaaaattttataaaaatatggaccgccatggaaataccagtgctgccagcattcccattgccctgcatgaaatggtggaaaatgatttactgcaccccggccagaccctggcctgcatcggttttggcggcgggctgacctggggcggaatgctgctgacgtatgagggtagaaaatgaagctgctcaatgaaattttaggtacgaaatatcccattatccaaggtggaatggccaatatcgccacgggcgaatttgccgctgcctgctctaacgccggggcgctgggcctgattggttccggcggtatggatgccgatgccctgagggaaaacatccgccactgccgtgcgctgaccgaccagccttttggtgtcaacatcatgctgatgcacccgcaggcagatgaatttgccaaaatcgtggtggaagaaggcgtaaagatcgtcaccaccggggcaggaaatccgggaaagtacatggcaatgtggaaagcagccggcatcacggttatcccggtggtagctgccgcaatcttagccaaacacctggaaccgcttggcattgacgctgtcattgctgaggggacagagagcggcggccatgtgggggaaatgaccacaatggcgctggtgccgcaggtcgttgatgccgtccacgtgccggtcattgccgcgggcggcattgctgacgggcgcggtttggccgcagcgctggcgctgggggcctgcggcgtgcaggtcggcacctgtctgctggccagcaccgagtgccccatccacgaaaactacaagacagcgctgctgaaagcccgcgacagcgataccattgtgaccgggcggatcggcggcaccccggtgcgtgtgttgaaaaaccgaatgagccgcgagtatgtccggcaggaaaaagccggggccgacaaaatggcgctggaacgctttacgcttggcagtctgcgcaaggctgtgtttgacggcgacaccgaaaacggaagcctgatggccggacaggccgcggggctgctgcatgaagtccgcccggtagaagagatttttgccgcaatggtaagcgaagcaaagacctgcatcacggggttgtacaaggagaccatctgatgaaactagcatttttatacgctgggcagggcagtcagcatgccggtatgggccaggacctttatgaaacctttcctgccttccgcgccgcctttgacgaagctgccgcagcggtggattttgatttgaaagaagtctgctttaccgacgcggcgggcgtactgaaggaaacgcaatacacccagccttgtatgacagcttttgccgctggtcttaccgctgtgctacgggagcagggcattatgccggactatgcggcgggcctgtccctgggggagtattccgctttggcctgtgcgggggtgttcgatatgcagacagcggtcgctttaacggctttccgtggcaaagcgatggctgctgccgctgccgggcgcacctgtgggatgacagccgttttgggattggatgaaacatccttgcaggcatgctgcagcgcagccgccgaagagggcgttgtacagatctgcaattacaactgccccggccagctggttatcggcggcgagaaagctgctgtagacaaagctgccgacctggcgcttgccgctggggcgcggcgctgcctgccgctgaacgtcagcggtgcgttccatacgctgctgatgcaccccgccggagatgcgctgcgggaaaagttccaatccatccattttgcgccgatgcggttcccggtgctgttcaactgccttgggcatgaaatggcagagaatgacacggtcgccacgctgctggaaaaacaggtgcagtccggcgtacgttgggaagccactgtccgccgtttggcggaactgggggtggataccgccattgagatcggccccggcagggtgttgaccggatttgtgaaaaagacggtgggaaatgctatctcgtgctatccggtggaaactgctacacagctgcagcagttgctttgcaccatgaaaggagcctgaccatgccgcaaaccgaaaacatgcgccgtgctgctctggttacgggcggcgccaagggcattggtcgtgccgtctgccttgcattggccgaaaacggcatgaacattgcagtcaactacgcaggcagcgcagccgcggccgaggaaannnnnnnnnncggctgcctgccgtgcctttggtgtgcaggccatcacgctgcaagcggatgtgcgcagccccgaagcctgccaaaatctggtggaagataccgctgccgcttttgggcggatcgatgtgctggtcaacaatgcgggcatcaccgcggataaactgctgatgcgcatgaccgaatccgactttgacaatgtgctttttaccaacctgaaggggacgtttttctgcaccaaagcagcttcccgcctgatgatgcgccagcggtatgggcgtatcatcaatatcagcagtgtggtcggcctgcacgggaacgcgggccaggccaactatgccgccagcaaggcggggctgatcggcctaacgaaaagcgttgccaaagagtacgccgcacgcaatattaccgccaatgcggtggcacctggatttattgaaaccgatatgaccgccgctatgccggaatctgcccgcgccgcagccgcagcggccatcccggcaggcagaatcggccgtgctgaagatgttgccgcggcggtggctttcctggccggggaacaggccggttacatcaccgggcaggttctttgtgttgacggcggaatgggaatgtgaggtgcagctatgaagatagaaaagaaacgccgggtcgttatcaccggccttggcacggtaaacccaaccggcaataccgtggcggaaagctgggccgccgtgaaagctggccgctgcgccgttgggccgatcacggcttttgatacaacggattttaaggtgaaactggccgcagaagtcaaagattttgaccctgccgaacgtattgaccggcgcgaagcccgcaaaatggcgcggtttacccagtttgccgtggccgccgctgacgaagccatccacgacagcggcattgcactggaaaatatcgaccacacacggttcggcgtgatcctgtccagcgggatcggtggtctgcccacgatcgaggaagaacacacccgcggccagcagcggggctttgaaaaggtcagcccctactttgtccccatgtccatcggcaatatggcggcggggcaggtggccatccgctttggcctgcagggtatgtgcagctgccccaccactgcctgcgcaggcggcaccaatgcgattggggatgcgttccaccgtatccgcgatggatacgaggaccgtatgctctgcggcggcagcgaaagctgcatcagtccgttgggggtgggcggcttcgccagcatgaaagctctctgcaccgcagacgacccggcccgagcctcgatcccctttgatgcccggcgcagcggttttgtgatgggcgagggcagcggtgtgctgttgttggaagaactggagaccgctaaagagcgtggcgctaagatttacgccgaggttgtgggctatggcgctaactgcgatgcttaccattttaccgccccggcaccgggcggtgcaggcggcgcggcctgtatgcggctggcattggctgatggcggagtggagccggaacagattggctacatcaatgcccatggaacttccacgcatctgaatgacagctgtgagaccgcggccatcaagtcggtttttggcagccacgcgtacgagctggccgtatcctcgaccaagtcgatgaccggccacctgctgggcggtgccggcggggtagagggcgtgtttaccgcgctggccctgcacgatgcctttttgcccgctaccgtcaacctgcgggagccggatccggaactggacctcgactatatccccaaccagggccgcgcgttacaggtggattatgccatgagcgacagcctgggcttcggcggccacaacgcctgcgtggtattcaaacgctgggaggaataaggatgaatgttacacccaatgaaccgccccggaccctgacggcggcggaaatcgaaaagatcctgccgcaccgttacccgtttgctctggtggataagattcttgactatacccccggccagtgggcgcacggaatcaagtgcgtgacccgcacagagtcgtttttccagggacatttccccggccatccggttatgccgggggtattgattctggaagcccttgcccaaaccggcgcggtggccgcgttgagcctgccggaaaaccgtggaaagattgccctgtttggcggggtaaaaaatgcccgtttccgccgccaggttgtgcccggcgatgtgctgactttggaatgtgagctggtagagcagcatggcccggtgggcatcggcaaagccaccgcctgggtggatggtgtgcgcgcggccaacgccgagctgacatttgttatcacggatgcctgagggctggttttgcatggtggattgtgctataataaattcattaacctacagggggattctcgccatgctggatcagacatttgggcaggtatacacaaaattcaagctgcatttttataaacagatcttcaaccgttttgaggaccgtgaagccacgctgacgacggtagaatctttctgtatggaagtcatcatggcactgggggaacccacgattgcgcagttcagccacatgatgaatctttccacccccaacgcagcttataagatcaactctctggtcaaaaaaggctatgtggagcgcatccaatccaccaccgataagcgggaataccgcctgcggccgacccaaaagtacattgattactataacatcagctattcttacctgcatctggttatggagcgtgccaaacagcggttcagccccgatgacctggccaagctggaagaaatgctgcagatcgtatccgatgaactgatgccggaaattcagctgccgaaataaaatatacattacgataacaaaatgcgaaccacttcgtacaacgtggttcgcattttgtgtttatatgattattctgttggtaactcttggaccttttgaacagattgatgccagccgtacaggacattacaaaagaacaatctcgccaaaatcaataatccatatcaaacaggtgggccatcgggacagcgtcttcccgttcagcggtcagctttttcaaacgcagcgggtccgtattccagcgtgccgacagtggctgcctttttaagttccatgcgttttcctccttaaggtgtatcagaaaacaaagaaaatgacggatatttcgcaaacacaagcagaatttaaggctttttaacgcaaaatccggccgtgtttgtagaaatagactaaggcaacaccgcacaattcccgcctagcggcttaagcaccgcttcggcggct

SEQ ID NO: 568 - DNA, 19267 bp, unidentified
  source 1..19267: mol_type = unassigned DNA
atgaaaaaaggaaataaatacggaacgcatagagtaatttcaccgaaaggagtattgccacaaccagctgataaactggataacaatatggacgaaatctatgataacgagattttgatcgatgtgcaaactctgaatatcgattcggctagttttactcagattgaagaacaagccggaggggataaagctaaaattgccgggatcatgctgggaattgtagagaaacaaggaaaacaccgtaatccggtgaccggttccggtggtatgttactgggaacggtggaaaaaatcggagatgctttagttggaaagaccgatctgaaagtgggagataaaatcgcaactttggtgtctttgtcgctgactccgcttcgtatcgataaaattaaagaaatccgggcagatgtcgaccaggtagatatcgatggtaaagctattttgtttgaaagcggtatttatgcgaaaattccgtcagatctgccggaaaagttggctttgtcggctctcgatgtagccggagctccggctcagactgctaaattggtgaaaccgggagatacggtattgattatcggtgccggtggtaaatcgggtatgttgtgttgctatgaagcaaagaaacgtgctggtgttaccggtaaagtaatcggtttgtgccatagccagagaagtaccgaacggcttcagaaattaggcttctgtgattatgtattctcggccgatgcaactcagccggttccggttatggagaaaattgccgaactgacgaatggtgaaatgtgtgatattacgatcaataatgtgaatattacggatactgagatgaccagcatcttgtgtactaaaaatgacggattggtctatttcttctctatggcgaccagttttacgaaggctgctttgggagcggaaggtgtcggcagcgatgtgactatgatcgttggaaatgggtataccaaaggacatgctgagattacactgcaggaacttcgtgaaagcgaggcattacggaagatatttacagagttgtatgcctgaatggtcgggattttataatcccgacgaattaaaaatatgtttttatggctagcagaagaaaagagtttttccctgaagtgaccgatgaacaatggaacgattggcattggcaggtgaagaacaggattgaaactttggatcagctgaagaaatacatccggctgacaccagatgaggaagagggtatccgtgagtcgctgaagacattacggatggcgatcacaccttattatctgagtctgatcgatcccgataatccttattgtccgatccgtaaacaatcggtgccgaccattgaagaattgcatcggtcaccggctgatctggaagatcccttgcatgaagacggtgattcacccgtaccgggactgacccaccgttatcctgaccgggtgttgttcctgatcaccgatatgtgttcgatgtattgccggcattgtacccggcgccgctttgccggacatcacgattgtgccactccattggaaagaatcgataaatgtatcgaatatatcgctaataccccccaggtgagagatgtcctcctatcgggaggggatgccttattggtcagtgacgaacgattggaatatatcatcaaacggctgcgtggaatccctcatgtcgagattatccgtatcgggtcgagaacaccggtggtgttaccccagcgcattacgccggaattggtaaatatgcttcggaaatatcatccgatttggctgaatactcatttcaaccatccgaacgaaattaccgaagagtcggcggctgcttgtgcccggctggccgatgcgggtatacctttgggaaatcagtctgtcctgctccgcgggatcaacgattgtacacatgtcatgaaaaaattggtgcacgagttggtcaagatccgggtacgtccctattacatctatatctgtgatctttctgtgggtatcggtcatttccgtacccctgtatcgaagggaatcgagattatcgagaacctgcggggacatacttccggttatgccgtgcctactttcgtcgtggatgctcccggtggaggcggaaaaattccggtgatgccgacctatctgatttctcagggccccaatcgggtggtgttgcgtaattttgaaggcgtggtgactacgtataccgaaccgacggattacagagacgaatgccactgtgaagagtgtgagaagcgccgtaaaacagaaggagtggctgagttgctgagcggagaacgcttgtctctcgaaccggcgaatctggatcgtaagacacgtaatctattggcgaaaggataaattatttgtgattttggatttaccgtttcattcgattgaaaggataaatccggaatcataaatgaaaatgctgaacagatgggttttgttgatgacatatccgattacaggagtctggcaattgtcggattggagaaaaatacagggaaaacagaatgcctgaattacatccttcgcaggataaaagattcggcagatcggttcgctctgacttcgatcggaattgacggagaaaaccgggatcaggtatgtcaaaccccgaaacccgagattatcgtgccggaaggaatgatattcgttacttcggagaaacattaccgggagaggaggttggtggctgaaatcatggaaatcgatgatcatcggactgctttgggacggttggttatcgccagggctaaaacttcgggaaaagtattgctttcagggcctgcggatactgccgggttgaaaagtctgatccggcatatgaaagatttcggggtacgaacgaccttggtcgacggggctttgtcccgtttaagcctggcgtctcccaccgttacggaggcgatggtcttagcgacgggggctgctgtttccgggaatattcgggaattggtgagacgtacccgttatgtttgtgatttgatcgatctggaagaggtggacgaagttttacaagagaggttggatgccattcaacaaggtgtatgggcggtcgggccggagggagaatgtatcgatctgaaattgccttctgtgtttatgctggagaaaagtggaaccgatctgctgcaatatgggcatcggatctttattgccggtgctgtgagtgataaagtatttcagtttttacgcgtacagaaacagaccgtagaattgatcgtccgtgattttacccgtgtttttgccgcacctgagtctttttatgcctttttacgtaagggcggaagagtacaggtgcttcatcgtagccggcttttggccgttacgatcaatcctcagtctccgggaggattacttttggattcgttgcgtttgcagcaagcattggaagaaagcttgcaaattccggtgtatgatgtgaaaaaaatagaaaaagtcggtaaaaaccgttgaggatatgattttaagggaagcgataagacaagtcaggggattccgttatatgatcgaacaattggatatctgttcggctgtaggccggagggtattgtatgatctgccctggctcgattcgaaatctcggttggaggccgaatttgaacgtattcaaaagatcatggtactttttgaacaacctgaaaatgaatcccggctggaacgtttgactggtaagctgatgcaggtgagagatatccgggggacgatcgggcggatggcgatggagcaagtgttggatgatcttgaattgttcgaattgaaaacttttgctttgtgctcggaagaaatcagggaacttgtcgaagaatggcggattgttttactcccggaactggagccggttgcacgtttgttggatccggaagggaatcggattcctcatttttatatttatgatacttattcggctgagctggccaggctgagagctgaaataaaacaaaagagccttcaaggggcagaagaacgggaattagaagcgttgtatgtacaaagtgtggttttggaagacaaggtacgcgaagagttgtctgtgcagttgagaccttatcacgacgatttgaaacaggctttggaagcggtcggattgctggatgtcgtattggcaaaagccagacaagcaataagaggacaattgactttgccgcaaattccggaagagggggaaatggtgttcgaaggtcttttccatcctcagatccgggagattttagaacaggaaggaagagcgtttcaggctgtagatttgaaattggaaaagggaacgacggtgattaccggagccaatatggccggaaagacagtgttgttgaaaagtgtgcaattggcgcaatacctgatgcagttcggtttttatgtacctgcccggcgggcgggtatgccgctcgtggaacaagtcttgaccagtatcggggatgatcaggatgaattgaacggtctctcttcttatgcggctgagatgttgcgggtggatgaaatgatccggcaagtcaggcagcgaagtaaaattttggtgctgatagacgaattggcccggacgaccaatcccgtcgagggacgggcaattgtgaatggggtagtggattttttgactactcaccgggtgatggctatggttactacccattatagcggaataacggccgaatgccgtaaattgagagtgcggggatttgtagagaatcgggttgaagggaatatgaccctgaaaaatatcaatgagtttatcgattattcactcgaagaagacagcggagaagaagttccccaggaggcgatgcgtattgcctggatgctggggatcgaccgtggagtgttggaacgggtggaaaattatttgcaggaagaaaatcctgattggaaaaagacagtacagtagaaagaaaatatatatgaaaagtaaattaggaatagattttgataaagtcggacatgcccgtgaaatggcccgtaagattgctgaccaggtgcaggattttgtggatggctatacgacagtggctgtcgaaaggacattgtgtcgtttgcttggtatcgacggagtggatgttcatgctgtccctctgccgaacattttggtagacgagctgaaagaaaagaacgtgttgggagaaggaattttattctttctgggtaatgtaatggtggaaaccggaatgactccgcaggaaatagccgaacaagtggctgccgggaaagtagatgtcacccgggtaccggtatgtactcccggccagcgggaaaaagcgttgcaaccctatatcgaggccagtatccgtcggatttccgacaaccggaaacggcgtgagaattatatcgcaacgatcggagagggagcaaagccttatctttatgtcattgtcgctaccggtaatatttacgaagacgtggtacaggcacaggcggctgcccggcaaggggcggatgtcattgctgtgatccgtacaacggggcaaagtttgttggactatgtaccctatggggctacgacagaaggattcggcggaacttttgccacccaggaaaattttcggattatgcggaaagctttggatgaggtaggagaagaagtcggtcgttatattcggctgtgtaattattgttccggtttatgtatgccggagattgctgtgatgggagctttggaagggctggatgtgatgttgaacgatgcgttgtatgggattttattccgggatatcaatatgcagcggacgttggtcgaccagtttatgtcgcgggtgatcaacggctttgccggagtgataatcaacacaggcgaagataactacctgactactgccgacgctgtcgaagaagcacatactgttttggcttccgatctgatcaatgaacaattggctttattggccgggctgccggaagaacaaatgggcctgggacatgcttttgaaatggatcccatgctggaaaacggctttttgtacgaattggctcaggcccagatgacccgggaaatttttccgaaggctactttgaaatatatgcctccgacgaaatttatgaccggaaatattttccgcggacatattcaggatgctcttttcaatatgatcggaatctggacttcacaaggtattcaactgttgggaatgccgaccgaagccatacatactccatttatgtcggatcgttatctgtcgatcgagaatgcccgttatatttttaataatatgaaaaatatcggagatgaagtggtctttaaagaaaacgggattatacaaaacagggcgaaagaagtgttggataaagctaccgttctcttggaaaagattgaacgggaaggactttttacagccttggaaaaaggaatttttgccgatatcaagcgtcccaaaaacggaggaaaaggcttggacggcgtttgtgccaagggaaagaactatagcaatccttttgtagagattatgatgaacagataacaaaaatcgtaaatcaaataaagattatgagcggaggtttatattcaacagaagggagagatttcgatcaaacccttgatctgaaaaagataaaaccctacggggatacgatgaacgacggaaagacacagctgagtttcactttacctgtacctgccggagatgaagcgatagaggctgctaaacagttgatgaaaaaaatgggatttgaaaatcctcaggtggtgtttcatcaggaactgacgaaaggatatactttttttaattgttatggaaattgtgtacacacggtagattatagccatatctatgtgccgaaagtggaatcgaccaagtgggatatgggagagaccgatcagtttgtccgggaacatatcggtcggaaaattgtggtgatcggagctagtaccggaacagatgcccatacggtgggaatcgacgctattatgaatatgaaaggttttgccggacattatggtttggagcggtatgaaatgttcgaagccttgaatatgggtagccaggtgaccaacgaggaatttatcgctaaggctatcgagttgaaagccgatgctttattggtttcgcagaccgtgactcagaaagatattcatattaaaaatctgacggaactcgtggagatgttagaagccgaaggattacgggacaaagtgatcctggcttgtggtggtccccggatttcacatgagttggcgaaagaattggggtacgatgccggcttcgggatgaatacctatgccgacgatgtcgcctcgtttattgcgcaggaattggatcgaagaatgaatcattgaaaatatacaagctatggaaaaagaacaaatcagggaagtgattgccaggagagtggcaatggaactccacgatggagacgtggtgaatctgggtatcggtttgccgactttagtgccgaattatctgcctgaaggtgtcgaggtcattttacaaacggagaatggattgatcggtatggggccgactcctgctccgggagaagaagatccggacttgatcaatgccggcggtggagcgataacggctctgcccggagcggccagcttcgatagtgctacttcgttcggtattatccggggcggacacgtagatgtcagtatcctgggggccttgcaagtagatgagaaaggagatttagccaactggatgataccggggaaaaaaacaccgggaatgggtggagcgatggacctgctgatgggagccggtaaggtgatcctggccatggaacatacggcaaaaggaaatccgaaaatcctgaaaaaatgtactttacctttgacagccaaggggcaggtgaatatgatcgttacagaaatgggagttatggagatcacacccgggggaattgtactgaaagagatacatcctgagtttacggtagaacaggtgcaggcagctacagaagcaactctgatcgttgccccggatttaaaaaagatgtgctgaacgacgaaagcgtattgaaggaaatcacgatggaggatggatggtggatacctctagcccgaatcgtaaactataaattaaaaaaggtatggatttttcattatcaaaaaaagagatattgtttcagcagatgatcagagcatttgctgagaaagaagtaaaaccgctggcggcagaagtggacgaagaagagagattccctgtcgaaacggtagaaaaaatggcgaaacaggggattatgggtatccctttcccggtggaatatggcggagccggtggtgataacgtattgtattctatggctgtagaggaattgtcccgggtatgtgcaacgaccggggttattgtttctgcccatacctctttgtgtgcttctccgatctatgaattcggaaatgaagaacaacggaaaaaatatttacccaaattatgttcgggagaatggatcggagcttttggtctgaccgaaccgaatgcaggtaccgatgcctctgcccagcagacgatggctgttgctgaagaggatcattatgtgctcaacgggtccaaaatatttattacgaatgcagcttatgcacacgtttacattgttatggcgatgaccgataagtcgcagggtacacgaggaatctctgcttttatcgttgaacgggattttccgggattttccatcggtaaaaaagagaaaaagatggggatccggggatccgcaacctgtgagttgatttttgaaaattgtattgtgcctaaaggaaatatgctgggtaaaccgggtgaaggatttaaaattgcgatgaagacgctcgatggcggacgtatgggaattgcttcacaggccttgggaattgctcagggagccatggatgagacaataaaatatgtgaaagaacggaaacagttcggacgctctatcggacaatttcagaatacccaatttcagttggccgatttaaatgccaagatcgaagctgcccgtttgttggtgcggacggctgcctggaagaaagacaggaaaatcccttactctgtcgattcggcacgggctaagttatttgctgctgaaacagcgatggaagtgacgacaaaagccgtacagttccacggagggtatggatatacccgtgagtatccggtcgaacggatgatgagagatgccaagattacggagatttatgagggaacctctgaagtacagcggatggtgattgctgctgctctattgaaataataatgttttccgcattgaacttataaaaagagaatacatgaaaatagtagtttgtataaaacaagtacctgatacgacagagatcaaactcgatccggtaacaggaacaatgatacgggatggtgtacctagcattatgaatcccgacgataaaggaggattggaaatggctttggccttgaaagataaatatggtgcgcaggtaaccgttattacgatgggaccgcctcaggccgacgatattttgcgtgaagcttttgccatgggagccgaccgggcgattcatttgagcgaccgtaagtttgccggtgcagatacattggctacgtcgaatgctattgccggtgctttacggatgctggatttcgacctggtcattaccggccggcaggcgatcgatggagatacggcgcaggtaggacctcagattgccgagcatctcgatttgccacaagtgacgtatgtcgagaatttggaattcgatggtgacaagttgtttacgatccgtaaatctaccgaagaaggatatcaaaccgtacaggtggaatctccctgtgtccttactgttctggctacggcaaacaaagcgcgctatatgtctgtgcggggaatcgtagaggcatacgatcgggaagtggaaatctggaattttaataatatcagtgtggatgaagctaaattgggattgaacggttcgccgacgcgggtatggaagtcttttaccaaaggagctaaagcagccggaaaagttttcgaagtggaaccggccgaagctgtagatgttattatcgaaaaattgaaagagaaatttattatttaatacatgattttagaggaaaaccgggaataatccggtgaaatctaaagtttaaaatctgatgaagatggataaatctcaatataaagacgtttatgtattcgtagagcaacgggaaggagttattcagaaagttgccatcgaattattggggaaagcccgggagttggccgatagcctgaatgaaaaagtggtagcgatgttgttgggttatgaagtggcgggtcaggcacaggaattgatcgcttatggggccgatgtcgtattgtgtgctgacgaacgggagctggtacaatataataccgagccttacgctcaggcgattacacagattgtacatgagcgtaaacccagtatcgtactgattggagcgacgacgatcggccgggatttgggccctcgtttatccgcccgtttagagaccgggttgacagccgattgtacgggcctcgctatctcggatgaacgggatttgctgatgacccgtcctgcattcggaggaaatctgatggcgacgattatttgtaaagaacaccggccgcaaatgtcgaccgtacgtccgggagtgatgcgcacgaaaccgaaagatgaacaacgtgccggaacggtagagaaggtgaatattcatttcgataagtcgaaatttaaagtgcggattctcgagacggtgaaagaacaaaagaaccgtatcgatataacagaagcgaagattctcgtatccggaggccgtggtgtaggtaatacggagggatttgagatgctcggaaaattagcggaaacgctgaatgccgaggtttcttcttcacgtgccatggtggatgccggggttatgcctcatgaccgtcaggttggccaaaccgggaaaaccgttcgtcccgatctgtatttcgctatgggtatttccggagctattcagcatttggccggaatggaggaatcggaatttatcgttgccgtgaacaaggataaatatgctccgatttttaacgttgccgacctgggaattgtcggggatgtgaaacaggtcgttccgttgctgaccgagaggttgacaaacatccggaaaactgacaaataaaagcccggacatggagtatcaaaaattaatgctggaaaaacaagatcgtgtttgtctggtaaagatcaatcatccggaggcattgaatgccttgaatacggtgatcttgcaggaattggaccgggcattcgatgaaattgcagccgatccggaaaccgatgtggttattctgacaggcgaaggacgttcgtttgttgcgggagccgatattgctgaaatgagtgtgatgaaggccgaagaaggccggcgtttcggtgagttaggggctgctgttttccggaaaatcgaactgatggctaagccggttattgctgccgtgaatggatttgctttaggaggaggatgtgaactggcgatggcttgtgatatccgtatcgcctcggctaaggcgaagttcggtcagccggaagtgggacttgggatcacgccgggattttccggtacccagcgtttaccgcgtttagtcggattaggtaaagccaaagagttgatttatacggctgcggttatccatgccgaggaagcttgccggatcggactggtgaacaaagtggtggaaccggaagaattgatgaatgagtgtatggctatggcaaagactattgctgctaaagcgccattggcggtccgttatgccaaagaagccatcaaccggggagtggaaacggatatggataccggtatcgtcatcgaaaacggtttgttcgggttgtgtttcgcaacgaccgaccagaaggaaggcatggaagcttttttatggaaacgtaaacccgaatttaaagggaattaaaatctttgtaatttaaatttatcgattatgaaaatatgcattgttggaacagggactatgggacatggtattgcccaggtatttgcccaggccggacatgaggtattgttaaaaggccgttctgaagcttctttggcaaaagctcacaaagctatggataaaaatctttccagaatggtggaaaaaggtaaattggaagccggggttaaagatcaggtattggccaggattaaagatacgatgaaatatgaggattgtgccgatgctgatttggtgatcgaggcgatagctgaagatatggctaccaagcatgagatattcaaattgttggacggaatttgtaaaccggaagcgatattggcaaccaatacttcttcgctttctataacggaagtggccgctgtgactaaccgtccggaaaaggtgatcggtatgcatttcttcaatcctgttccggctatgaaactggtggaagtgatcaaaggccggctgacttcggcagaggtgcatgatcaggtatttgctttatcgcaggaaatcgggaaagtgcccgtcagtgtcgaggaagctcctggatttatagtcaaccggattctgatccctctggtgaacgaaggcatcggtatattagctgacggagtggcgaaaaaagaggaaatcgatgccgcgatgaaattaggggctaaccatcctatgggaccattggaactgggtgatttgatcggattggatgtttgtctggctattatggaagtgttgtaccgggaattcggtgactccaaataccggcctcatcctttgttgcggaaaatggttcgcgctaacttattgggacggaagaccggagtcgggttttatgactatcggaaataatgaggagagtcttctttaccgggatacgatgttggggaatatttccccaacatttttactttttccccactttctacaagctgcgattcttaatctgttgtgtgtaatgtattgataattagtgtattttgttgattttgtgcttgtggcatcggatttgttctgtttaaggataaaatctaactctaaaaaataatagtatgaaaaagatcgtcattttaggaatcggagcttctatgttcttcctgggtagttgcgtagagagttctcagaaatataagtctttacaagtccgtctggattctttgagtacagtacatattatgcagaattccgaaatggagagtatgctggccgatttgaacgatatttctgccggaatgcaatcgttgcgggatgccgaacgtttattgactatggaaacaattaatgaaaataaagccaatagtaaatccaaacagcaattgaatcagctgaaaaaagacgtacaggctattaccgaggcgatcgcttcttataaagaacagatttccaaactcgaaggtaagaataaaagccagtcggccgagtttaaaagattgattgccggcttaaatgcggaattggatcaacgtacacagaaactgaatgaaattactaaacaattggctgagaagaatcagcaattggcagtgaagaccgaggaagtcgctaatctgaccgagaatgtggaagctttggataaagccaataaaagtcagcaaatgacgatcaatgaacaggatatggcgattcatcagggacactatttgattggaaaccgcaaagagctgaaagaagctgaggtaatttccagacaagggattttctgtccgccgatcgtatcgtcacaagcacaaaaagccgactttaccgatttggatatccgtgagatgaaggtgatcccgttgaatagtaaaaaagcgaaattactttctgtccatccggctgattcctatactttggagaccggtgaagatggtaatatgactctgaaaatcaatgacgaaaataatttctggaaacaaacaaaatacttggttgtgatgattgaataaaagcgggaataattttaactgagagaggcatacccaaaaagtatgtctcttttcttttttttcacaacgattattcttgtcgggagagaaaataatgaaaaaaaactagccgaagatcatcaggatttttaaaagtgtatccgatgagaaaatcgctttcaatttgtcgatacttttgtatttcagtgttttaacactgcttactgagatgtttatttcctgtgctatttgctgattgtcgaggccttgaaaagcgagctgcatgacttgtttactacggggaggaagtttttctatttctgcgagaatctgcatggcgacgtctgcttctacaatgacattgaagatattgacctctttcagaggatggttgtttagatatttagcttgcagcttgcgggttcgcagccattcaagtgaaaggttatgaaccagcatatacatataattatcgatattctcaatatttttgttttttccttgtaattcccagaggcgtgcaaaagcttcctgtacaatatcttgggcagctgttttatcgcaaaggaaacggttggctgcgaaacacaaagaaacatacaaacggttcactaagctttcgaacttggttgcagctgtatttcccgtttgatatgttgtgtttttatccatttttataacatctttttaaggaattgctctacaaatttaaaaaaaattataattccgttcatccttttcgttactgagttagtctttaatatgaattaagagaggaaaaatgtagtaaaatagattcagatgaacagagagagtttaaatatattgttaaaaaaagcctattatcaacagctttctgaggaagagaggaaaactttgaagttgtggttgggggagtcgggagaaaatacagagatgtataaacggttgatgtcgggacagagcttgacggaatattcggattgggtgactggattcgacctttcccgggcgatggaagctatccggagtaaggtgaaacggaacaggcaaaggagaatccggaaatcagtaagttgggtggctgcctgtgtaatactctgtctgggcataactttcgttttttatttcacttcaatggattcagaacaggtattgacagaacaaatggctgctcagatacagcctggctcggcaaaggcgatattgactttaggggatggacggcaagtggctttggataaaaaacccattgaattgcttgtcaataaacaacaaatggtgacaggagatagtgcgaccttgaattattctattgtattgcccgcttctgagaccgaacagatacaacggcaggaagtggcagaatatcatacaatagaagttcctgccggaggagaatatcatctggttttggctgatggtacaaagatatggttgaatgcagaaagttctctggtatttccggttgaattttccgggaataagcgacaggttattttaaaaggagaagcttattttgaggtggcccggaatgaacatttaccttttgttgtgagtacagtctccggggtacaaatttgtgtattgggaacacagtttaatgtggaagcttatgatgaccgggaaagtgtaaagactactctggtggagggaagtgtagatgtacaggcagggggcgaaaaggtacgtttgattccccatgaacaattgcaatatcataaaaatactgctgaaatggaagtcagggaggtaaatgtacgggagattatcgcctggaaaaacggttggtttgtctttgataatactacattgggggaaattgtaaaaactttgcaacgttggtataacatagaagtagaatttatacgtcctgaattagaacatttgcgtttcaccggtgatttaagcaggtatgactcttttgatgctgttatccggatgtttgaagatactaaaaagctgaaaatgagtgtgatatcgaacaggctaattgtcgatagaaaataacgcagattaattttaaataaaaatacctaaagatgaggattgtgctacctttttctttcatctatttttataccgttaaaaacggacgtttttttgggaaaaatttaaatttataaacctactattttacttttctgtaaaaattaatccacagtttggaattttttctcgtatcgtgatattgtatttataatcaactaattacattcttgtaaaacactgtaaaattcttgccattacagaaaactgtgcttgacattctttggttttttactcttcatttttcactttttacgcttaaaaagtgacttaaaaaacgtcccaataaaagggtggctaactatatgtaattcagtgcttaatattaatcaaaaacagaaaagtatgagaaaaacatcctgttttaaacgtaggtttatgactaaggctttgattctatcgatagttttagtgatagtagggggaagttcttctatcgtaggagcttctcccagagttgataagcaactcggtcaattgataactttgaccatgaaggaaacttctgtaataaatattattcaggaaattcgtaaatcaacagattatcgttttttatttcaggtggacgatttaaaaaatatgaataaagaagaatttgttgtttctcatgcgaccataaaggaggtcatggataagttagttgatggtacaaatctgacatatacttttcgttctgatgctgtagtagttttagctttgaaacaacaagcggctcaaatcaaatcaactcagaaatttagcttgaaagggcgggtgtttgaaaaaacggatcctggtaaaggaattccttttgcttcggtttttctgcctcagttaggcataggcactgtaacaaaagcagacgggacatttgagataaaaaatctggatcctgatgtttataaggtggaaattagttctttaggttttgagacgttacagacaactattaatttgaatagtaaaactcctgcaaatttgaaatttggtttagtggaagcgaatttccgtttggatgaggtggtgataactgccactaatagtaaagccggagcttcgacttcttcttctatctcacgtttggcaatggatcatatgcaggcttccagtttgtctgatattatgcaactattaccgggagcaacggtaagtaaaccggatttaacttccgtatcgactttaagcctaaggggaggggcttctttaggaacagcggtgatcatggacggagctcctatttcaaacaattctaatatgcagatgatgacaacctctattggtggagctgtcccggcaacgagaggaacctctccccaaaccggaattgatttaagaacgattacaactgataacatcgagtccgtggaagtgattacgggagttccaagtgttgaatatggcgatttgacaggtggggctgtgattgtaaatacaaaagccggacgtcagcctttgcaaattaaattcaatacaaatcccaatgtttatatgttttccggtacaaaaggattggggttaggagaaaaaggaggaaatgtgaatgtcgggttagattatgcatatagcaacgcagatcctacagagggatatgattattatcaacgaattactgcacgtatgatgtattcgaatggtttttttcaagatcgtttacgttcaaatacttcattgaatgttatctatgctaaagataaaggggaacctaacccggatgatgaacaggacatgcggactaccagacaacgggatttagggctggttttcaatacaaatgggacattagatataaatgccggttggcttaaaaatattcgttatgcagcttctgtaaattatacgaacaggcattcttattttcaggatgaggcgactaatgcggattggggatattcccagtcaatgacagatggagctgtgttgtccaatgttcccggacgtccagtctatttggaagatggtacagaggttacccgggttccggtgggagaagaaagtttaaaggcgtggatgttacctggttcttatatttatatgtatgatgtttatggaaaagagctgaatacatttgccaaactgactacaaattttgccggcaagaccggacctattcatcatcggttgattttaggggctgattttagaaattcaggtaatctgggtaaaggaaagatatttgatccggaaaatcctccttaccggaatttatcttatgactttgcatctcaacgtaacagagcgtttaaggatattccttttatgaaccatctcggagtgtatgcagaggagaatatacagtggcttatggggaaacatgaattaaatatttctgctggaatacgttgggataaagtctgcggtttcggtgacggattttctccgcgtatcaatgcttctgtggatattatacccaggcatctgactctccggggagcctatggtattactttaaaagctccgactttgttatatatgtatccggataaggcttattttgatttagtgaattttaataatgcttcaaccagtgctcctgacggacaaaaatttcaggtcattaccacgcgtgtctttgatgcaggaaataagaatttagaaatggcaaagaacaaaaaatgtgagttggggttggatctgaaatttaataaaatgcgtttttttattactgcctatcaggaaaaatgtgataacggttataccattgccaaatcgttgaatacctttaaaagtgtaccttttgtacaatattctgaaattactccgcgtccttctgatgaaagccagatagctaatttgaaagagatagccaccaatccttatttattgagttataccactccgatgaatgcgcttaaatatctggtgcgggggattgatttcgatttcgattttggacgtgtggatgccattcgtacggcttttaatttgaacggttcgtatatgtggaggaaatccggttctaataattatatgttctggaataaaattacaggaacagattattctaaatatccccatatgggagttttttctccggattatgaaactgattatagcgaacgtttggctacaaatttgagggtcatccataatattcctcaaataggattggtggtaacattgactgctaatgtgatttggaaagatcgctcatggaaatcttatggtaatgactcaattcctataaaatatatttcccgtttagatggaaaattatatgactttaatccggatgatattgatagtgaggaatttatcgggatagaccggaggtcaactgttaatccgacccggttgatccgggaaggagttatgcctccgcttttaaccatgaatttgaatataactaaagaaatacgtgactttttgaaggtttctttctttgcaaataatatgttcaggagtactcctttatgggaaagcaagaaaaatccgggatcctatacccgaaggaatactacagagaacgtgttcttttttggtctggaattgacggctattattcgttaa

SEQ ID NO: 569 - DNA, 16265 bp, unidentified
  source 1..16265: mol_type = unassigned DNA
gcgcttttggcttagcatctgccgcacctcgctcgccgtatcggcacttagaatcatgcggtattgccgtaaaaatcaacgcaaaataaatcttgattttttgacaggcctgtagtatactatacaagcaacatatgagccggtgtgttggaattggcagacgagacggactcaaaatccgttggtggtgacaccgtgtgggttcgacccccaccaccggcactgatataagaccccaaaaggcgcagagctttttggggtctttttttggcatggtcacgggggtcgaacagggcggcacggctaagccgcgcacaaaagtctccggtggagacttttgtgacccacgcccccaccaccgcttaacaaaacagcccggaactgccgcctgcatttgcggtggttccgggctgttgctttacctattcaccttgcagctgtcaacgtgcaggtatgggttcctggaatgccttatgcctttttgctgtaatcgcgtgcgccgtaaatggcggtgccgatgcgcacaatggtagcaccctcgcggatggcatctgggtaatccccgctcatgcccatggaaaggatatccattttggcgttctcataatggcggtcagcagcttttgccagcagttcccgcatttgggcaaagaacgcgcgggtctcatccggggttgcagctgccggcgggatggccatcaggccgcgcaggcggatatgcggctgtgcggctgccatatccagcaggggccacaggctttcggcagaaacgccagacttgctctcttccccgccgatgttgatctcgatcaaaatttcctgggtcaggtttgcggcggcagcggcgcgctccaccttttgcagcaggtgctcgctgtccacgctttcaatcaaagcagcacggcccaccactttgttgaccttgttggtctgcaaatggccgataaaatgccccggcttaccgcaataagcgttggcgtcggtcttttccaccagttcctgcacatggttttcgccaaacaggtcaatgggcagaacggcgctggcaatcacctcttccacggtgcgggtcttgcaggcggcgcacagcagaatatctgccgggtcgcggccggcttcacgcgcagcggcagccatattttcacggatgcgggccacattttcggccatcattgtcagttgttcctgtgtcagcatggttcacatctcctggtaaacggcgcggctgccgccgatgtatttggggcgggtgcgggcgcagatgatgggcgcagcgccgatctgcttgatggtcaggcgcaccggcacggccacgcgctttaagtgcatgccaatcagcgtaccgccgatatcaattccggcagcggcacgcacttcctccaccagaaccggatgttcaaacgcctgccagcagttggttgcccagctgccgcccgcatggggctgcggcacggcgttcacctgttcataaccatacttttcggcagcttcctgctcgatgacaatggcgcgattcaggtgttcgcagcactgggccgccagatagacgccctgcgctttgagcaccggcagaatacccgccagcacagccgcggcggcttccatgctgctgtccttgccaatatgcccgccaacgatctcgctggaagagcagccgactacaaaaatatccccggcgcgcaggtgtgcagccgccagcagttcttccgctgcctggcgtgcctgcgccgtaatggcggcgcaatccggtttttgaacggtgttttgttccataatctacccacctttttcatttactgatccggcattattataacacgggatgcaaggtttgtacattcttaaacggttctaaaccaatcttacccccatacaaaaacggtgcagcaaagccgcagcctgctgcaccgttttggggcactgctgaaaacaaacttattctcagcgcttgatatcgtaattcatgttcatcaggttgcggatggtggaaacatcatcggtgatgttggcatcgccatggatggtgtgcttgatggcggagcttgccaccgcaaagttgaccatatccatcggcttgtagttgtgcagcatggcgtaaatcaggccgctggcaaatgcatcgccgccgcctacacggtccagaatattaaaggtaaacagcttgctttcaaaggtatggtcctcataccacataaaggctttcaggctgttctcagagccggaatgggcataacgcacatggcgggcaatgcacttgatgttggggtaacgctccacaaagcgctggaagatctcgtcctgctgttcatagctgggctgtaggggcacgccgtctttccagtcgccctgggcgtggtcggcatcgtctttccacaggtggtaaggctcaatgccaaacagaacatccacatagggcaggcacttggtgcagtagtcacgggcttcttcccaagtccacagggtggagcggaagttgccgtcaaagctgacggtcaggcccttttccttggcttttttcaggcaggccatcacaaaatcggcgcagttctggcccaaagccggggtaatgccggaaagatgcagccagtcaaagccgtccagcagggcgtccagatccactttagaaaggtcatactccgtaaaagcggagtgcttgcggtcgtaagtaaccttgctggggcggatgccgtaaccggtttccaggtaataggtgcccagacggtgggtcggggtttcctccggggtggaaaggatcatcggggtgcagtgcacatcattggagcgcagccagcgcaccgcacttttgcccaaagagttgttgggcaccacgctgaaaaacgtgctgtccacacccaggttggcaagagccagggcaatgttggcctcgctgcctccatagctggcttcaaagttggaagccatacggatcttttcatagttcggcggggtcaggcgcagcatgacctcaccaatcgtaataaatttagccgggctgtcgttatgcaggagcagggggttaaaatgttccataacatctacctctcttttatggccccacgggcaaaaccaggtcatggcccgccgcagggtttgttatgtcatatttattgtaccgtattttcgtcccggtttcaacgatttttacacaaactgcgctcatattttgcgttccttttcactgttgcacaaaaagggcggtaccgggcggcaaaaaacatcgcacacccatgattttttgccgcccggttcgaattgcattttaatgtcttttattgtataatagtagaaactgtgccctggcggcggctgccgcgcggggtgttgatacaagtgccgcacaaaacaacgttctgacgttttatgcgggccataaatctggagggagccaaacatggccgaaacaatgcaggtctccgcgcagcgcgcctggacccacctgaaaaaataccaaccgctgatccatgaacttgtcagccgcgatctgaaagtcaaataccgccgcagctttctgggttacatctggagcattttgaacccgctactgatgatgctgctgcaaagcatcatcttttcgtacatgttccgcaacgatatcccaaacttcccgctttacctgatctgcggcaacaccctgtttacctttttcaatgagaccaccagcatgggcctgacttctgttatccagaacgccccgctgatcaaaaaggtgtacattcccaagttcatctttcccatcagccaggcggtttcccgctttgtcaccatgctgttcagctttggtgcggttttgctggtcatgatctttacccgtgccaccttctattggaccatctttttgagctggctgccgctggtgctgctcttctttttcagctgcgggctggggctgctgctttccgcgctggcggtgtatttccgtgatatgatgcacctgtacagtatccttaccatgggttggatgtacgccaccccgctgttctaccccatcaccgccctgccggaaaccctgcagaaactgatgaagctgaacccgctgtaccactacatcaacctgttccgcaacctgatgatgtacggcaacattcccggccccaacacctggattgcctgcattttttgcgccgttgcctctatggctattggcctgttggtgttccgcaagctgcaaaagaactttatcctgtatatctgacgtgaggtaacgtatggacgagattattaaagtcaatgacgtttccatgcgctttaaccttgcgcaggaaaaaactgagaccctgaaagaatacaccgtaaaactgctgacccacaagctgttttttaacgaattttacgcactgaaacatgtttctttcagcatgaagcgcggcgaatccctggcgctgatcgggcgcaacggcagcggcaaaagcaccatgctgaaagtgatttccggcgtgatgtacccctctggcggcagcgttgccgtcaacggcgaaattgcccccatgatcgagctgggcgccggttttgacatggatctgaccgcgcgggaaaacattttcctgaacggcgcggtgcttggccacgaccgggactatatgatggagcattttgaccgcatcattgaattttcggagctgaaagattttgtggatgttccggtcaaaaacttttccagcggcatgatcgctcgtttgggcttttccattgccactgaagtacaggccgacattctggtttgtgacgaagtgctggccgttggcgactttatgttccagcagaaatgccaccgccgcatggaagagatgctttccaacggcaccacgctgctgttcgtcagccatgatatcaaccaggtgcagcagctgtgccagcgctccatctggctggatcacggtgttctgcgcggggatgggccatcgcgtgaagtctgcgcggactatgtgcgcgctatggaggccggtgaaacctgatggaaaagctgctgacggtttcggttgccgcctataacggcgctgccacgctgcaaaaagcgcttgaatcctgcctggtggcggatgaaagcctgcaggcgctgctggatgtgatcattattgatgatggctccaccgatggcaccgccgcgctggcgcaggcctttgtgcaggcacaccccggcagtttccggctggtgagcaaggtgaacggcgggtacggctccacgctgaataccgcggtagagctggcctccgggcggtactttcgcacgctggactgcgatgactggtttgacaccaatgctttgcagacccttttgcgccgcctgcaaaactgcacagcggatgcggtatacaccaactaccgcaccgtgcaggaaaacggcagcggaaaggcctttgatgtctgctgcaaatttgatacaaaccgtgtgtatgctgtgggtgaagtgcagcaggccacacctgatttgtgcatggagatgcacgcgctgaccctctgcaccaaaactctgcgcgccgcatggcgccccatgccggagcattgcagctacacggatatgggctatacgtttgttggcatggctgcggcgcagaccatctgctttgtgccggtggttctgtaccagtaccgcctggggcgggatggccagagcgtgagcatggccagctaccgcgcccacacgcaggattacatccgcgtagcgcgcattctgttggatgttgccgaaccgctggccgcacagcctgcccccgccgggcgggacctgctgctggtgcagcgggcgcgggatgtggcgcagtacctgattgagctgtacctgcgctttccccccgaccgtgaaaccggcctggccctgcgccggtatgacgagatgctgtgccagacttacccacacatcgctgccatgatgaccaacaaaaacacccgtctgctgcgggccgggcgttacctgccctaccgcacattgagcgcatgggcgcgcggaaaacaatccaacggcggcattttataatgctgtgccggatacttgaatgctttgccggatatgataaggcaaaaagtgaaaggagaataccgtatgctgctgcaaaagctgctttggccccgcgtgggcatatgcactgaggaccgactgtattaccgtatgaaagcccccagcttccgcgatgagggggatatcctgcgcattgagcagggcgaacgcgtctgctttgatacctactttaacagcgtcagcgcagacaaatggcgccgctacaccgccgcgcagaatttttcgctgcggctgaaactgagcggcaagctgcgcgttgtgctgtgcagccgccatttcatcaacagccagagcgtgcgcaccgtgctggccgaaaaagtagtgcaggcggattccgtgcaggaattctgcttcgattttcccaagggcgctgacggcatgctgttttttgagctgcaggccctgagcggcaatgccgcctattgcggcggcgcttatgagtgcgatgccgctgaaaaggatgtgcagcccgtcaaaatcggcgtggatatctgcaccttccgccgggagccgttcgttatgggcaacattgcccgcatgcgcagcgatattttggaaaacgccgccagcccgctgcacaaccacctggaagtgtttgtttccgataacggccagacgctggattacgataagctgaacagcgataccgtgcatgttgtgcccaacgccaatgtgggcggtgccggcggctttacccgcggcatgatcgagatcctgaaagccaacgaaaatggcgcaggcgttacccatgtactggtcatggatgatgacattgtgctggataccgatgtgctgctgcgcacctacaccctgctgagcctgcgcaagccggaatatgcggatgtatttgtcggcggtgccatgctgcggctggaccgccctaacattcaggtagaaaacggcgccgcctggaaccagggccagttgatcagccacaaagccaactttgatctgaccaaggttgacctgtgcgttgccaatgagctggaagaacgccatgagtataacgcctggtggtactgctgcatccccattgccgttgtgcggccggacaacctgcccatgcccatctttatccgcggcgatgacattgaatacggcctacgcaactgcaaacgcctggtcaccctgaacggtatctgcgtatggcatgagccgtttgagagcaagtattcttcctcgatgtactactacatcctgcgcaaccagtgcatcgacaacagcatgcactgccccggctatgatgccaacgccctgaaagccgacctgcgcagccaggtgatgggcgaagtgaaccgctaccgctataagaatgctgacctgctgatccgcggcgtgcgcgactttttgaaaggcattgactggctggaacagaccgatgccgaagccctgcacaaagagattatggcatatggctacaaggcccagccggtggaccagctggatgttccgtttgattattcccgctacctgtacgccaccaaagaggaagaaaaaaacaagggcaagctgaaaaacctcaaggtcaagctgacccgcaacggctggctggtgccccccacccgcgaaaacaccgttgtgagcatgatgcacatgaccgcctacaatgcttaccgcgtgcagaaggtgctgaactatgattccaactcccagaaaggctttgtgaccgagcgcagcaaggaagaatacagccgctgcgtgcgcgagatgaaagcctgcatgaaggagatcgatacccagtttgacgctgccgcccagagctaccgcgagcgctgcggcgaagtgcgcagtctggacttctggaaaaagtatctgaacctggacaagtaattttaccgggcctatccccggttttccctggaaaggaatcttacacttatggccaaaaaagaggcaaattcgtttgttcttaccattgcgggcattgctgctgccaccgtgatcggtgtggtcggggtcaagctgacccctgccccgcatgtgattttcagcctggcccccagcgcagaaccacaggctaccgctgagccggagcccatcagctgcgtgctggccggtaccgggcaggttgtggattttgcggatcccggcgcagaggaatatgtttccctgctggataccgacagccagagcctgaccgagcgctatgccctgcccgctttggagcggatgacccagtccgacaccgaaagcctgattgcccctttgcaggtcatccagcgcattcagaccctcggtattgaccctgccacctttgataccccggaggccaactggaaaaacctgtataactctgtcatgacccggctggctcccctggccaccgccgaaaccgcccaggctgtgaattttaccggttccagcctggcagaactgaatgactttctggcagccaaccccggcagcacggtggaggtcatctcccctgctctggtgatggatgccaccctggtggtacccactggtacgatcctgcacggcaacggcgcagtgctgacccccggcaatgaaacgctggacaaagccattgttctggaccaggcggaaaataccgccgtgaccggctttgtcatcaacggcgggtgcaattacggtgtctatgtcaagaattccagcagtttctatctggctgaccttgacatcagcaatgtttccctcaagggcctttgcgttatgggggagaacaccggctttgcactggtcaataacagcatccatgaaaaccagaatggtgccatcttcctgaacggcgagatcagcaatggcgtgatcgagggcaaccgcattgaaaataactctggtgcccgcaacctgaccgccgggctggtgctctgctccatgcccattgaggacattgaaaccgcctacaatccgttcccggatgaaatgctgtacgatattttacagtctccccatcagctggttgtgcgcggcaacacggttgcgcagaaccattcctccggcatttattcggaaagcggctacctgaactattatgtagagaacacgatctacaagaacgaaaaagagggcatgtgcctggattacggctccttcggcaactacattaccggatgtgagatccgccagaacggcggccgcaaccgcatgagtgatgaggatctggaagctgactttattctggatcagggccgcatggcggatggttcctcccccgccaagctgcccggcatctcgctggataacaccgcctacaacaccatttacggcaacattgtgcgggacaattacggttccggcatcaaggctgtgcgctcggcgttcagcaacaccattctgtgcaaccagatcattgacaacaaccggggtgccagcgataccttccacttctttggtattgagctcagcactgacctgaacgcggatgaagccgtgcagggcctggattttaccccctgctatgagaacatcattgcccgcaacaccatttccggcggacattacgccggggtgtttatgggcgaagatgcgttcatgaatgatatttttgacaatacctttatggactgcactgactgggctatggaatccctgagtgaaaaatacaactctaccctgaacaatctggcaaacatgcccacccgcgggatcgaactttctaacggtcagggctgatgccgcgaggctgctacatgaaacaaacactgcaaaaccgtttcccgcgccggtggctgctgctggcttttgtgctgaactttgccattgccgcggctgcactgctgccctacatgatacgggacggcggcctgctgttggttgcggcggattttgacgcagaacagctctcctacaacatgctgtgcaacaacgccatcaaaagcggcgaggtgctgtggaactggcgcattgatattggttcggactttgtatcctcgttcagcttttacacccttggcagcccgtttttctggctgagctttctcttccccgccagcgcgtttccctatctggtcggctggatttatatgctcaaatatgctgttgccgggctgacctcgtttgcctacttccgccgcagtgccagcgagaaaagcgccctgcttggcagtgtgttgtatgcattttccggtttttcctgcatcaacgtggtgttctatcacttccatgatgtgattgccctgttcccgcttttgatgctggggctggacaaacgcatgcaggagggcaaaaaagctccgttcctgtttgccgttgccatcaacgcgctggtcaactattacttttttatcggggaagttttcttcctggtgttttactatattacgcggtatctttttggcggcgaggacgcacgccctggggcggatctgcgcaaaaatgcccgcaaaattccggcctgcatcctggaaggctgtctgggcgtcggcatggcgggggtactgttcatcccctccattgcggcggtgctcaataatccccgcgtatcggatcacatcagcttgagccaactgacctttgactggcccaattacctgcaaatgctgcgggcgctcttcttcccggcggagaatatgttcaatttttccgctgtggtgcatgataactggtattccatcgcggcgtacctgcccttggtaggcgtctgcctggttctggcttatctgctgcgctggaagtgggactggctgcatgtgctgctggtggggctgttccttgtagcagccagcccggtcagcaacagtctgttcgtcatgttcaccagcgagccgtaccgccgctggtattacatgctggtgttcctgctggtgctggccaccgtcaaggtgctggaccatctgcaggactacccttggcgtgcgggctgcggtatttcggctgcagtcatcgccgccatcacgctgtatctgtacgtcaagcgtgataccatagtgtaccgcaaatactggctggttgtgttgacattgattgccatcggcggcgtggttctgctgtttgctgccctgggcggggtgcggcggctgcgcctgcgccgccccatggctgccctgacggcctgcactgctctggttgctgcactgaccaccggttttaccgtgggcacctatcagcgtgcctacacccagacgatcggcctgaccaccacagaaatttatggtgacgttatccacagcggcgacggcctgcctgatgccctgccctaccgctattatttctgggagccgtattccaaccgcggcatggcggcttacctgccggaccgtacctcctttttgagcacgctttccccctccatctttacactgtatgatgccctgggggacgagcgccacgccattacccccgccgggccggagggcaccaacgagctgctttccgttgggtattatatccgcaacaactccgactggccggatgaaatctacaccagtttttccaacggtcacgagcagatcaacgtctatcaggattcccacgccctgcccatcggcttctgctatgatacctacatgacccgcagtgagtttgacgagattgaccccgccgagcgcgcccactccatgttaaagacccttgtggtggcagacgaggacgaagccacggtttccaccatactgcgccactatgatgccgcgctggatggtaagatcagccaggaaaacaagtatgccgacatggacaagcgccgcgaagcctgcaccgatgtgtttgattatggcacagactatttttattccgaaatcacatccggcagcgagcagtacgcatttttcagtgttccctatgacaaggcgtggagcgccacggtcaacggcgaatctgcagagatcctgaacatcaacggcctgatggccgtcaaggtgaatgccggtaaaaactgtattcgtttccactattcccccaccccgctctggtgcgggatcggggtcagcgccattagcattctgctgacggcaatttacctgctggccgggcggcgcagcagaaaaagcaaaaaagaggtgctgtaaaccatgaaggctacccgcgaaaatccgatcctgtacatcgtgatcccctgctataacgagcaggaggttctgcccattaccagcaagctgtttttgaaaaaaatcaccgacctggttgccgccggtaaaatcagcgatgacagccgcgtgctgtttgtcaacgatggctccaaggacaaaacctggtccatcatctgcgacctggccaagagcgacaagcactacatcggcatcagccagagccgcaaccgcggtcaccagaacgcagtgctggccggtttgatggaagccaaggacaagtgcgatatcaccatctccattgactgcgacggtcaggacgatatcaacgccatggacgccatggtagatgcctatgtgaacgatggctgcgaagttgtgtacggcgtgcgctccaagcgcgatacggataccttcttcaagcgctttacggcagaaagtttctacaagctgctgaacgccatgggggccgaggttgtttacaaccacgcggactaccgcctgatgagcgcccgcgtgctgcatgagtttgccaatttcaaggaggtcaacctgttcctgcgcggcatggtgccgctggtgggctttaaatccaccagcgttgcttacgagcgccacgagcgcattgcgggtgaaagccactatcccctgtccaaaatgctgtcccttgcgtttgacggcatcaccagcctttccgtcaagcccatccggttcattaccgggtttggcgttattgtggcgctcatcagctttatcggcgtgatctgggccattgtggaagcgctgctgggtgccaccgtatccggctgggccagcatgaccagcatcatctgctttgtttccggcgtacagctgatctgcctgggcgtgatcggcgagtacatcggcaagatctacatggaaaccaagcgccgcccccgctacatcatcagtgaccgcacgtgggatgaggatgagaagtaatcggctgggcagagttacgcctgtttgctttacctaatatagcaccaacaaaataaatttgtgccgcgcgttttgcccattgtatgggggtgggacgcgcggctttttttgttgtttcggaggtttccatgctcacggttgactcattttgcaggagagtatttgcgccgcagcccaccgacatgattctttattatttattcattattctttctcatcccccacccccggcccctctccttccataaaaaatttcccgatattttttgccttcccttattgacaaacgcccctgttggcagtattataatgtcaacatatgagcaatcattcatatgataaaatgtgtgataccgaggtgatactcccaatgcctgataccaaaaagttcccgcagcccgccacagcaccggatggcttagccaacgccctgcctgatgttccggtatgtgacccagactgccacggtgcgccggatatcgttgccaggctgcgcagcgatctgccggacgacgaggttctttatgacctttcggagctattccgtgtgtttggggataccacccgcatcaagatcctgtacgcgctgtttgagagcgagctgtgtgtaggcgatttggcccagctgctggatgtttcccaaagcgccgtcagccaccagctgcggctgctgaaagccagcaagctggtcaagttccggcgggacggaaaaacggtgttctattccctagatgatgatcatgtgcgcagcatgattgcgcttggcatggagcatgtggaggaataaaacgcccccaactcttgttaccccttacttttcaaaaaatattgatcataaaaccaaaggagatattatcatgcagaagaaattcaaaatcgaagttgattgtgcaaactgcgccgccaaaattgaagatgccgttaaaaagctgcccggcgtgaacagcgcttccgtcagctttatggcccaaaagatggttctggatgtcgatgatgataagttcgatgccgtgctgaaggatgttgttaagaccgccaagcgtgttgagccggactttgagatcgagctgtaagctccttgcatcagcattttcggacggtttccaaccgcctgaaagtttcggaatccattccaagcggcggacatgtgccgacgcttggaataccttgcaagcaaaaaagcagatccgagtgccgtccaggcatgagaagatgcttctttgcggcagggtggttccaaaggaggggtgcaggagcgtggcgcagccacactgcggcgaaccccacctttgtagcgtggagcttttgtgacacgctcagggcggtttccaaccgcccttatttttgccccttttttcctgacgaacacccaaaagagaggtcttatcttatgacaaagaagcagaaaaagacgctgaaacgtatcattatttcagcggtgctgtatctggccattattctggcttccaaactggtggctataccctggtatctggagctggtgctcttcctggtgccgtacttcatcattggccacgatgtgctgcgcaaagctgtgctgggcattgttcacggcgaagtttttgacgaaaactttttgatggccgttgccactgtgggagcgctctgcctgggtgagttcagtgagagcgttgccgttatgctgttctaccagattggcgaactgttccagagttacgccgtcggcaaaagccgcaagagcatcagcgatttgatggatatccgccccgacagcgccaacctggaaactgccgacggcacggtaagtaccgttgatcccgacgatgtgcccatcggctctgtgctggtcgtgcgccccggcgagaaagttcccattgacggcgaggtcatttctggcgaaagcacgctgaacaccgccgcccttaccggcgaaagcaagcctcgctttgtgcatcccggcagcgagatcatcagcggctgcgtgaacggcgacggcctgctgaagctgcgcaccaccaagctgtacggtgaatccaccgttgccaagatcctggacatggtggaaaattccagcctgaaaaaggcccgcgctgaaaactttattaccaagtttgcccattattacacccccgccgtctgcatcggcgctttggtacttgccattttaccaccgctggtgctgggcggcggctggctgacctggatcagccgtgcgctcaccttcctggttatcagctgtccctgcgcgctggtcatcagcattcctctgagcttcttcggcggcatcggcggcgcttcccgctgcggcatcctcatcaagggcggtaactatctggaagcacttgccaacacctccattgctgtgtttgataaaaccggcaccctgaccaggggcgtttttgccgtcagccaggtcagcccggccaacggctgcaccgaaaaagagttgctggaacaggctgctttggccgaaagcttttccagccatcccatcagcaagagtctgcgcgaagcctgcggcgagctggatgcccgccgtgcgaccgatgctcaggaaattgctggtcacggtgtccgcactatggtggacggccatgtggtgctggcaggcaacgcccgcatgatggacgacagcaagattacctacaccaaaaataccggcaccggtactgtggtttatgtggcgcgtgacggccagttccttggctctgttctgattgcggacgaagtgaaggaacactccaagcaggccattgccgccctgaaagcccagggcgtgcgtaccatcatgctgaccggcgacagtgaagccgttgccagcgagatcagcggccagctgggtctggatgaataccatgcccagctgctgcccgccgataaagtcaaccgcgtagaagagctgctggccaccaagggcaagaacgatattctgacctttgccggtgatggcatcaacgacgcccccgtgttgatgcgcgccgatgtcggcatcgcgatgggcgccatgggaagtgacgctgctattgaggccgctgacgttgttctgatggatgacgacccggccaagatcagcctggctatgaagatttcccgcaagtgcatgcgcattgtgtaccagaacattgtattcgcccttgccgtcaaagccatcttcctgctgttgggagcctttggcattgccaatatgtggtgggccgtctttgccgacgttggcgttatgattcttgccgtgctgaacgccatgcgtatgctgattgttgaaaagaactaaggcaacaccgcacaattcccgccttgcggcttaagcaccgctccggcag

SEQ ID NO: 570 - DNA, 10377 bp, unidentified
  source 1..10377: mol_type = unassigned DNA
gctgggcagcatgatgttgcgcacatccagcgcggtctgcttggctttctggtcgtcatcctcggtggtcgtggtcatgcctgccagagacgagcttgtcgaagaggaagaggaaactttctcgttgattttctcgtcgatcttgctgcccgcataatcggtggctgcctggatgccatccagtgccgcgtactcccacagatcgcccgtcacgtcgctgaggatgaggcggtcgatctcgcctttttcattggtggtataatatttgacgtccgtgccgctcagagtgacccccgataggcggctggggcgaactgccccagccaaaccctccgaagtcgtgtccagaatttccacgttactggccagggccgtattgtccagggcggtgccctcggcgttgacggtgccgctggtggatttggtctcaaggctctggatgctctcaccgttttcatccacggtgatggccaccagcttacctgccggatagttgaactgtttgtccacgttcacgctgcgggtcacgccatcggtgcaggcaacggccacggtctgctgcacatccgggccgctgttctccaccaggctgcggctggtggtctggaccacgccgtaaaacacctcgttggcggcgtcgcccgtcaggacggaaaccgcttcatcgttcatgcccagcagcagggtgaccacctggcccacgccgccgccgttcagagcggagagctgtgccgccacagaggaggaagcgatggtgtactcggtgcctgccacggtaacagaagtgggggcattggccgagggagccacggccgtgatgcggcctgcggccttgcgggtgtagatccataccgtctgggccgtctcgttgtagtagtaaacgtcataggcgttgagggtggcgtccgtggtcacggtatcgttgcggtagaccgccgtgggtgcaaagggcagctgggtgcccaggcccgccacaaaggggcccttgacattgctgagcaggatggaagagacatccaccacgccgttgttcacggtaaagcccagcgaagaggcatagactttgccctccgcggtggtggccgtcagggcattgtagagcaggacagcgccgtcttccagcgtcatcccctcgccctgggccttggtcaggttgtcccgcagacccagctcgtttgccttgttgagctgtgcggccgggaacgtaccgctgagggtggtcacgtcatagcccagcagcttgaggaccgcggtgcaggcttcttccagcgtgacagcattgtccgggcggaagctgccgtccgtatagccgctgatccagccctgctggaccgcaatgcggacgtagggcgcataggcggagccgctgcccacatccgaaaagagagtacccgtggagccctgggtcttggcgctttcccggtaggcggagaacgccaccatcagtttggtcagcgcgccgcgggtaagcggtgcggccaggtttgccgtctggtcggaggtcaggccgcccagcgtaacggctgtctggactgccgtgttggagccgctggccgaggcgggcaggatgagcatggagcaggccacgcagaccgccaacagcagcgcaagaatgcgtttcttcatagtttcactccttaaatcttggctcccctgtcaggggagctgtgagccgcgcggccaatgaccggcggcgcagctgagaggtcaatcatatctcagagcttcaatggggttgaggcgtgcggcacgttttgcaggcaggtagccaaacagcacgccaatgcccaccgagatgccaaaggccacggcaatggagccggcggtgggggtgaccgtaatgggcatatcggtcatgatgacggccaggaccttggtggcaagggctgagacgatgtaccccaggccaatgccaatgataccacccagagcagacgttgtgcccgcctccaccacaaacaggctcaggatcgttctttccttggcacccagtgccttgcggatgccgatctcacgggtgcgctcggtaacagagaccatcatgatgttcatgatgccgatgccgccgaccagcagcgagatggccgcaatggccgtcaggaccgtgaccaccatgttgaccatgctcgtcatcatatccagcatctcgctcaggctgatgaccatatagccgctgtccgagtgaagcagctcctgcaggccattctcaatgatggccttgcccttggagatattctcctcatcggacacaaggaccgcgtaagaactggccgtgctgatgccagagacacgcatggccgtggtgtagggcacaaaaatgcagtcgtcgttgctgccctcctgattggaggggtcgtcgatcttggcttccagcacgcccacaatggtgtaccactctctgccgatcttgatgctctggccaatggcgttgccgccatagcccacccggctgatgtaatcgccaaccatgcagacctttttgttggcgtccatgtccacgtagttcaggggacggccctgcgcgatggtgtagcctcccatgttcagatacacttcgctgacgcctttgacggaggtgttgctgtaactgtcatcgtccgtaccgactttgaccgttccgctcatactgatggagggcgaaacagccccgaggacatccgagtttttttccaccagttcatagaagtccttgactttgacagagcgggagccgtagcccatgatctgcacggtcaggaggttggtgcccatatcggcaaactcgttctggatgctggtggtcataccgttgcccagacccacaatgaccatcacagccatcacgccaatgatgatgcccagcatggtaaggagtgtacggaatttattgctccagatgttctggatagcttcacggaaggtttcgtagatcatacgctgccctcctgtttggtttcattctgtggttttaccgggtccgggatgaccaggttgggctggaccaccgcctccggggcgtgggcgtcgccgtcgtagacgacacgcccatcctccagccggatgatccgctgggcctgcaccgcaatggagttgtcgtgggtgatgagcaccacggtgttcccctgccggtgcagctcctgcagcatccccagcacctcgcggccggtgtggctgtccagcgcgccggtgggctcgtcggccagaatgaccgccgggttacccgccagagcacgtgcaatggagacacgctgctgctggccgccggaaagctggttgggcttgttcttgagcttatcgcccagccctacccgctcaagagaggcggtcgcgcggcgcttgcgctccgccagggggatgcccgcgtacaccagcggcacttccacgttttccagcaggctgagcttgggcagcaggttgtactgctggaagatgaagcccagcatctcgttgcggatctcggccagctcgttcttgttcatcttgcccacatcccggccattgagccgataggtgcccgccgtgggcacgtccaggcagccgatgatgttcatgcaggtggatttgcccgagccggactggccgacgatggccacgaactcgcctttgttgatcttcatggagatatggtcggcagccttgaccgtcgtgtcacccatctggtaatacttgcacacgttgtcaaactcaatgagtgcactcattactggccacctcccgggccgccaccgccaggagcaccgccggggccgccgcccatatcaccgccgtccatcaccagttgtacatccccggcgagggtggtggtgctgtagctggaatcataggccacggtgtcttccgcggtcaggccgctggtgatggcaatgtagtcatcatcgctgacaccggtctccaccttgacgtaaacgtagccgtccggagcggtcatgctgtcatccgcgttggcggtgctgggcgaatccttggttacaaggacgtaattgccgcgggtgatggccgcattgggcaccgagagaacattgtcggcgctctcggtcacgatctctgccgtggcgttcatgccgggcagcaggtcgcccatctcgtcgatgcggatggtaacggggtacgtggtggtaccgccggtggtggtgcctgccttggagatgctggtaaccacgccctcaaaggtctggccggaaacggcatcggcggtaatggtggctttctggccctccttgatgttgaggatgtccagctcgtccacgttcagggtcatttccaggtagctcatatcgtagatgacgcacatggtatcggccgttgccgtgctggtgcccacggtatcccccaccttgacatccttggaaatgatcgtgccgctgatgggagcggtgatggtgtaattgtccacctgcttctgggtgtcttccacagagagctcggcgcgacgcaggttgtcggaggcgttgagcacctgcttggtcaggttattgccagaaagctggagcagggccgtgtcggcgctgacctgagctccctccttgacgcagagagcggagacggtgccgctgttctgggcggtaacgctctgctcacgctggtagctgaaccgagcggaagacagggcgctgacgccgttgatggtggcggtggccgcctgggaagcggtcaggttgccggtgttgcggaccgcgatggtcacggtgcggaccagcaggttgccgctgctgagggtatccgcaccggagacggactgcacgctgccggtgatggcctcaaaggtgctgtccagcagcacctccgcgctctggcccacggcaaagttggcggcgtccgccgccgggaactccagctccagcagcagggtggtgtcgtcccggatggtggcgacttcctgccctgcgttgaccacatcgcctacccgcactttaaaggaagcgacggtgccggcaatgtcggtgcggatgtactgggcgtccacagcgtcatcgtagctgcgctgggcctggccgaggttcagctctgccttttccacgccgctgacgacatcggagctgtcgatggtgtaaaggaccgcgcccttttccaccacatcgcccacctcaaaatccgcggtcaggacatcgcccttgaccgtcgccttgacggtgtagctgttggcggcgttcagcacgcctgattcgctgtacacattggtgatgtcccggttctcgggcgtcacctgggtatacgcggtctccgcattgaccgctttcttctggcccttgggcaccagcagcacaacgaggatggccgcgatgaccagaacggccaccagcttcttcccatttttgtgcaggaagggcttcaggcccttttgcggcatttccgcttcctgtagcgcgatttccagttcttgcggggagcgttcctccgctggcttttttctaaacagcataaacattggcctcctgggtttttttcggggggatggggcttccaaaatgcccctctatatgatacaacggaattatagcagacttttcttcagaaattcccgaggattttcttaaatttggcttaagaatcgcgaacaatttatgaaagcacgtcagaaaccgcgctgacacccgtttccggcgctctcaggtgatgggaaacagcagcgtgatcgcaaactgctctgtcccctgctccacccggcagaccgcgttcatcttttccatcatggtctcaatgctggtcaagcccacctgggtgctttcctcccggtgctggccgggcagcaccgggtttgcaaaacgcaggcccacccacttttcttcctttcgaaaagtaacggagatctcccggccggggtcggcatacttgatggcattggacgtgatgttatcaaaaacgcggcggatatactgcatcttgaccgtcagcatcaggtcctcactgccaaggtccagcgcgcaggcaaagccacgctgctgcaatgtatccaccatctcagccagcggttcctcgaaaatgcgggagaagtaagctggcgggtccaatgtaacgacggtgtcccgggtgacaagggcatactcaaacaggttatcggacagctgtttgagctgccgggccttggtgtcgatcttgttcaggtagtcatccttctgggcgtcgttctcatatttgcggctccggacgatctcggtatacagcagcagcgtggtcagcggggtgcgcaggtcgtgggacatttcggtgatgaggttcttcaccttggcggaggcctttgctttctcctcctgctgctggcgcagggtgacccgcatggagtccaggcagcgggccagcgtcgtcagctcatcctctccccggatggtaatggggtggtcgaggtcgccgccctccatggcctggatctcctcactgagctggatgatatatttcacaatgcggcggcaggcaaaccagaacaccaccagaaacacacccacgcagaaaacgatcagcaatttactgaacaggacccaccagttgagcaccacattgcagaacagctgtacctgggccgggccatccgagaattggacaggataaaacacctgccagctctcaccggattcccgttcctcatccgagccatctccaaaactgaacgaaaagtttgaaccgggttcccgttcctcatcctggccatctccaaaactgaacgaaaagtttgagtagagcatccgatgcccgcggtaaatgttcatcagcaaaaagctctgctgccccacccaatcatcaatggcccgggtgtcttttgcggagatctcctgtgctgtaacgtatttctgaaatcgttccacctgccggacaatggagcgctgctgaatatcggagtggttattgtagtaactcagccccgctcgcgtggcaaacaggagcgcaaaatacagcagaatgcacaccagcgccgataccacctgcaggtggagcatttttgcaacgaggctctgtctgttcatacctgttcctcactcacaaaccggtaccccttgccccacacggtacacacccgcttggggttctgagggtcggcttcaatttttgtccgcaggttgcggatgtggaccatgaccgtgccgttggaagtatagtagtaaggctcgccccacacggtctcatagatcatctccacggagaagatgcgctccgggttctgcatcagcatccgcaggattttatactccgtctcggtcaggtccacttcccgctcttctacccagacccggttgcagtccagcgccagctggacgccattggaaatgagcttcaggttttcgggctgggcagccacctgccctttgccctgatagacgcagtaccgccgcagcagagccttgacccgggcactgagctccgcaaaggagaacggctttggcaggtaatcatcgccgcccgccgtcaggcccagcagcttgtccgattcctgcgattttgccgtcaggaacaggatgggcaccgtggacaccttgcgcagctcctcgcagactcgcagcccgctcatgccgggcatcatgatgtccaggatgaccaggtctacttccgggttgaagatctccagcgcccgggtgccgttttccgcctccaggatatggtagccctccccggccagcaaaatgcgcacaccgtcccggatgtccggatcatcttccgcaatgagtatcgtctgtgccgccatgatcttgtttcctcccatttttcacgtttccagagtttaccgttttcagtatatcagcaacggcccggcttttccattggatttttcttaggaaatcttaatctttgctttagattttgccgtcagacagcacaaaaggccccctgcaccacggcagagggccttgataaaaccgttattcctcgggaaattcttcccgcgcgaccaccacagcccaggggtcttccgggctgcagtctttgcagggcagcacctcgatgcgtacccagacatactttcccgccaccattcggcggcagcggcggatcaccgagcgccgctcccggaacaatgccgcctgaagcagctccagcttcgcctgcgcgcggaactgcgctgcgtcctccgggtggatggctttttcggccaccagctgctcgcagtagctttccagctgaagcgtttcctcttcggaaacacccatcagccgttcgtcccgcttgacgatgcggtattctcctgtaaccagatccaggcgggccagcaccagggcgttatcggccaggatctgaaacgcctgcagtgcaatggcactcttttcgctcacaagaccgcccgtaaaggccttgtaattccggcgggtcatgtcccggcgcaggtcccagtaattttccatggcaggctgcgcaagcagctcctcggcctgtttcacggccatgggcttataaaaatagtacccctgggtgtaaaggcagtccatggactggagcatgaacacctgctcctgcgtctccacgccctcggcgatgatgggcaggttcagccgtctggccatctcgatgaccgattccacgatctgcctgcccttgctgctttcactgtcccgcacgatgaactgcatatccagcttgatggcatccacgctggtattgcggagcatattcagggaggaatagccgctgccaaaatcatccatcagcacggcaaagcccttgcggtggagggccgcgatggtgttttccaccattttcaggttttgggccagcatactctcggtgatctccaccagcagcagtttgggctccagctgatatttctgcaccagctcccagagcacctgcgccacatccagcgccgcgatatccgaaatggagacattgaccgagatgggcaccatgttctcgttccgggctttccagccgtggagcatctggcagacctcttcccacaggtagaggtccagccgggtgatgaggcccgtctcttccatcaggggcacaaactccccgggcgacacgatgccccgggtggggtggttccagcgcaccagcgcttccatccccacaatggcgtgggtcatgctgttgcacttgggctgtaagtaaaagcagaattccttgttctgcagcgcccgctcgatctcaatgagcaactgctggcgctgcttgagcttttcccgcatggagggactgtactgctcccagttgcagcccgcctcatccagcttgaaatgctccacatccacggccgccatacacaagcgccgttccgcgttttcccgcaaaaaatcttccagttcctctaaaagcgcatcttttgatccctgctgtgccaagcccttttctccgcacgtttccagctttgccatagttcgtttgcttccttccggtcaacgtctgatggtgtctgtttctttctttgaacaatcataacacgaaacgcttttcggcgcaaccccgttcaagaaatggtactgcatatcctcacatttttgtgcattttatgcgccatttcaaacaccttttgggagcgctctccgctgccgcctgtttttggtaaaaaagcaccccagagccgcagcatctctgcagctccggagtgcttttctcgtttttgttattcggtgcggtcggtcagcacaaaggtcagctcggcagtggcggcacatttgccgtccacataggcggacgccttgccgatgcccaccgggccccgctgttccaccagctcacagtggagggtgagcacatcccccggcgtgacctgtttgcggaagcgtgcattcttgatgccgccaaagagggccagtttgcccgcgttttccggcaggctgagagccgcgacggccccggtctgagccagcgcttccaggatgaggacgcccggcatgacaggctggcctgggaagtggccgcagaaaaattcctcattgcgggaaacacacttgcggccgatggcccactggcccggttcatagtccaggatgcggtccaccagtgcaaacgggtagcggtgcggcaggatggccgcgatctgctccgaggtgaggctgtttgcgttttcacgcgcggtgcgaggttccgccatggttcagccctcccacttgcgcagcagcaggcaggcgttgtggccgccaaagcccaggctgttgctcaacgcgtaggtcatggacatttcccggcccacattgggcacatagtccaggtcacactccgggtccggctgctcatagtggatggtgggcggggcgaactggtcccgcagggccagcgccgtgaacaccgcttccacaccgccggcaccgcccagcaggtggcccgtcatgctcttggtagagacaaccgccagctccttggcgtgctcgccgaacaccgcatggatggcagccgtctcacagctgtcgttcatgtgggtgcccgtgccgtgggcgttgatgtgatccacctgctccggggcaacgccggcgt

SEQ ID NO: 571 - DNA, 10940 bp, unidentified
  source 1..10940: mol_type = unassigned DNA
ctgccggagcggtgcttaagccgcaaggcgggaattgtgcggtgttgccataaagcaaaagttgacttttgtgctgatttcgaatacgatataggcacaaaagtatggtggtaccagtggcgaatataagtagctcggcacaggtgcaggagattctgacccgcgcagcttgcggagcattcgccaatggtggggaggcggcagaatgaattctttttcggtagagcaaaaaagagtagatgtattcgaaagtgccgcgccaaacaagccggtgatttatctgaatacctatgggtgcgagggagcgcagatctttcagtatttgacagacatcggctgtcaggatttttcgctggttgcagtcagtaagctggaatggaatcgtgatatggtgccatgggatattccgcccatattcaaaaatggtgcatcatataccagcggagccgatgagtacctgcgccttctgataaaccaaattataccgaaagcagaaagtctgttgcaggggacccccgcctggcggggaattgcgggatattcactggccggactgtttgcactgtattctatttatcagacggacgccttttcgcgagttgcgagtgtctccggctcgctgtggtttccgggaattaaagagtatgtcgtttcccgtacacccgtgaaaaaacctgccgatatcttcttttcgctgggcgaccgggagtgccgcacccagaattcgcttctaagatgtgttcagcagaataccgaatccatcgaaagatattaccacgagcagggaatagatacgaccttccaattaaatcccggcaatcactttaaagatgtggtacagcgaacagcggcaggacttcagtggttattgagcagagaatatgacccatgaaagatgcagcataatgggatataaagttttgtgggcgcggcatactacatgacatatgtatcgcaagagacatcgtagaaaatttgcgaagttttgtgcactgattagttagctcaaacagctattccgtaatctaaattgcttataaaagaatcaccgcacaattctaagagccgctgcggctgtgtttagaattgtgtggtgatgtttttatccagctaacgcccacgcgcccataagaaccgtcacaaacaggatgttggaaactgtgaacaacgcaaaataccggcctttttgtaacggtaactcccttgcaatttcgcgatacgagatcaggctggccattgaggcaatcagcgtgccaaggccgccaagatttgtgccgatgatcagggagcggatattctctgtaaatcccgaaagcaggatcgccgcaggcacattgctggttacctgtgaggcaagcacagaaacccatacctcgtggccggtaagaatatgctgcagccatccggaaaaggcggcaaaacgccccagattgccaataaagataaagagcgcaacaaaggtaaggatcagcgaatagtccacacggcataacgtgttccggtctgccaaaagcacacaggccagaaccgcagcaaacgcgataccatagggcagaacacgcagtaccaccaacagacagagcacaaataaaatactgtacagcgataatagtgccttgttcgggcttgcagcagccgcagaatgagccatggagatctttgcgccacggcggcacagccccaccgcccatagcgcaagaagtgccagcgacaggatggagtaggggagcatcagcaaaacaaaagaacccatatccattccgctttttccatacaggtacaggttttgcggattaccaagaggtgttagcatactgccgaggtttgcggctatcgtctgcatgcagacgatgggaagcagcagcttatcccgaacggcagcatccaagctgtttacaacaacaaatgtgaacggaacaaaggtaagcagcgatacatcattagtgatcaccatgcttgagaaaaagcacagccccaccagaacagcggtcagctgaagcgttgtgcgggtatgggacagcagcgcgcgcccaagccgatcgaaaacgccctgcccccgcagcccggccatgacggtcatgagtgagaacaggatcgcaagcgtgcgaaaatcaatataaccaagatattctgcatccggaagaacgaagcaggatgaaaccaaagccagacaggcagcaatgcttagaacaggctctttttgaaaaacgcgttttatcgccatggcaggaagctcttttccgtaaatttcaatttcaaatgctgtgccgcatacgacagcaaaccattgcttgaaatttgtcacattattatacaataaaagccaatccggcacaagagcagtcaacactttaaatatcatcccaatcactaagaggaaattccccaagtacttttttcaacgcttgcaaataaaggcggatttacgcctgagtttgcaggcgtttttatctataggtggcggaattgtcaatagacggagcgggggagtgccctcacccaaagtattgcattgcgtctacctgtcagcagcaatggcagcgctgcaggggatgatgctgtgcgaatttttgcatgatgttcgcttctggtatagagaataagagatcagcataattagataaatatttttacctaacaatattgacatacaagacaaatgtgatataatagccttgttgacaattgagtcaatatttttagataaataattacgaggtataaatcatgagctttgaagaactgaaagaagtatttgttgataccctgaactgcgatgcagacaaagttacgatggaagccagcctgaccgaggacctgcaggcggatagcctggacgcggtggagctgaacatggcgtttgaggacaagtttggcatcacgattgccgatgaggacctgggaacgctcaagactgtgggtgatatcttcaactatctggttgcgcgggcagcctaaagggtattagggatgaatgccattgaaaagctgttcccggtcagccagcaggagcgcagcttccagctgaaagtccgccgcgatgctggtacggctgcgcccggctgggtgcagccgcaatttgttgaatgtaaaaaatgcggccgccgcgccacccgccaggtctggaccaaaagcctgtatgtatgccccaattgcggggtacatctgcccattggagcctattaccggctcagcacgattttggaccacggaacctttaaggaactgaatccagaccttgcccccaacgatgtgctgcagtttcccgattatcaggaaaagttggccgctgcttcggtcaaaacgggcctgaaagaagctgccgtcaccgcaaccggcaggatcgggggcgtgcaggcggtggcagctgtgctggacagtcgattttttatgggcagcatgagcactgccgtgggggagaaaatcacccgtgcaatcgaatatgctgctgataaacggctcccgctggttattttttctgccagcggtggagcgcggatgcaggagggcattttcagcctgatgcaaatggcaaaaaccagtgccgcgctggaacggttcagccgcagcggcgggctgtatgtcagtgtgctgacccaccccaccaccggcggtgtcacagccagttttgccagcctgggagacatcacgctggccgaaccgggtgcgctgatcgggtttgccgggccgcgtgtgattgaacagaccatcggagaaaagctgcccgatggtttccagcgcagtgagttccagctggaacacggctttgtggatcaggttgtgccgcgcactgaattaaaagaggttttgacgcggattttgcagctccatacacaggggaggaaatgcagatgatcaaagaggttttgcagcagctggaaccgctggacgcgcagattgatgcattgtgtagcagcaccgatgatgccgaaatggcgaatacgactacccatgccgctgagctggcagagctttccgcgcaggaaaacatgcttttgcagcgctgcacatcactgacgccggaggacagagtttttctggcgcgccgccctgaccgcccgcatatcggcgaaatcatcgacaacctgtttaccgacttttttgagcagtgcggtgaccggcaatgcaaggaggacgcggccattttgtgcggtatcgcgcgattccatgggatgcccgttacggttttggggcaccgcaaaggaacgacgctggaagaaaacctgcgctgcaactttggcatgccgggaccggaaggctaccgaaaggcgctgcgcgtgatgaagcaggcggaaaaattcaggcggcccatcatcacatttattgatacccccggtgcttaccccggtaaggatgccgaggagcgcggccagggggaggccatcgcccgcaacctgatggagatgagcggtctgaccgtcccggtactggccatcgttacgggcgaaggctccagcggcggcgcactggggcttggcgttgccaaccatattctgatgctggaaaacgccgtgtattcggtgttgagccccgaaggatttgccagcattttgtggaaagatgcctcccgcagcggcgaagcctgtaccatgatgaaactgacggcgcaggacttgtatacggatggaattgtggaagagatcatcgccgaaccgctgggtggtgcacagcgcgggcggcagctgcttttcagccggttggataccgccattgccgcgcaccttgccgccttgtgcaagatgagtggaaaggcattggccgaccagagatacaaaaaataccgccgtatcggagaaatgaggggagcatgaaaggcttacagctgctggccaccggcggggcactgcccggccgtgtagtgacgaatgaggatttgagccgacaggtggacaccagcgatgaatggatcacgacccgcaccggcatccgccagcggtattactgcaccgaaagtgaggatgccgccacgctggccattgccgccgcccgccaggccttggcgcgtagcgggctggcagcaagcgagattgcctgctgcgttgcggcaacgctttcggctccaacggctacccccagtgttgcctgccgtgtgcaggcggccttggggctgcctgagaaccggcccgcttttgatgtaaatgcagcttgttccggttttatttatgctattgctgcggcccacgggctgctgaacaccctgggcggacgctatgcgttggtcatcggctgcgaagcgctgtcccgcatggtggacccgaccgaccgcacaacctgcgtactgtttggggatggcgctggtgcggctattctggaactggccgaagatgtgccgtttgccgtcacgttgggcgcgcgggggagcgaagccatccgtgtcggcggccccgcagcctgcgatacggccccgatcacgatggatggcaaagcggtctttcgttttgcggtggaaaccatgccgcgttgcctgcaaaccgtgttggagcgcagccaaaagaccttggctgacctggattgggtcgtctgccatcaggccaatagccgcattattgaccattgcatcaaacacttgcacgcagaaccgtcaaaattttataaaaatatggaccgccatggaaataccagtgctgccagcattcccattgccctgcatgaaatggtggaaaatgatttattgcaccccggccagaccctggcctgcatcggttttggcggcgggctgacctggggcggaatgttgctgacgtatgagggtagaaaatgaagctgctcaatgaaattttaggtacgaaatatcccattatccaaggtggaatggccaatatcgccacgggcgaatttgccgctgcctgctctaacgccggggcgctgggcctgatcggttccggcggtatggatgccgatgccctgagggaaaacatccgccactgccgtgcgctgaccgaccagccttttggtgtcaacatcatgctgatgcacccgcaggcagatgaatttgccaaaatcgtggtggaagaaggcgtaaagatcgtcaccaccggggcaggaaatccaggaaagtacatggcaatgtggaaagcagccggcatcacggttatcccggtggtagctgccgcaatcttagccaaacacctggaaccgcttggcattgacgctgtcattgctgaggggacagagagcggcggccatgtgggggaaatgaccacaatggcgctggtgccgcaggtcgttgatgccgtccacgtgccggtcattgccgcgggcggcattgctgacgggcgcggtttggccgcagcgctggcgctgggggcctgcggcgtgcaggtcggcacctgtctgctggccagtaccgagtgccccatccacgaaaactacaaggcagcgctgctgaaagcccgcgacagcgataccattgtgaccgggcggatcggcggcaccccggtgcgtgtgttgaaaaaccgaatgagccgcgagtatgtccggcaggaaaaagccggggccgacaaaatggcgctggaatgctttacgcttggaagtctgcgaaaggctgtgtttgacggcgacaccgaaaacggaagcctgatggccggacaggccgcggggctgctgcatgaagtccgcccggtagaagagatttttgccgcaatggtaagcgaggcaaagacctgcatcacggggttgtacaaggagaccatctgatgaaactagcatttttatacgctgggcagggcagtcagcatgccggtatgggccaggacctttatgaaacctttcctgccttccgcgccgcctttgacgaagctgccgcagcggtggattttgatttgaaagaagtctgctttaccgacgcggcgggcgtactgaaggaaacgcaatacacccagccttgtatgacagcttttgccgccggtcttaccgctgtgctgcgggagcagggcattatgccggactatgcggcaggcctgtccctgggggagtattccgctttggcctgtgcgggggtgttcgatatgcagacagcggtcgctctaacggctttccgtggcaaagcgatggctgctgccgctgccgggcgcacctgtgggatgacagccgttttgggattggatgaaacatccttgcaggcatgttgcagcgcagccgccgaagagggcgttgtacagatctgcaattacaactgtcccggccagctggttatcggcggcgagaaagctgctgtagacaaagctgccgacctggcgcttgccgctggggcgcggcgctgcctgccgctgaacgtcagcggtgcgttccatacgctgctgatgcaccccgccggagatgcgctgcgggaaaagttccaatccatccattttgcgccgatgcagttcccggtgctgttcaactgccttgggcatgaaatggcacagaatgacacggtcgccacgctgctggaaaaacaggtgcagtccggcgtacgttgggaagccaccgtccgccgtttggcggaacttggggtggataccgctattgagatcggccccggcagggtgttgaccggatttgtgaaaaagacggtgggaaatgctatctcgtgctatccggtggaaactgctgcacagctgcaacagttgctttgcaccatgaaaggagcctgaccatgccgcaaaccgaaaacatgcgccgtgccgctctggttacgggcggcgccaagggcattggtcgtgccgtctgccttgcattggccgaaaacggcatgaacattgcagtcaactacgcaggcagcgcagccgcggccgaggaaacagcggctgcctgccgcgcctttggtgtgcaggccatcacgctgcaagcggatgtgcgcagccccgaagcctgccagaatctggtggaagataccgctgccgcttttgggcggatcgatgtactggtcaacaatgcgggcatcaccgcggataaactgctgatgcgcatgaccgaatccgactttgacaatgtgctttttaccaacctgaaggggacgtttttctgcaccaaagcagcttcccgcttgatgatgcgccagcggtatgggcgtatcatcaatatcagcagtgtggtcggcctgcacgggaacgcgggccaggccaactatgccgccagcaaggcggggctgatcggcctaacgaaaagcgttgccaaagagtacgccgcacgcaatattaccgccaatgcggtggcacctggatttattgaaaccgatatgaccgccgctatgccggaatctgcccgcgccgcagccgcagcggccatcccggcaggcagaatcggccgtgctgaagatgttgccgcggcggtggctttcctggccggggaacaggccggttacatcaccgggcaggttctttgtgttgacggcggaatgggaatgtgaggtgcagctatgaagatagaaaagaaacgccgggtcgttatcaccggccttggcacggtaaacccaaccggcaataccgtggcggaaagctgggccgccgtgaaagctggccgctgcgccgttgggccgatcacggcttttgatacaacggattttaaggtgaaactggccgcagaagtcaaagattttgaccctgccgaacgtattgaccggcgcgaagcccgcaaaatggcgcggtttacccagtttgccgtggccgccgctgatgaagccatccacgacagcggcattgcactggaaaatatcgaccacacacgattcggcgtgatcctgtccagcgggatcggtggtctgcccacgatcgaggaagaacacacccgcggccagcagcggggctttgaaaaggtcagcccctactttgtccccatgtccatcggcaatatggcggcagggcaggtggccatccgctttggcctgcagggtatgtgcagctgccccaccactgcctgcgcaggcggtaccaatgcgattggggatgcgtttcaccgtatccgcgatggatacgaggaccgtatgctctgcggcggcagcgaaagctgcatcagcccgttgggggtgggcggcttcgccagcatgaaagccctctgcaccgcagacgacccggcccgggcttcgatcccctttgatgcccggcgcagcggttttgtgatgggcgagggcagcggcgtgctgctgttggaagaactggagaccgctaaagagcgtggcgctaagatttacgccgaggttgtgggctatggcgctaactgcgatgcttaccattttaccgctccggcaccgggcggtgcaggcggcgcgtcctgtatgcggctggcattggctgatggcggagtggagccggaacagattggctacatcaatgcccatggaacttccacgcatctgaatgacagctgtgagaccgcggccatcaagtcggtttttggcagccacgcgtatgagctggccgtatcctcgaccaagtcgatgaccggccacctgctaggcggtgccggcggggtagagggcgtgtttaccgtgctggccctgcatgatgcctttttgcccgctaccgtcaacctgcaggagccggacccggaactggatctcgactatattcccaaccagggccgcgcgttacaggtggattatgccatgagcgacagcctgggcttcggcggccacaacgcctgtgtggtgttcaagcgttgggaggaatgaggatgaactatacacccaatgaaccgccccggaccctgacggcggcggaaatcgaaaagatcctgccgcaccgttacccgtttgctctggtggataagattcttgactatacccccggccagtgggcgcgcggaatcaagtgcgtgacccgcacagagtcgtttttccagggacatttccccggccatccggttatgccgggggtgttgattctggaagcccttgcccaaaccggcgcggtggccgcgttgagcctgccggaaaaccgtggaaagattgccctgtttggcggggtaaaaaatgcccgtttccgccgccaggttgtgcccggcgatgtgctgactttggaatgtgagctggtagagcagcatggcccggtgggcatcggcaaagccaccgcctgggtggatggtgtgcgcgcggccaacgccgagctgacatttgttatcacggatgcctgagggctggttttgcatggtggattgtgctataataaattcattaacctacagggggattctcgccatgctggatcagacatttgggcaggtatacacaaaattcaagctgcatttttataaacagatcttcaaccgttttgaagaccgtgaagccacgctgacgacggtagaatctttctgcatggaagtcatcatggcactgggggaacccacgattgcgcagttcagccacatgatgaatctttccacccccaacgcagcttataagatcaactccctggtcaaaaaaggctatgtggagcgcatccaatccaccaccgataagcgggaataccgcctgcggccgacccaaaagtacattgattactataacatcagctattcttacctgcatctggtcatggagcgtgccaaacagcggttcagccccgatgacctggccaagctggaagaaatgctgcagatcgtatccgatgaactgatgccggaaattcagctgccgaaataaaatatacattacgataacaaaatgcgaaccacttcgtacaacgtggttcgcattttgtatttatatgattattctgttggtaactcttggaccttttgaacagattgatgccagccgtacaggacattacaaaagaacaatctcgccaaaatcaataatccatatcaaacaggtgggccatcgggacagcgtcttcccgttcagcggtcagctttttcaaacgcagcgggtccgtattccagcgtgccgacagtggctgcctttttaaggcaacaccgcacaattcccgccttgcggcttaagcaccgcttcggcggctgcg

SEQ ID NO: 572 - DNA, 9377 bp, unidentified
  source 1..9377: mol_type = unassigned DNA
ttatttctgtgcaaaaaagtctttgaccacctgcaccacggctgcgcggtcggcttcggtcagaccatagtacagcggcaggcgggtcaggcggttgctttccttggtagtgtactcatccacaccggcaaagcggccgtattggatgcccgccggggcgctgtgcagcggcacataatggaaagacgatgccacaccgtgggctttcaaataagcaataaacgcggtgcgctgttccaggtctcgcagcttgacatagaacaaatgcccgttatgcacacagccttccggcacggtgggcagctccaataggcctgcttcagccagcggtgccagctcctgtgcgtaataatcccagctgtgggtacggtctgtattgatggtatcggcctgttccagctgtgcccacaggtaagcggcattcagatcactgggcaggtagctggagccataagaaacccaggtatatttatctacctggccgcgcagaaaactggcgcggttggtacccttttcccgcaggatttcggccttggtcacggtctcggggtcattgatgaccagcgcgcccccctctcccattgagaagttcttcgtctcatggaaagagtagcagccaaaatcaccgatggtgcccagtgccctgcccttatagctggccatcactccctgggcggcatcttccaccaccttcaggttatggcggcgcgcaatctgcatgatggtatccatattgcaggccacaccggcatagtgcatcacgcagatgactttggttttttcggtaatggcgggttcaatttttgcttcatcaatgttcatggtgtccgggcggatatccacaaacaccagcttggccccagctaaaacaaaggccgttgccgtggaagaaaatgtgtagctgggcaggatcacctcgtcgccgggctggatgccgcacagcagggcagccatttccagcgcggtggtaccgctggtggtcagcagcaccttgcccgcatggaaccgctgttccatccattcatcacagcggcgggtaaaagggccatcgccgcagattttattgtttgccatggcctggcgcatatagtccagctctgtaccaacctgcgggggaatattaaaaggaatcattgttttactgtcaactcgcaatctattgtaaccatccggccgttatcactgggcgcggacaacatcactttccggcgtttcgggttcaaaattcagccgcttttcttccaccaccagggggcggtccataatacgggcgttcattgccatgatgtactcgcccaaaaatcccagaaaggtcagctgcacaccacccacaaagaacacggcaataatcatcggggcataacccgcagcaaaggtattccagtggatcagctttgccaccaggaacacaagccccaggataaagctgaccgccgcgcagaaaaagccgaagaactccgccatccgcatcccaatcttggtgtagctggtaaagctgagcatggcggcatcaaacaggctgtaccagttgttgtgggtcttgcctgcccggcgcttgggctgggtgtattcaatctccttgcgctcggggccaagctccgccacaatcccgcgcaaaaacggggtggggtcgtgcaaatcacgcagggtttggataaagcttttatcgtacaggccaaacccggtaaactgctcgatcatttccacattgctcatctttttgatggttttgtagtaacagtcccgcaaaaagtacatgacagggttttcctggctggtggtctttttgccgattacaattttgtagcctttttcccattcagccacaaactttggaatcatctccaccgggtcctggaagtccgcgcagatggtaatggtgcagtcccctgtggtatggatcataccgtaataggggctgttgaactgaccaaagttcttgctgttaaaaatggctttgaccttggggtcctgcgcgcagatgtccgtaatgatccggcgggtacgatcctggcttttattatcaataaaaaggatctcatagtcataatccgggcagtccttccgaatctcatcccgcaccgcctcatagatggggcgggcgttctcctcctcgttataggtagggatcataacagagatgacttttttcttctcgctcatgcaggtttcattcctttaagtttagtctttggcccactgccgcaatagccgggcagacccttatcactatacactattttgcaaaataggtaaagaacaatttattttcgcagttttgcgtttcaaagttcaggcttacagggcggtccgccagggtgtagggctcctcgttttccaggcagaaagtcccctctttggcaacgtggcagatgccgcggtaaatttccatagccggggtgcaggcaccgatcagcagcgttgccgccagcagaatggtcacggcatgctgtgcaagcgtaccgtcccgccatttggtgcccaccaaggcgataaagtaccgggcacagagggtcatcaggataaagatagccgggatggacacccgcatgcagaaatcgcacccctgtcccaccttaaagaacggaatgatgaagagcgacacggcgcaggtataaaacagccagctgcggcggttctgccgccagagcagcagcagatagatgccggcatccagcaggtaaaataccagcatgcctttttgcaggctggtcagaacgttttggccaaaagtctgctgcgctgcctggttcccggcgacagtttcgcccagaacgctgtagccaaaggcgttattggccaaaaaataactggccgtaatgctgagcaccacaaccagcaccagcacattggccggggagaacgccgattgcagcacgcctttttgacgctgtgccagcagaacaatgccgcgcaccaccataaaaataaccagccccacaaatgggaaggggccgcacatcaggcaggccgtgcccagcagcaggtagttgcggcagtctttctcctgcaaaaagcagacggttgccagccatgcccccactgtctggttgaacacccagaacaggcaggtcgtcagggagctgaactggaaatcattcgtccaccattccaggtgcatagcgtcataggccagcaggtccggcagtcggctgctgtacagtgcgcccagaatatccatgccgctgaagaaaatcaaaaacagcaggccgatcccctgctttttgccggtatcggcacgcaggtagaccaagaaattcagcgccgccaaataggtgcccagcgccgtccacccccaaagggccatacgggcgaacatccaggcggcatccagcccaaacagggcgtataccggtttggtcagcgccgccgggaccagccagtgcccgatgtaatacaccagcgccgtatccttttgcgggtaatacaccggccagctgtttgtgatcagatcccggtaaatggcgttgcggtaaccccagtccgagttctggtaaaaaaagcccgtctgaccgcccaggtagccccacaacagcatcagggcaaacagcagcaccagctttggcaccgaaagcgtaatgccctgctcttcttgccccacttgattaacctgcggcgttttgcacacggcataccaccaggcaaaggccagcacggccaggcccgcaacggcaaacggcgcgcggagataccccgcaaaaaacaccgccagcggcgcggtgagataggataaggcaaacggctttaacttttggtaggtcaactgcataaatactgtctggctcctgttcgtccatgcgggtcctgcccgcacggacggagttattccttaggcaacaccgcacaattcccgccttgcggcttaagcaccgctccggcagctgcggcacggcatctgccgcacctcgctcgccgtatcggcacttagaattatgcggtattgcccttattggcttaattggtttgcttttgcgtttttgcccacgcaatggtggcgcggatgccatcggcaaaggcggtgcgcggcgcaaagccggtatccgccgcaagctgggtgatatccgcctgcaaaaacatgacctgctgcggcccgtaagggattttgcccaggccaagcggcagggccaggtcgatggcatcacgcagggtctcaatatattcccgcagggggcgggcggtgccgctgcccaccgggtacacggcaccgctgcggccatggcaggccatgcggtacagtgcatccgcagcatcggcggagtaaagataatcccacttctgctcccctgccgtcaggtccgggcactgcccggccagcagtttttggatggtggcggagatcatcgtgttggggccgtcatgcgggccgtaaaccgaaaggatacgcgcccacacatggtccatgcccagagcggcggcctcggtacggctcatctggcctgcacacagcttggccatgccgtacccgttttcggggtttgtgggggtatcggcccgcagaacaccgtccacacggccatactctgcctggctgccggtaccaacaaacacacggcagcccattgccgccgcggtgcgcacggcatcaatggtatagcggatattctcaatctgagccggcatatcattgcggcccgcgccaatggtgtgcgcccacgccaggtggaaaaaggcatccgcctgcacgggcagcccggctgcggccatgcactgcggcaaatccgccaggttggcggcatcgcaggcaactacatacaggtttgcatccttgggcagcgctacggcccgcgggctgccggggcggcagaccgccaccacggtacacccggcctgcagcagccggctgcacaatgctgtacccacggccccggtggggccggttacgattacggttttaatgttacgttctatcatcattcactgctccggcaccaaggggataaacatctgcttttccagctcttcccgcggcaggaacggtgccaggtcctccagcggcgggctgaccagtgtgccgtccggcaggcgcttggtggcgctcttcggctcccagacctgctgggtatcggtaaagatctcgcagaaagtcgggccttctgcggcaagggcggcatccaccacctgtttcatctcagcgttggaatgtgcgcaggaatacgggtagccgaacgcttcggcaattttgcggaactccgggaaggacagatccccgctctccggcccaatgccgatcttgcaatggtctttgaacaggttgttctgggtcaggcggatggagtggtagccgttattgttgatgaggaaaatcttgatcggcagcttatttgtcaggatggtctgcaattcctgcaggttcatcatgatagagccatcgccttccaggcagatggtggtacggcggccgcctgcaatgcaagtgccaatggcggcgggcaggccgtaacccatgctggcaatggcgctgttgttggccatgcggctgcctttttggatgacatacgcctgattgcccaccacgcagcaggcgccgttggaaactgcggtcaggctgttttccggcaggcgggaactgaggtagcgcacaaaggcgtacacattggcggtggtgccgttttcttcccactggcgcggcagcacggcggggtaatcttttttccatcgctggcaggttgccagccagtccgctgcctggctgacaggggtcagcggcgttgcggcggcatccagcttttgcagaaagtccttggcatccgcccacacggggtgctccacatgcagggtgtgctttttcatctcggcgcggtcaatatccaccatgatgacttccgccgcgcgggcccaggttttccagttatagcccacctggcggatggaaatgcgggtgcccacagccagaatcaggtctgcgttctggatggcccagttgccagggcggtcgcccatattgccggcacgaccgcagtaaagcgggttttcgtcctcgatcaggtccacggcgttccagtaggtcacaatggggatgttcagcttttccgccacggcgcggaacgctgcgtacccgccggaaagccggatgccgtatccggcgtggaacaccgggcgcttggcgtggcggatcttttccagcaccatctgcacggtggcatcgtccaccgggggcggcagccgggcatcgtcctgcgccgggtcatagccgggcaggctgtcggtttcaatgtagccgccctgatagttgaccgggatatcgatccacaccgggccggggcggccggtggttgccagatgccaggctttttccagcacataacggatctggttcgggtcttccagcatggtggcgtatttggtcatgggggcaacagatttggtgatatcgtattcctggtcgcccaccgcgcgcaggggcaggccatcggtaaactgcgcggcatagcgggccgtggtatcgtaccgaacctggccggagattacaaacatagggatagaatccagccagccgcccaccacaccggtcagggcgttggtgccgccggggccggtggtaacgcacagggcggcaattttgttatcaatgcgggcgtatgcttccgccgcaatggcacttgcctgctcgtgatggttataggtaacatgcagcgccgggtggtggcccagtgcatcattcagatgcatggcgccgccgcccaccacgctgaacacatccgtaacgccgtgcgccgcaagaaaatcggccacataatcggccagacgctgtttcattgagagtgtcctccttttatttaatccgttcaagctgcggctgaaccattacaaaatacaaagttctggaatcctgcggggcatcgacccgcttgccgctgtagctaatatcgattgtactttcaccaaaaggaatatccacggtatagcggattttcatgttttcctggctgaccacaaaggtctggctactgtcaccgaaggtaatggtaatgctggggcggtcagaaatatcaaagaaataatcccccactgtaaaggtaaatgtgtacctttccgtattcagctgcgggtttaccagtttgatctccgcacttttcttgcaccagtaaaacggcagctctttgttggagttttcaggagtataatattctgtgttataaatgccatcccccagctgcatggtaatagacggcacattatacagcacccacacgccatagaaaacggcaagggaaactgccaatgcccccagtgaagcgccgaaagtaaccagcgtgctgcgcgcagcttttttatctagttttgattgttcaggctttttggttttcagcgctgccaacacacaatttactgcctgtacaacgccccagatgatagctgtcagtattgccaactgtacaatggtgttgcgaatataagagttacgctcttcaaagattggaagcggcagattaaataccatcaaaaccgcaaaaggcaatatattttgacgtgtcatcaccttttcctgtgcaagaaaatacgccagcggaatcagcgccatgcagtaaatatagttgccctggctttggtacatcatagccacggtaatcagcagcaacgcctgccattcctggcggcagagcagagcacacacaaccagtaccgccgccacagcaaaggctgctgcaaaaaaagataccgttgcattgctggttccggcaatcaggtccaccagatgcgccccatgtgcgaacatgctgttgatgccattgcctgcccaaggtgttttacttttacttccaaaagagaacaaaatcttcagccaaagctgcaagccgtacacgccctcctggaaggcaaacaccgggagcaccaacgctgcaatgccataaaacaccgtgcggattgctgctttgaaatcccggtttcttaaaagcataacacctaagaatgcgggataaattttaagtccggctgctactgccagtgcaaccaatgccagttcccgcacccatgcgcgctttgaacggtgatacatgacgaaaaaaagcgaaagtcccgccgccagcaaaataatattgccgcggtctaccgcattaagcacaccaaagctgaacaaggcaaaaaacgtactggccctggcccactgggcattttgcatcacgtcacggagcaaaaccgccagcaaaagaaccgccagcaccacaaaaaagacgtatagcaaaaagcacgactgtgttgtgcgtaaatcagtttctgtgccgcgcatggcaactgacgcctcaaagtcataggtccagttatcagataccgaagcaggcaccagtaaaaacagggcataaaagaacaaatttgccaagggcggatacagtgtgtcaaacaccgcatacggctggcgtccacgaacatattcaatgctatggaaaaaatccatgccggcatccagtgtatcatggtataaaaagtacgaaagaaaatcaccatgggtaacatacagcgttaccataaccacaatggcacacactgcgctgagtacacagtacagcttggccgtttttttccagaacggattgctccctctttcttttttaccaaaaaggccttttccccgtttcgtgttattctctttcagcacgcgctggctgttgcattcattctggccataattcagtcccagctgcaccgatttgttatcttccggcaacagctgatctaatccaatgctgataccagatttattctcgttatttgttgtcatgttgtccatacacagccttgccctatttctgttcccggttatgtatcagatattccctggtttcccatattttttaccgatatattttgcagtcttattttcaacaataaagcaccgccaaccaacctcgttgagtcggatgatggttagggatcccgataccgcacttttccgtgccggataagctccacatcgttgacgggaaacattttgtcgtttatctttccttaaatgtccacaacttgttgatgataaaattcagcggaatcgtgaccagcaaatttacaatcggcgcaatcgttttgctgacgctgaagaacgcaacctctatccaaagcaaaacattagaaaggatcgacgtgccgccgtagctgacatatgtttttccaaggcgtttcagtttactgcgccaatcgtttgcattcccggtaaacacaaacttatcgttccaaaaaaaggcattggcaatgctcagaattgttcccagaacgctgcctaccatatacaggtctgggctgatccacaaaaagatataatacaccgccatcgataccgccgtgttgcttacgccaacaaggccaaacttgataaactgtgcaagcagcgcaacaaattcctttttgctttttgctcccaacagtgccaacaatttctgcat

SEQ ID NO: 573 - DNA, 7531 bp, unidentified
  source 1..7531: mol_type = unassigned DNA
cccgcgcgccccgcagccccggccgccgcgagatcggccacggcgcactggccgagcgtgctctcgtgcccgtgctgccctctctggaggagttcccctacaccatccgctgcgtgtctgaggtcctgagctccaacggctccacctctcaggcttccatctgcggctccacgctggccctgatggatgcaggcgtgcccatcaaggcccccgtggccggcatctcctgcggcctgatcaccgagggcgaccgctggatgaccatgctggacatccagggcgtcgaggacttccacggcgatatggacttcaaggtgggcggtacccgcaagggcatcacggccattcagatggacattaagatcgacggcctgacctatgacatcattgccgaggcattcgagaagtgccgcaagggccgcctctacatcctggacgagatcatcaagcccgtcatcgcgcagccccgtgaggagctgagccgctgggcacccaagatgttcagcatgatgatccccaccgataagatcaaggacgtcatcggcaagggcggcaaggtcatccaggacatctgcgcgacctgcaactgcaagatcgacgtgcaggaggacggccacgtcttcgtctccgccgtcgatcaggaggacgcaaagcgcgccatcttcaccatcaagaccattgtggaagaccccgagatcggtgccatctacaagggcaaagtcacccgcctgatgaacttcggcgcgttcgttgagatcgccccgggcaaagagggcctggtgcacatctccaagctggacaccaagcgtgtcgagcgcgtggaggatgtggttgccgtgggcgacgccatcgtcgtcaaggtcaccgatatcgaccagcagggccgcatcaacctcagccgccgcgacgccattctggctctggaagccaagaagaacgcccagcagtaaggctgtaacctgaaataaaagcagaaacctcccgttcagcaggaattgttgaacgggaggtttttcataatttcggcttcagaccaccttgatgggatgacggatgaccgtcttctgcttttcgggagcggtttttctggggtcggacaaataaatctcgtgatgcagacggctggcggtcaggtcgttttcatagccgttctgtgccagataggcgtccatctgcgcaacgcttgcgggttcggcgtcatacgagccgatatgcatgatctgcacacacaatccctcgtcgattgtccggaactctgccggggaacagtccagcttcttctttttggaagcggtctccacggcccagtcaaaatccgcttttgtcacaaaatccggcaggcggatcacggagatccagtggaaagcggatttatctgtataatccacaccggtcacgccattctgccaccagaagccctccagcggcgggacgacgtattcaaaaaatccatcgatcttgcggccggtcttgtagctcattttcagggtgtaggcaactgcatacagaatgcggatggcgctttgataagcgccgccctcctcgttggggtcgccgctgccctgcaccgcgatgtagtttgccgccggaaccgtcacgatctccggtttgttcttgggcagataaaattctttgtactcttttttgaaatcaaatggcatggcgttcctccattatttcagaaaaaatttcgggcttcttccagatcgtttacataaagggcgatgtgttcgattttcatgggaaaccacctttccggagagaagtgtcagtacttcaaattgacaactataatttgttgattcgattataacatactactttgcggaacgcaacactgaaatacaatatcaaaagccagagcaccacggtaacgggtgctctggcttttgatatatgatttgttataagcaagtgggagtattataccgcccgatgaagtgctactgtactctgtgaaaaaacgtccggactaaacttccgtccttgctgttcgtttcacagtgtgttaaactaaactgaaagaaattgttgaaaacaggaggaaaccatcttgaaacacatttcgatgttcgcgcgccgggcggcggcgcttttgctggcggcggtgctgctggtcggggccatccctgcagcgtttgcagaggaagagggcaccccggagggcgaggcggtcacggaggccgtctacacggtgcccaccaccatcggcggggcggataccaccctgctcccggcagaggaggaaaactgcctgagctggctgttcggctcgaaagataccatcaccatgccttacctgaatatcaagggcaagggcctgcgccggaatgtgaaactcaacctggtggactgcctggtgggcattacttacaccgagctgggttccatcggcagctttgtgagcgcctcggcggcacaggaagcctggaaagcccaggctgtggccattcactcctacctggaataccacaaaaagtacggctcttcggccaatgcgctgatctacaccccggtggaccagatcccggcctcggcccggtccgccattgagaaagccgtccgcgccgtcaaggacgaggtgctgacctacaacggcagcgtcattgacgcggtgtggtcggccagcgcgggctacaacactcagacgggcgtctacggcacctgctccggtctggacgcctgggggacggatgtgccctacctccagagcgtggagagcccctatgagcgccagtaccatgagaaaatgcgccgcatcatcggcaaggactacacctatcaggagtacaacgacagcaagaccggcgagccctacgtcagcgccgacaccacccacaaggatctgggcggttttgtgcagtacaacacgttcgtctccaatggccgcagctaccgcaacatcagccagtttgtgagctcccgttactgctttgattttggcaccgacgccaatggcacccccgtgatgacctactacggctatggtcacggcgtgggcatgagccagtgcggcgcggtgggctttgctgccgagcaggggatgggctaccgtgagatcctccagcattactacaccggcgtctccatgaagagcgtgggcagtggttccagcagcggcggcttctttggctggctgcggaagctgttccgctgaccaaaacggcgctgcactggaaaccaaaaggaattgcggaaaatcgcttctcaaatgcggcggaatttggtatactatacaattgtaacatcaaatgggagttggagaaatcggaatgcagttggacaaggaaacgaaattgaagcaggagaaagagcgctgccgtcagctggcgcagcgggtcgcggaagaagcgcaccccgcctcggcccaggtgctgaacagcgagtctgacctgttggaaaaggccctgcgccgggcaggcatccgggcggaagagtggtctgcacaggctgcagagcctgtggacctgctggtggtggaagaccccgtgtggagccatctgccccagcagctgcccgagaaagtgctgctggccagtgtggacagcaccatgatggcggcctgggccgagcagctggcccggcggggctattaccgtgatttccgctggcgcagcaagggccgtgcccagcagtccgctctgttctgcaccggcagcgccgtgcccgccccgctgatgatggtacagggctacgagcaggagatggacaccctgcgggaccggatggtccgggccgagcgcacctgcagcgaggaagccgccctgatcgagcggctccgcagtgaccttgccctcagccgcagccacgagcagcagctggaaaagaccctgagcgacgttaccaattccacgttctggaagctgacctggcccatgcggtatgccgtcagcaagagccgccagatctggcacacgttcccgctgttcgtcttcctgcatgacctgcgcgccatgggcgtggagggcgtgcgggagcaggcccgtgcccgccgtgagtatgcagtcctcttccccagcaagaccctgcgggcagaccgctttgccccggtggagctgctggtaaagcaggccagccaccagcccggcggcgaggcaggccccaagatcagcattgtggtgcccctgtacaacaccccgctgaatttcctcgaggagctgctggattccgtcgtcaaccagacctaccgcaactgggagctctgctgtgtggacgccgggcaggacaccgccgtgggccagcatgtgcaggcccgcgccaaggcagacccccgcatccgctaccagaaactgaccgagaatgagggcattgccgggaacaccaaccacggttttgagctggccacaggcgattacatcgccctgctggatcatgacgatatcctccacccctgtgccctgtggtacacggcgcaggcgatcgtggagcagggagccgatttcgtctataccgacgaggcgacctttgagggcaaggtggagaacgtggtgctctaccacttcaagccggacttcatgctggacaacctccgctccaacaactatatctgccacctgaccacgttcagcaaggtgctgatggaacaggctggcggcggggagcgggccgagtacaacggcagccaggattacgacctcttcctccgcctgaccgagaaagcccaaaagatcgcccacatcccccatgcgctctattactggcgttccagccccaacagcaccgccagcgatatctccgccaagacctactgcatcgacgcgggcattgcggccctcaaggcccactatgcccgctgcggcgtggcggtggatgacgtcaccctcatccccggcaccccgggctattacaagacggattacaccatggcccacccgggccgggtgagcatcctcatccccacctgcgaccacatccgggatctggagacctgtgtggagtccatctacgcccgcaccacctacccggattttgagatcctcctcattgagaacaactccaaggcggagcagacgttccgtagctatgagcggatgcggaaagagcaccccgataccctcaaggtccttacctggcagggcaagggattcaactacagcgccctgaacaactttggggcccagtacgccacgggcgagtatctgctgctgctcaacaacgacaccgaggtcatcaccccgggctggctggaagagatggtcatgtacgcccagcagaagcgtgtgggctgcgtgggtgccaagctgctctaccccgatgacaccatccagcacgctggcgtgggctttggcatcggcggcgtggcgggccacctgcacaaatatttcccggccacttccgacggctacatgggccgcctgaactatgtgcaggacgtctacggggataccgccgcctgcctgctcatccggaaagaaatttacgacgaggtccacggcctggacgagagctacgccgtggcgttcaacgatgtggatttctgtgtccgcgttcgggaggccggttacaccaacgtcttcaccccgtttgcccagctctaccactacgagagcaagagccgcggcatggaggacaaccccgaaaagcagaagcgcttccagggcgaagtgctccgcttccaggctcgctggggcgacctgctggccaagggcgacccctgcaccaaccccaactttgacatccagcgtgaggacttcagcctcaaaattctgcctttggagtaaagccgatgaatctttccgcatgtattgttgtctataacggctatgacgaggtgctcaaggcggcccagaccgtgctgcagttcacccgccgctacccgctgaccctctatctggtggacaacgccagcccggacggcagcggcccccggctggaacaggccgtgcgggagggtctgctggctcccgggaccgggcagcgcgttgaggtgcgctgccgcaaagagaacggcggctttggcaccggccacaacaccgtcctgccggagcttgccagcacctaccacttcatcctcaacccggatatccagctcatggccgataccctcagtgacctggccgactggatggcccggcacccggatgccgtgatggcccggcccggcctcgtcttcccggacgggcggccccagcgcctgcccctgcggcggtgcgcgctgcggcccatggtctaccgccagctgtcatttctcaagttctgggagaagtacaacgagcagtacctcatggcagacaaagacctgacaaaacccaccgagatcgagttctgcaccggcagcttctccgcggtgcggacagcggagttcaaggccgtgggcggctttgacgagcactacttcatgtatgtggaggacgccgacctcacccagaagatgcgtaccaccggcaaagcgtatctggtgccccagtacacggccatccatgcctggcaccgggcggcccaccgcagcctgaaaccgttcctctggcaggccggcagcctgctgcggtattttagcaagtggggcttcaaattttaatttttcaaaagaagaacggcatgagccagaaattttctgattcatgccgttttttcttgcttttttgctgatttgatagtagaataaggtgtaatactatcgcaccgggaaagaaaagaccggagttttgcacggtattacccaacattgttgacagcggacgcagctccgctttgaatccatacgaatctcaaacgccaatccaacacgctgccacggctcttttgccgccggactgctttagcctcgcttgaattccaccaaggagttcggcgctcggctgcattgtctggtgtcaaaatagcctgtgtcatcgcgtcgcctttggcgttcgagcttcgtaaagctgcacaacttttttcatttttattaaaggagtgcacaaatatgaaaggcattattctggccggcggtgccggcacccggctttatccgctgacgatggtcaccagcaagcagctgctgcccgtctacgataagcccatgatctattatcctctgtccaccctcatgctggcgggcatccaggatatcctcatcatttcaacccctactgacacgccccgctttgaggcgctgctgggcgatggcagccagtacggcatccatctgcaatataaagttcagccctccccggacggcctggcacaggcattcatcctgggcgaggagttcattggcgacgactgctgcgccatgatcctgggcgataacatcttctacggcaacggcttctccaaaatcttgaagactgccgccgccaacgccgagaacaagggccgctgcaccgtctttggctattatgtgcaggatcccgagcgctttggcatcgtcgagttcgaccagaacggcaaggtgctgagcgtggaagagaagcccgagcaccccaagagcaactacgccatcaccggcctgtacttctacaacaaggaagtcgtcaagatggcaaagcaggtcaagccctccgcccgcggcgagctggagatcaccacgctgaacgacatgtacctcaag

SEQ ID NO: 574 - DNA, 39804 bp, unidentified
  source 1..39804: mol_type = unassigned DNA
  misc_difference 14675: note = a, c, g, or t
  misc_difference 14676: note = a, c, g, or t
  misc_difference 14677: note = a, c, g, or t
  misc_difference 14678: note = a, c, g, or t
  misc_difference 14679: note = a, c, g, or t
  misc_difference 14680: note = a, c, g, or t
  misc_difference 14681: note = a, c, g, or t
  misc_difference 14682: note = a, c, g, or t
  misc_difference 14683: note = a, c, g, or t
  misc_difference 14684: note = a, c, g, or t
  misc_difference 24238: note = a, c, g, or t
  misc_difference 24239: note = a, c, g, or t
  misc_difference 24240: note = a, c, g, or t
  misc_difference 24241: note = a, c, g, or t
  misc_difference 24242: note = a, c, g, or t
  misc_difference 24243: note = a, c, g, or t
  misc_difference 24244: note = a, c, g, or t
  misc_difference 24245: note = a, c, g, or t
  misc_difference 24246: note = a, c, g, or t
  misc_difference 24247: note = a, c, g, or t
ttgaattaggaggattatgtgatgaaaaagacaattgctgtgttatttgcagttatgatgatgttattgtcggcagttcccgcatttgctgccgcaagtccggaaccgagtacattcaaatataaggttgaaattattccgacagagggcggtgacggtgattataagttcacaacaggtattgacgaaaagggcgaacagcatgtatttattgagccgcttccttatgacggttatgtttttgatcactgggaaatttcgggcggtcctttcagaaccgacagcaagtatacagatcctaatatgaatattattatttcaggtgacattgtttgtactccttattaccgtaaggcaagcagcggcggcacaacaggtcctgttgctacagctacggcaaagaaagatgattcaacaacttcaccaaagacaggcgcaagcgatgttgtaccgtatgcaattttagttctttctcttgcggcttgcggtgcggctgtatttaagcttgtaaagagcaaataatccaaccttaactaaaaatcaagagacttctcataaggaagtctcttttttattcattagatgtttgaataatcaggttttgtattgcagatgcagtagtttgtaaattgtaataaaattttactaacaggcaatgattaattgacatactgacacaaaaatgatacaatataaccgattgggagtttttgatatgagcagaaaaagaaacaaatttcttatagctttgattattttgcttgtggctgcaattatcggcacacttgcgtacatagtcgttaaaaacttaaatgaaaataacgaacgaaaaagtcttgataacatcgcaggctcgtatgcgtcaggcattgaaaacggtacaacctctgcaacagaagtgacttcaccgtcaatcaatgtgaaaaagatcgaaaatccgattgatttcaagtcgcttcaacagcagaacagcgacatttattcgtggatttacattccgaatacaaatgtaaattatcctgttttgcaaagtcatcttgacgataacttatatcttgaccacgatatttataagaattacagcttttcgggcagtatctattcgcagatgtgcaacaagcgtgattattccgacagagttactgtgctttacggtcataatatggcaaacggctcaatgtttgcaacgctccatcgcttttatgatgccgatttctttaacaagaacaggtacatctatgtttacactcccgacagaaagcttacatacgaaattgtgtcagcttttgaatatgataaccgacacattatgaattcgtttgatttttccgatgataatgtattttcggattatctcaatatgattaaaaacccacattctgtttctgtgaacaagagaaatacggagcttactaccgatgataaaattcttgttttaagcacatgcttaaacagcggtgacggaagatatcttgtgcagggagtgctgaagaaagatgaaccgacaaaatgaaagttcggctgaggcaacaactgaaaatatagaaaacaagcttgatccgaatacaccggaaattcttgaatcgaaaagagaaaagaacagtaaggagcatgtaagcaatccttcaaggttggatatagaaggttatattttcaaggacagcaagttaataaagaaaaagaaaaaagtatatacagatgtgtacggtgttgattccgacagcattgtcgtgaagagtaacaccacaaatcactataaaaagcatagatcaaagtcgcatcatcaccattcaaagcatcgaaagatgaaaacctggaaaaaggtgcttttgtcaatcggctgcacattacttggtttaattatactcaccgtaggcacggttgcgtatttgatttatcagggcggaaacgagctgtttaatacggatattcatgttaccgccccacagggcattgaaaccgaggaaaacggtaagtatgtcgtatacaacggtgaaacatatcagttcaacgaaaaggtgacgaatgttctgtgtatcggtgttgacaagcgcaaccttgacgaaaataataacagcaaagtcaaggcgagcggcggtcaggcggatgtgcttatgcttgtgtcaatcgacacttcaaacggtaaaataacgctcttcaacatttcgagagattcgatggttgatgtcacaatgtattcagcaggcggtgcatatgccggcacggaaaaacagcagatttgtctttcgtattcatacggtgacggtaaggaatcaagctgtgaaaatacggtaaattcagttcagaggctgttctataacattccgattaatacatacttttcgcttgaccttgacggcatttctgctctcaacgacagcgttggcggagttgatgttgtgtcacccgaaacaatcggggagtttgttgagggagaaagctatcaccttgtcggacagcaggctgaaagctttgtcagaacccgtgatacaagcaagaccgattcaaacaatatgcgtatgcaaagacagaaggtttacattcagtcttttatgaatacggttcttcagcagacaaaggaagatttaaccacgccaatcgatttgttcaatgcgtccgctccgtattcatgtacaaatcttaacccgtcaaaggtgtcatatcttgctcagcaggctgtgcttggcggtatgaacggaattgatatggtttcagtccccggtcaggttacaatgggttcaaagtacgcagaattcaatgtcagcgaggcagaattttatcagctgtttttgagtatttattatacgaaaatagaataataataaaacaaataaaatgcatcagattccaagtaaggttctgatgcatttttgttttatgtgcaatgcggttgttgaatcgtgcgaataataacaattctacgctcgggcatgatatgttttaatatcgcaaactttcttcacgaatagggaacggcggctcgccctaatttagagcgaataaccgcaatgatacgctcgggtgtaatatgttttgtaattaaacaaactatcttcacgaatagggtacggcggctcgccgtaaaaaacagacagccgataattggctgtctgcattttgttcaatatttaatttgatgcggaggttgtttcttttgaagaagtgccgcctgtgaacaattcttcaaaaacgaagcttgcgaacttctttctctgttcttcaaggtctgaaattttgattgttgatgtgattgcaccgttccatgtttcggttttatcatcatagtaccaaagaccttcttcaggaacataatactgctctacatcataggaaagatatgtgagagcgtgagaaacaagtgctgtgatttcgtccttcttgaggtttgttgttacaaggggaccgacagagcttacaattgaaacaatctgaccgaggtccgcactcttcatacttgtaaacaaagtttcaagaagctttctctgtcttgaggttctgtcccagtcgtcaccgtcaagaccgatttcgttgccgtcctcgccctttttaagacctctgtttcgagcataccaaagagcctcctgaccgttgagatgaacagtaccgggtgcgtctgtgatagttgttcttgtgtcagcctgattgttcttgtacatctgatagttgatgtagtcaatttcgtcctgagtaacttccatatcaacaccgccgagggtgtcgataatcttcttaaagctgtcaaagtcaacaaccgcataacggtcaaccttgatgccgaagtttgcctcaattgtctgaattgaaagctttgctccgccgtagttataagatgcgttgagcttgtcatatccgtaacccggaatataaacataggtgtcacgctggaatgatgtcagtttaagctttttgtggttgttatcaatggtcatcatgatcattgtatcacttctgccgtatttatcgtcgtttgaattgtcttcgccaaagagcataacattaagctccttggagttctgcagaagctctccctctgaaagcgaaaggtttgttgtgtcgccctcaagcggggcaaccgatgagttggtagctgctgtgttgttgttgtttgtgtcatcaagatccttgaagttgagagtgtcaaggaacgaatagtagtagagcattccgccgccgcccaacaggaagattattgaaaacacaagacaaaggattcttttaagtctgccttttttattatataattttttgacctgcttatttgagcttatgtcaataaaattgcttttttgactgcttttttcgtaatttggcatattactcctccaatcgggtaaaaagcacacaatacataagtatagtttattataccatatgagaatttcttttaatgctaaattagaattaaaatctgccttttcgtaaagttttagcgaaaaatctgactgaaaatattgatttttttgtcggtaactgtcaatcctgttcatcaagtgacaaatagaaggacggaaggaactctttttcaaatacctcgttttcgggcatattcatgttgtgaattgaattttcggttgcctcttttgcctttgaaaactcgctgttgcccatttttatttcttcaatacattttatgagtgcggaaaacttgtccgccgctttaacatattttttaagttcatcgtcacctgcaccgttcattttgatgattttatccatgtcgtccttaaaatcatccggaagcatcgacacaagcctgttgcctgccgttgtttcaatctccttataggcatttttgatttcggggttgaagtattttacgggagtcggcatatcgcccgttatgatttcggttgcatcgtgaaaaagtgcgagcaatgcggctctttcggcattgagattaccgccgaaacgcttgttgtgaatcaaaacaaggcaatgtgcaatcactgcaacatcaagactgtgttcgctgaggttttcacagcgtgtgttgttcataagtccccaacggttgatgtacctcattcttgaaagcattgcgtaaaaatgtgaaatattcataggtagtttctcctgttttttgctaaaaattagtgcaatttgtatcgcattatgttataatgtaatctaaatgcgagtgtcctctgttctctgcaagcaaagcagagcgttgctccgaattgaatatgtaggtgtcttttgaataaataacggtgaaggacatttatattactgattatactattcataatttaaaagtaaagaaattatcgaaaaaaagattttttcagactttttgctccgtggagggttttatgccgagcagaattttgcaaaaatatccaacacaaaaactatttggtttgcgtgtgtttcttatatcaattataactgcaacagcactttttctaccgtttatcataatgggtggcggtgttttctattattacggtgatttcaatgttcaggaaattccgttttatcagcttgtgcatgacgccgtaagaaacggtgatatgggttggatgcacaatgttgacctcggaacggatatgctctcaagcttcagcttttatcttcttggcagtccgttcttttggctgacaattccgttcccgagtgaggctgtaccgtatcttatcggaccgttgctgattttaaaattcggctgtgcgtcactttctgcatatctctatttgaaaagatatgtggctaacaggaatttcgctcttgtaggcggattgctgtatgcattttcgggattttcaatctacaatgtgttctttttccactttcatgaaccgatgataatgtttccgctgttgcttgcggcacttgacgcattcatctatgacggaaaaagaatggtgttcgcacttgcggtattctccgcttgtgttgtgaactactacttctttgtgggacaggttctgttcgtaatcatctattttcttatgattacgcttaccaaaacctacaaatttaaagttaaaaattttctcttgcttgcgcttgaggttatcataggattccttgcaacggcattcatactgctgccgtcagtgctcggcttaatgggaaacccaaggcttgccgagcttccgaacggctgggattcgcttgcctacagtcaaccgcaaaaatactggctgataattttaagcctgtttttccccgcagatatgcctgcgttccctgtgttcacacccggctcaaattgcagatgggcgtctgttgcggcatggttgccgcttgtcggaatgacgggagttatcgcatattttcaggtttgccgaaaaagctggctcaaaaagcttcttgccgtgcttgcggtgtttgcgtgtgtgcctgttttgaacagtatgttccagcttatgaacagctcaatttactacgcaagatggttctatatgggcgtgcttatgcttgttcttgcaacaatcaaggcgtttgaaaacagaaaaaccgattggaacagggcgattcgttggtcggcaggaattacggtaggcgcaactctgctgataggtcttatgcctgtgagctatacggatgaggagagcggcgatattcaaaatacggttatcggcactcaggcaacatttgaacgctattggctctatgttcttatggctttgttaagtctgcttgcgttcgttctcatcatcaaaaaattcagacgaaacaaaaagagatttacggttatgctcactgttggtatcctgagcgtttcgcttttcacatcatattttataatcgccacaggctatttctcaagcagcagtacaaatgccatcaaagaagatatcataaacaggcgtgacggcatcacaattgccgatattgacaatgttcgcagtgatttttacgaatgtgttgacaacacggcaatgttctggcagattcagagcattaactgctttcagagttctgtttcaacatctataatgcagttttacgatgcactcggaattacaagggatgttgcgtcaagacctgaccttgatgtatacggacttcgcccgtttctgagttgtaagtatctttttgattatcgtggcgacggaaaatcgggaagtctgaattcattcgttgacgaaaacggcaacacaagaatgccgggttggaaatatctcagaacgcagaaccgttttgatatttaccgcaacgaatactacattcctatgggatacacctttgataagttcattgccgaagaggaatttgaccttgtgacgaacgcacacaagtccgaggctttgctctacgcaatggttcttccccgtgaccttatgaagaagtattccgatattacgggctacagcgatgaaaagtacaagcttttgtacggcaagcatccggaggattacgacagcattacggaaaagtttgattacagtaattcagattacaaaaaggtttgtaatctcagagccttgaacagttgtacttcatttgaatatacagataacggctttagggctgtttacaataataaaaagggtgacgataacctgttgtttttcagcgttccttacagcgatggttttaccgcaactgtaaacggcaaggcggcagatgttgaaaaggttgactacggctttatggctgttaagattccaaagggggaaaagtgtgacattgtgttcacctatgaaacacccggattttcaacaggtgtcaaaatcagcctttgcgcattcggagcatttttaatctactgtgcggttattgtgaccgttaaaacagttaaaaaaagaaaaaataaaaactgataaagatacaatcagcatttaagtacggaggtatttattatgtttggaaacaaaatacttgacttcaaagacgaacttttaaaggatcttaacacacttctttcttttgaatcagttgacggtgaaaagaatgacgagtgcgataatgccttgaattttattcttaaaagagcagaagatttcggactgacaggggagagaacaaccgacaagagcggtcatataacccttggcaacagcggaaagctttgcggtgtgcttactcaccttgatgttgttcctgcgggaaacagctggagcgttccgccgtatgcgcttaccgaaaaggacggcagactttacggcagaggaattgcagacgacaagggtgcggctcttgttactctctattgtttgaaagcaatcaaggacagcggtgtaaagggcgtgaacactctgcgtgctatttacggcacgggtgaagaaacgggtatggaggatatggaaaattatttcaagaaaaatccacttcccgacatggcattcactcccgacagcgactacggcatctgctttgccgaaaagggtattcttcagcttgaagtcagcacacttttaaataatgcaacaacactcagccagttccatgcaggcagagcagttaatgcagttcccgacagagcgtatgtaatgcttgattcatcagactatgacgagcagactctcatgcgccttgcagacgcaagtgacggtgattttgaatttaattacactattgacggtcttatgataatcagccgtggcaaagcggctcatgcgtgtgaaccggacaagggctacaatgccgcagcggcacttgttgaccttatctcaaatgtttacacaacaaaggaaacaggttcaatctgttcatttattgactacgcaattaacaaggaaacaaacggcagatcactcggtcttaaaatgagcgacgctgtttcgggctcgctcaccgtaaacctcagcagcgtgaatattgagggacagaccgcaaaggctgtgtttgatatccgttatcccgttaccgtgagcggaaacagagttctcaaacagttcaaaaaggttgcaaaaatcagcgacctcaaggttactgttctcaatcacgaagaaccgctttatgccgataaggacagcaagcttgtaaagcttctctctgacgcttatgaaagcgtaacaggtgaaaaggctgagctttattcaacaggcggcggaacatacgcaagaatgctcggaggtaacggtgttgcattcggtcctgcattcaaaaatgacgatgttcgtatgcacaatgcagacgaaagtatggataaggagaacttttttaaacacgctcagatttgccttgaggcaatgtacagaatgtttactgacggagaataatgcgtttcgttatgaacaaattcagatgaaaagggaatgctaatgaatacggaaaaaactgttagaaaacaggcaaaaaaggttcttgaggggaatcggtcggtaattatctcagaggtaatggtcgctgtgcttgcatttttgacagggctgtttgcgttcagccttgcaatgtctgtggcaggactttatggtgtgaaaaatccgaatcaggctcagcagatgcttacaatgattttcgggcttgtattttttgcttttgttgttgtgtgtctgccactcataaacggagtttacagaagtgtgtgtaatgtagtcaggggcagagagtgcagtcctcttgatgttttttactattataaaaagccgaaattattttttaagtctgttattcttgatgtaatttcagtcggcttgttttttatcataagcggtctgctcaatgtgttcaattatcttagtgcggtttcggataaaataattgacaattcaccctcactcacagcggttgtgactgtattgcttgttttggcgtttatcgtcagcactgcggttgttgtggtgtgttacattatttttgttcattatacatttttggcttacggttttaacgaacatctgccgctcggaatttatcttccgagaatgatggctttttcaataaagaactttatccccacaataaagctatttatcggttttatcggctgggcggctttgtgcttttttgttgttccggcattttatgccgtgccttattttctgacaacctctgcaatgtctgcaaaatggttgttcgagcttgaagggagcagagatattatatgttagtttcactttgtatgatagcctataacgaatcgaatgctttgagcggacttttcagggatattgcacttcaggactatccgcatgataaaattgaggtggtatttgttgacagtatgtcaaccgatgatactaaagagaaaatggaaaagttccgtgataccgactacggcttttggaatgtgtccgttgttcaatgcgtaaagcgtaatcaggcaacctcatggaatgccgctctgatgaccgcaaagggcgatgttatcataagagttgacgctcacgcaagaattccgagaaactttgtttcacgaaatgtttataacataaagcagggcgaaaatgttgtaggcggcggcagaccgaatatcacttcaaatgtttcaagctggaagcttaccttgcttgcggctgaggattctctgttcggcagttcggttgcttcgtacagacggccgcttgcgcaaaaggaatatcttgacagcctttttcatgcggcttaccgcagagaggttattgccaaggtcggcggatttaacgaaaatctcggcagaaccgaggataatgaatttcactaccgcattagaatggcgggctacaagatgtgctgttgtcccgatattatttcgtatcagcattcacgaaacgaccttcacggaatgataaggcagaagtattcaaacggacggtggataggacttacactctcggaatgtcccggttgtctttcatactttcactttgcaccgtttctttttgtaatggcacttttcggctgttccgtgcttgcatttctcggacttccgctttttttgtacattcttttgataatttacggaatgtttgatattgtaaacgctgtcggatgttgcacaatgaaaaatgttcagcctcagtttgtgtttttgccgttcattttcccgttgctccatgttgcctacggaataggcacaattgttggtttgattcagattccgtcatggcggaagaaaatcaaaaacagcggtgcaaaagaacacattgaaaaggtaaaaagaaaaataagggaaaacacacttcccggtcattcatacaaataattttttgggcggataatctccgcccgtatttgatatttacggagatacttatgactgaaaaagtagaacttacccccgaacttttgcgtgagttacagcttaaacaacttgatatgctcgtgtatttcagggacttttgcgaaaagaacaatctcacattctatctcatcggcggtgcgttaattggtgcgctcagaaacggcggattcgttccgtgggatgatgatgttgatgttatgctgccacgagaggactacgaaaagctgtacaagctttggcatgaacagggcgcagacggaagattccgacttctcaaaaccgacagggatatgttcacgggcaatatttttatgaccgtaaccgacacaaattacactatggtcaagacaaatcagaccgaggttgatattccgcacggacttgtgcttgatgtttttccgcttgatgtttgtcccgacagccgttttgcacgcaaaatgcagtatgtgtggacaatgctttattcgctgtttttggctcaggttgttcccgaaaagcacggcggaattgtgggggcaggtagtaaggctttgctttcaattttcagagggaaaaagctccgtgaaaagatttggagaactgccgaaaagcatatgattaagtacaggcttgataaaaacaagtgtgtaacggagctctgttcaggccctcattggatgaaaattgagtatcccaaacacatttattcgggcgttgattatgtcacatttgagggcataaaaatgccgtgtatgtcgggctatgacgagtatctcagaatggttttcggtgattatatgcagcttccgccggttgaggacagagtgccacaccacgatattgcatatcttgacctgaactcaccgtgtgaaatttatgacagcaaaagaaagaataagcaaaaataacggtgcattatggagcttataagagataattggactaaaaatgactatgatgattttgtagaagaacttcgttcatatgccgatgaaaagtacagaagctttcattcttcattgattcccgacaatgacaaggacttttttatcggagtaagaatgcctgttatgcgaaagctcggcaaggaaatttctaagggcaacggacgcagttttttagagcagacaactgataattcttatgaagaaaaaacaatgcgaggtattgtaatcggtttgctcaaaaccgaaagctatgaagaatttttgatgtacagcgatgattttgtacagcgtatagacagctgggcggtttgcgacggcttttgtgcaaatttaaagcagacgaaaaagtataaatcagaatttttccctcatgtttgtgaatacaccaaaagcgacaatccgtggataattcgtgcaggtcttgtgctgatgcttgactattatcttgaagatgagtacatagacacggtgcttgaatgttgcgacaatgcgaaaaatccgcattattatgtgagtatggcaagggcatggcttgttgcaacagcacttgcaaagtgcagagaacagactatgcggtacataaagtcaaattcgcttgataatgcaacctttaataaaatgattcggaaatgcgttgaaagtttcagaattgacgatgaaacgaaaaaatatctcaaaacactgaagagatattgacaaatccgaaaatcggcatataatataatcaacagttgtcttcggggcggagtgaaattctccaccggtggttaaagtccacgaacaggtgaaagcctgccgagtctgtgaaattcagacaccgacggttatagtccggatacgagaagatgcggcagaacaggcggttcgtctgttttattttggtacgcaatcccgttacatttgtagcgggatttttcttttcccgacaactcgaaataattttcaggagtggtcgtaatgacaaaatcaaaagcaaaaacaattaattcagacaacacggcaaagacaacaaagcttgccgtaaccgcaatgcttgcggcgctttcggcagttcttatgttctttgaatttcctctcggattcatcgcaccttcattctatgagttcgatttttccgaagttcccgttcttgtcggaacattcagcatggggccgattgccggtgcagtaattgaatttgtaaaaattctcgttaagttccttatcaaaggcacaagcacaggcggagtaggggagcttgcaaacttcctcatcggctgttcgtttatcctgccggcaggcttcatttacaagtacaaaaaaacaagagtcggtgcgattgtcggaatgcttacgggtacggttgcaatggcggctatcggtgtggttctcaacacattcgtgcttgttccgctctactcgtcatttatgccgcttacagaaattatcaaaatgggacaggcgattttccctgcaattgacggcacatttacattctgcctgtactgcgtaggtccattcaacatcatcaagggactcatcatttcggtagttgttttcataatctacaagccgctttcaagacttatcaacagcctcgatgcccttcttacaaagaagaaaaaagcaacggttcagtaaatccgaaattaatttttggttgacaaacagcaaattcaggcgtataatagcatacggtgtcgaaaggcatctatcacagagtagaaatttgtgcgtgaagtgttttgcggacggggagttgccgcaagaacgaaaggtttatcctgcggtacagatttcgcatcccgctgttactttgggacatataattcagcgggcagagcaatctgtccgcttttttcttcctgaagcaacaacagagattcaggaggtaaaaaatatgtcacaactcaaaaaaattcaaagctctttgcttgaaatgaagagtatctacgctcttgcggcaattgcaatgctgcttgcacttcgtattgttctcggattttttgcaaacagcacacttccgtttttcggaaacaatgtaaagctcagcgcagcgttccttcccattgccgtaacaggcgtaatgttcggaccgattcctgctgcaattgtcggcgctttgggagatattctttcatttatcattgccccgacaggcgcatatttccccggctttacaatcaacggctttattacaggttttatctacggtatgtttctttataagaacaatgtaactccgctcagagttgttcttgcatggtttacaaatatgctctgcgttgaaacattcctcatagctttttggctttacacactctacggcggcggttcaacaccgtacacagtttatcttacagcaagattcatcagtgttgccgttaagtgcattcccgagattattcttgtgtttgctcttggtaagcttgcaggtaaaattcgtgttccgcacgcaataaagagaacctgatgaaaaactaatgcaaaattttaaggttggaaatcgactgctccccgcagtagtttccaaccttttttgtttttgtgaaaaataattttttgtaaacataaattcacctaattcgggcattggaattgtttttctatcaaactatctgctcgaattgggaacggcggctcggatcggnnnnnnnnnngtgctggcggataatatccgcccctacgagattgctatttcaaataaaataaaagtcggaaagcaaatttgaaatctgctttccgactgaattttttgttataagatttgactgcacgattaagcccacttgagggtatcgttgtagagattgatgtagtcctgagccgaacgatcccaactgttgtcgctcatcatagcacgccacataagctgatgccaaccctggtcgtcctgaatgccccacaatgctcgtcttacggcaagctgcatatctgcacattcatagtttttgaatgtaaatccattaccgtagttgtcagcactgtcgaaaacagagtctttaagaccgccaacctcacgaacaacaggaattgtgccgtaacggagtgcaatcatctgtgcaagaccgcaaggttcctgagcagacggcataaggaaaatatctgcgcctgagtaaatctttcttgcaagttcgggaacaaatccgtgacagaagcaaagtctgcccggatacttcgcctgcatatagttgaagtagtcctcgtactccttgtcacctgaaccgagaattacaaactgcatattttctgtgtccataagctcctcaaggcccattcttacaaggtcaagtcccttgtgcgcaacaagtcttgttaccataccgaccagcggaacatcccagcgctgttcaagacacaaacgctcctgcaaagcacgcttacattcgcccttgccgctcatatcgtcctttgaatagttgcgataaagctgatagtctgtttcgggattgtagctttctgtgtcaataccgttcttgataccgcaaagcttgtagtggcgaagattgagttcgtcatgaagtccccaactgaaccacgggtctttaatttcagccgcatagcttggagaaacagttgaaacacgggtagctgtttcgatagcacccttcatcatattgagtttgccgttcatttcaagaatctttgtttcggatgcaggaatgccgacgcactctgtgttaacttcccagccgtattcaccctgatactggatgttgtgaatagtgaacagactcttaatgttatagtaccatggtctgtgtgaatagaacagatagtagtaaacaggaacaagagccgtctgccagtcattacaatgaatgatgtcgggatgaaaatcaatgtaaggaagcatttcaagaattgcacgggagaagaaagcgaatctttcagcgtcgtcataatgaccgtagagagtgcctctcttgaaataatattcgttatcaataaaatagtatgtacagtcattccatcttgcccagaacaaaccgcaatactgatgacgccatgcaaccggcacggtaaagtttgtgatgaagttcatggagtttttaagttcctgcggaattgtgccgtaaagcggaacaacaattctgcaatcctgaccttttctgcaaagtgtgtgcggaagacttcctgctacatcagcaagtccgccgctgccgcagaaaggattagcctctgaagcacagtataaaattctcattgtaagattacctcctgtttaaacaactttatacaacagattttttagcaatataaatggggtacgaatcatatcccataagtgatcgaccatccttgatggtaacatccttatctatgataacatagttgaggttggtattgcaacctatttttgtgtcctgcattacaatacagttagaaagctttgcgccttcgccgacataaacaccctttgaaataacgcagttctcaacctcaccgttgataacacaaccctgtgcaatgattgaatttttcacattgcttgtaagtccgtagcgtgacggagcgtcatctcttacctttgtatagataggtctttgcggattgaaaagctcatcccttacttcttttttcataagatccatattgaactcaaagtaatcgttgattgagctgattgccgcacagtaacccttattttcataagcataaatactgtatttgcccagactgctctgaataagtcgccttacatcaagctgattaacgctgatggcgtttcggatttcactcataagaaggtctttcttgatgagaatagagccgtatgcgtggttgaatacccctttgtcaacaacacctggctttacaaaaatctgatttaccttgccgtcattgtctacatcaagggtaatcggtctgtcatagccctgcggaattgcatgattcttatatataagtgtaatgtctgccttcttctttgagtggaagtcaaaaacatctgtgtaatcaatgttagtaattacattgccctgtgaaataagcacatactcctcacggcaatgctcaatgtagccgtgcatattgtagattgtttcaacaaagcttgaaaaagccttgccgtcatatggcgggagaattgaaagattgctccttctctttgaaaggtcatatgcactgcccgaacccacatgatccataagtgactgaaagttgctttttgcaactatgcctacattgctgatacctgagtttgacatatttgaaaggtcaaagtcgataattctgtattttccgccgatcggaacgcttgcagttgttcttgaagacgcaagctcggggattttgtcgtcaagtgttgccgcaaagatgaaaccgagtacattattacttctcattgccgtccacctccgtgtcgctgtctatcatggtttttgctttgataacggtgttttctttgataacggtatttgcaccgacaacagtaattccccagtcgtcaatattttccgtttcttcggggttttgtccgacttttgcatttttgcctacaacggtgttttcggcaatgatagcaaactgaacctcggcaccgtcctcaattaccgcaccgggcatgatgattgaagaattaatcgtagcatttttaccgattgtaacacctgcaaagagaattgagaactcaaggttgccgtaaacattgcatccgtcggcaacgagtgaattttggattgacgcctcgtttgaaacatagtgcggaggcatcatcgggtttcttgagtagatatccttgaggtctaaagtaacctttggatcgagaagatccatattagcctcccaaaggctgtcgattgttcccacatccttccaatagccttcaaaaggatatgcaaacatacgctcacctgcgtcaagcatggcagggaggacatccttaccgaaatcgtggcttgaaccctctttgaattcatcctccgtaagatactttttaagttccttccagctgaaaatatagatgcccattgaagcgttagtgcttttcggatgagcaggcttttcttcaaattcgtagattgagccgtcctcatttgtgttgagaataccgaatcttgaggcttcttcaagcgaaacatcaattaccgcaattgtacaagcggcattcttttccttatgatattcaagcatcttgttgtagtccattttgtagatatggtcgcccgaaaggatgaccacatattcaggattataacgctcaatgtagttgatattctgataaattgcattggctgttcccgaataccagtctgcaccgtcaacagcctgataagggctgagacagtttacacccgagtgcatactgtcaagatcccacggctgtccgtttcctatgtattcgttaagaacaagaggctgatactgtgtgagaatacctacagcgtcaatgcctgaatttacacagttagataacgggaaatcaataatacgatatttgccgccaaacggtacggcaggctttgcaagctttttggtaagcacgccaagacgagatccttgaccgccggcaagcagcatagccactacttccttttttggaaacatcttaaaatacctccgatatttattttattatctttattaaacttattaattacagtcctgtgactgaaaatatcaattttctttctgagcttcatcggggtcaagctcttttgcacacctcagatagattacgctgagaggggggagagtgagcgaaaggccctgatcaaaaccgtgaattttcattacctcggttttgatattattaccgtttacaacaccgcttccgccgaaacgctcttcatcagagttgaaaacctcgtcataaagaccgtatttaggaacaccgatgcagtattcgtcacgcctgatgggctgaaaattacataccgaaacaatttcatcaccgtttttgtcggtgcgcttgaatgcaataacactgtttgtgtaatcgtcatggtgaatccagtcaaagcctttccagaccgtgtcaagttcgtagagcggcttgcagtcaagataaaatttgttgagctctttaaaaaatgttctgagctttttatgcttttcaaattcaagcaaatcccattgaattgcctcttcgtgattccactcgtcaaactgtccgatttcagttcccatgaacacaagtttcttgcccggatgagcgtacatatatgttatgaatgctctcacgcctgcaaactgctcgtcatactttccgggcatctgctttatgagtgagcccttgccgtgagaaacctcgtcgtgtgaaatcggcagaaggaatttttctgaaaaagcataataaaagctgaaagtaagactgtcatgattgaacggccgccacatcgaattgagtgacatatagtgcagcatatcgttcatccagcccatgttccacttgaagtcgaaaccaagaccgccgtcctctattttatgagtaagctttggccacgatgtgttttcctcagcaaacatcataacatcggggtggtacatatggacagccgtgttgagtctttttacaaaatcaacggcgtcaagattttcttttccgccgaatttgttcggttcccattcaccctcggttttaccgtaatcgaggtagagcatagaggagagtgcgccgattctcaagccgtcaatatgatatttgtcgagccagaacattgcgcatgaaacaagaaaacttgtaacctcgaatcttgcgtagttgaaaaggcaggttccccatgagtcacgcttgcttgtttttggatcgttgctttcataaagaggcgaaccgtcaaaccttgcaagtccgaaatcgtccgtcggaaaatttgacggaacccagtcaagaatcacaccaatgccttcaccgtgaagcttgtcaacaaaagccataaaatcagacggtgtgccatagcgtgaagtcggtgcatagtagccggttgtctgaaaaccccagctgccgtcatagggatactccataatcggcataagctgaacatgggtgtagtgcatctcctttaggtaggggataagctcatcggcaagcttttgatagttaaaaaagttgccgtcaggatattttctccatgagcctgcatgtatttcataaatattcatcggtgacgatgaaatgttgttttctttgcgtttattaaaccattcgctgtcattccacgaatagctttctatatcatatacaacagaggcctgaccggggcgggtttgagcgtgaaaagcatacggatctgctttcataagcctgtcgccgtattcgctttcaatgcagtatttgtatgtacaaaactgttttacaccctcgacaaacacttcccacacaccgtaaccgatgttatacatatagtttgcctcgttgttccaattattaaaatcgcctgcaaccgaaacgctccttgcggttggcgcccacacacggaacaccactccgtttttgtcgttacggttcacgaggtgtgcgcccaaaaaatcatatgcacgcactgaatcgccggtgtgaaaaacttcaagagccggtcttgcctcgttaaagctgtaattcataagaattgctccttgtttaatatctgttgattgttgattgtttgctcacacttatataataccaaaattatatgtcaatttcaagcaaattcaaaaaatttaaaactaatttttcgtgtatattttataaactgcgactaaatgttacattttaaagcataattttacgaataaagaaaaataaggataaatatcttctgaaaaggaaaacaaaaagggctgtccaaaaaggacagcccaaagaataatctgtaaattcagattagccaagctcagcgaaatacttaattgttcttaccatctggcttgtgtatgagttctcgttgtcgtaccaagaaacaacctgaacctcataaagatcatcagcaatctttgataccattgtctgtgtagaatcgaagagtgaaccgaatctcataccgattacatctgaagaaacgatcggatcttcgttgtaaccgaatgactcagaagcagcagccttcatagcagcgttgataccttcaactgttacatcagaacccttaacaacagctgtaagaattgttgttgaacctgtcggaacaggaacacgctgtgcagaaccgatgagcttaccgttgagctcaggaattacaagaccgatagcctttgcagcacctgttgagttaggaacgatgttagcagcacctgctcttgctcttctcttgtcgccctttctgtgaggaccgtcaagaatcatctgatcgcctgtgtaagcgtggattgttgacatgataccgctctggatttctgcatacttgttaagtgtgtcagccataggagcgaggcagtttgttgtacatgaagcagctgaaatgattgtatcgtcagctgtaagagtcttttcgtttacgctgtaaacgattgtcttgaggtcgttgcctgcaggagcagaaataacaaccttcttagcgccggcatcaatgtgagcctggctctttgcctttgatgtatagaaacctgtgcactcgagaactacatcaacaccgagttcgccccaaggaagctcagcagcgtttggcttagcgtagattgtgatctttttgccgtcaacgatgattgagccttcgccggcctcaactgtgtgaaggttttcaccgatcttaccgcagtagccgccctgtgctgtatcgtacttgagaaggtttgcgagcatagcaggatctgtaagatcgttgatagctactacttcgtaaccctcagcaccgaacatctgtctgaaagcaagacgaccgatacggccgaaaccgttaattgcaacttttactgacataaaaaattcctcctaaaattctaaggtgcttctattatattacatttttttcatttcttcaatagcttgacaaaaatttaacgaaaaatttttgagttttttacaaatacggtaaaaaacacggtcacattttgcttttttaaggcaaatttaagctgtaaccgtcaaaaagctgtaatcttttttatttccgtaataattatctgcaaaattcctgtgcttattcttgacaatttggttattttattataaaattgtatagtccgctgatgcggattttggcaaaagtacagtttttgacttttgcgacttttttaatcagactctttaaaagagccgttatatatagatattttttataatttttatggcgtttcgccttttgaaacgctctgtgcaacctgtacggtgttttgcggttgcgtatgtacatatagtgtattaaaaatatttacaaagtaaaaatgaaaattgaatatctttttaacggcacctttaaagtctaattgattgggaactgtgaaatattaaaaatcaaactaaggaggtgtccagattgccattgtggataagtattatctgcattgtcgccgcagttgttatcggcgcaggtgcaggtattttccttggaattgccatccgcaaaaacacagccgagaaagaaatcggaagtgctgaggaggaggcaaagaagattgtggctgatgcaatcaaaacagccgaagcaaggaaaaaagaagtagtccttgagggtaaagacgaggttcatcgtttcagaaacgagagcgagaaagaaatttccgatcgacgcaaggaagttcagcgtcaggagagaagaatccagcaaaaggaagaaactcttgacaaaaagcttgacaatatggaacgcaaggaagaaaaggtcaacaaaaagcttcgtgatgcagatgcaaaactcgaagaagttgaaactctgaaaaagagccagtttgaaatgcttgaaaaaatttcgggctacacggcagaacaggctaaaagctatttgctttcacagcttgaaaatgagcttgctcacgagaagtcggttaagattatggaatacaccgaacagctcaaagaggaagcagacgacaaggcaagaaacattatttcgcttgcaattcagcgacttgcagctgagcaggtttcagaggcaacaatttcggttgttcctctgcccaatgacgagatgaagggcagaatcatcggtagggaaggccgtaacatcagggccatcgaaactcttacgggtgttgatcttattattgatgatacgccggaggctatcacgctctcatgctttgagcctgtaagaagagaaattgcaagaattgcacttgaaaagcttattgcagacggcagaatccatcccgcaagaattgaggagatggttgaaaaggcaagaagagaggttgaatccgaaatcaagcgtacaggtgagagagccgtgcttgacgcaggtgttcataacattcatccggagcttgtcaagcttctcggcagacttcgttaccgtacaagctacggtcagaatgtacttgatcactctcttgaggtttcatacattgcaggtatgatggcgagcgagcttggtcttgatcctacaattgctaagcgtgcgggtcttttgcacgatatcggtaaatccattgaccatgaggttgagggaacacatattcagattggtgttgatcttgccaaaaagtataaggaaagcgacgctgttattcacgctattcacgctcaccacggtgatgttgaggcgagaacaattgttgcctgtcttgtacaggcggcagacgctatttcagccgcaagaccgggtgcaagaagagaaaatgttgaaaactacattaagcgacttcagaagcttgaagaggttgcgtcttcttttgacggtgttgagcgtacctttgcaattcaggcaggccgtgaggttagagttatggttaagcctgaaattgtaaatgatgagcgtatgattccgcttgcaagagatatctgtaaaaaaatcgaagaagagcttgaatatcccggacagattaaggttaatattatccgtgaaagcagagcgtccgattttgcaaaataaaatatcttgattttaactacggttgacaggactatgttgaccgtagtttttattttgtagggacgatattatccgccggtacggcgagccgccgtacctgattcgtgtagataggttcattaaatgaaaaattgaaaattgaaaatggaaaattgcggtcgggaagatggtttgcaatataaaaaacatattatgcccgagcgtagtatagtagctgtttgcacaatttaatgtagcggcgaacagatcggaagagcgtcgtgtannnnnnnnnnccgctacaaacgctacaaagaatatgctgtaatcaaaaaaataatttgcaagaaaattaaataaacttgcaaaaattaaatttgtgccgtagcttagatttttgacctgttattgtaaactgtaatttaaaaaacagcaaaaaactttaaaaaatattcaaaaaagtattgacaatcggttaatgaggctttataattcaagacagtaaggcaaaggtcttacgaagttttcggaaaactgaatataaaaaggacaaggaagttcactttggtttcttctgattttgcaacaaatttttaaaaacttgcaaaatcggataaaaacattgtgagctttatttttttgcttcggcaaaaacggtttatgtggaggttaaaaatggattcaggaaatataggctttgtgctgctttgtgcggctttcgtatttgtaatgactccgggtcttgcaatgttctacggcggtcttgtacgaaagaaaaatgttgtaaatacaatgatgacatcaatttttattatcggtgtcggaattgttatgtgggtgcttttcggttattcgctttcgttcgctccttcgggaaatgcttttatcggtgatttccgttggctcggtcttgagggtgtttcactcacggagggctatacggatgatgcgtcaattccgaatatggtattctctgcgttccagatgatgtttgccgtaatcactcctgctcttattacgggtgcggttgcaggcagaatgaagtttaagtcaattttcgttttcacaattttctggtcgcttatcgtttattatccgctcgctcatatggtgtggggacagggaggacttttaggtgcagacggtatcggcgctctcgactttgcaggcggcgatgttgtacatatcagttcgggtgtttcggcacttgtactttgcatactcctcggcaagcgtcacgattatgaacattcaatttacagaattcacaatatcccgacagttgtactcggtgcgtcgctccttatgttcggttggttcggctttaacgcaggttctgcacttgccgccgacggtcttgcggctcacgcatttatgacaacaggtgtttcagccgcagccgcaatgctctcgtggatgctctgcgatgttatcaagaacaaaaagcctacacttatcggtgcaagcacgggtatggttgcaggtcttgtaggtatcacgcccggtgccggctttgttccgatgtgggcggcagttattatcggtttgacaacaagcccagtttgctatattatgatttcatacggcaagaaaaaattcggctttgacgatgcgcttgacgcattcagctgtcacggtacaggcggtatctggggcggacttctcacaggtgtgttctcatgcacggcaatcaacagcagtgcaggtaacggtcttgtgtacggtgagtttgcacagttcggtgctcaggcggcaggtatcggcatcacaattgtaattgcggttgtcggaacactcatctgctacggaatcacaagacttcttacaggcaaaatcagggttgacctcagagatgagcttatgggacttgatgtttcacagcacggtgaagctgcttatccgtcatttaacggtcttgacaactaacggaggttttaaagtatggaaaacaataacgatattcagcttataaaaatagaggccgttgttcgtgaagaaatgtttgtagatgtcaaaaaggctctcacggatatcggcgtaaacggaattacagcgtatcaggttgtcggctgcggaattcagcgaggtatgtcggagtatgtaagaggacagaaggttgatgttcaggttttgccgaaaatcaagtttgaaattgttgtttcttccgaagaatgggagaaaaaaacaattgaggcaatcagaaaaacagcctttacgggcaacccgggtgacggtaaaatatttacctactatcttaaacaggcggttaaaatccgtacgggagaaacaggctacgatgcaattcagactcccaactttgatgactgatattttcctattttcctatatcaaaaaagtgcgtaccgaaatttggtacgcactttttgtttgtaaaattgtttatcttcttattgtaatatcttccgggctgacagtattgtcacgaagtctgttgtaataatcgggatttgaatgctttatgcttatcggctttagctcgggagttgcaaaacagtgtgttgttctgcctgttgcagaaagttctccgcttttattgttgaagagtttatagtcaaaaatcattcttgaacccgtaaaaaatacaaggcttacttcaacggaatactcatcgccgaatttaagcggctttttgtaacgggcatatgcgtcaacatttggaatatataatccttttgattgcatttcggcaacatcacaaccgatgtcgtgcatatactgaattcttgcatcttcaaaatatctgataaaatttgagtgatgaacaatgttcatacagtctgtttcatagtatgaaacctttgctttgtataatttctcggtcatattttctcctttacatatattctgaaaatccgtaattattttttaagcaacaaaccgtttttaaggtcctctgctgcctgtttttttattacaaagtgctgtttcttgcctgtagcggtttgcggaagatcgttgacaaaacggtagtatctcggagcctgatattttgaaatattcggtgagctgtcgcagaaattgataagctcggcaaccgtaaggctttcgtcagcttttattacatatgccgcaacgcactcgcctcttgttgaatcgggaacacctgttacgatacattcctgaaccttcgggtgtgagttgagaatttcctcaattcttgcaggataaatattttcgcccttgctgataatcatatcatcttttctgcctgcaattgtaaaaaactgttcgctgttccaagtgccgatgtcgcctgtgtacatccaacccttgtagaacttgtcttttgtagccttttcgttatttacatagcagtatgtagttttgttcggacatttgatgatgatttctccctctgttttgttatcgcaggggactgtgtcatcgggctctgcttttctgtcgtcataaacatttacaagtcttacctcatcatctgtgcatgatctgcctgccgaacctgccatttcaggaaggtcatacggacgaagaaatgtattccagaaagattccgttgtgccgtagccgttaaaaatgttgggggagagaagttcctgatagcggatgcaagcggctttttcaagcggactgcccatggtaataatgcccttgagcgaagaaaggtttttctgatgcttttcctgacggtttgcaagcatctcaagagttgacggaacacctgtgatgaatgtaattccgtatttttcgataaagtccatgcagcttctcgggttgaatgttctcataatcacaagacacgcacctgcataaagggtaggtgtaggaccgcccgaatgaataccgccacggtgaaaccacggagtcatattcatcgtgatgtcaacgggtgagagcggaaagtgcataattacatcgtgagccgaaagaacttcgttgattgcgttaagcggaacgcccttcggagtacctgttgtacctgaggtttgaagtcttaaaacctcatcataaatatgcggcgcatagtcaacaggcggattttcgtaactgctgtccttgatgtaatcgtcaaagaaaatgtgtccttcgggaagagttacttcctttttagaattattaacgcagagaatcaattttggcttatgctcgcagatttcaagagcctgtacggctgtttgcataatgtctgcatcataaacataaacaacaggcttgttgtgtcccataatttctgcggtttcgcccggtgataggttaaagttagcgggatttgagattgcaccgattttctgcggcgcaatgtaaccaaacaaaaactgcggtgagttgtaaagctgcataaacacgatgtcgtttttcttgacgccgtcttttttcatagcgtttgcaaatctgtttgcatcggcattaagctctttgtagctccatgttctgccgctctgaggatcaattgcggcaggcttatccgaaaagcgtcttacatttctcataaagccgttaagccatgtaaattcactttcaaatgtttctctgaacatctgtgaatcatatgttaaattcataatatcctcctgtcctattgtgtatgggtgtacattattttatacacacatatgtgtgttgcttgtatgttgttttgtcggcagattatttgccgtatttgccgacgataatacttgagttctgaccgccgaatccgaatgcgtttgacatggcaaagttgatttcggctttctttgcggtatttgcaacaaagtcaatgccggcacattcgggatcaacctcgttgagattgattgtaggcggaactgtgcctgtttcaatagccttgacacaggtaattgtttctgtaataccgcctgcgcccatcatatgacctgttgcgccctttgttgagcttacataggggagagtgttgccgaagaccttcttgattgaagatgtttcaactgtgtcacccttgtttgttgcagtaccgtgagcattgatgtagccgatgtcggaaggattgattcctgcctctgcaattgcctgtttcatacaagcgattgcacctcgtccttcgggatgcggagcagttacatgataagcgtcatccgtgttgccgcaacctctgatttctgcataaatcttcgcacctcttgcaagagcgtgttcctctgtttcaagaacgagcgcaccgccgccttcacctattacaaaaccgtcacgggtaacatcaaacggacggctggcagtgcttggcgaatcgtttcttcttgaaagagcttttgcgttggcaagcgaataaattacaagaggacagagaacggactctgctcctactgcgagcataatatcagccttgccgctctgcatacacatacaagctgtgttgattgcgtcaccgcctgacgaacaagctgtgcttaccgtaaagctcggtccctgaatgttgtagtcgattgcgatatttgcggcggcaatgtttccgagaattttgggaataaaacgaggacctacctttttgtgtgatgcgcctgtgagtgcctcctgagtatatgcgattgttgcaatacctgccattgcagtacccataacaatacccgttctttcgggttcaatcttgattccgctctgtttcatggcttcctcagccgcaatataagcgtactgcataaacggatctgtttttctgattaaatcctttggaagatagtcggacggattaaagtcctttacttcgccggcaatctgaacagcgagttcagacggatcaaaagtcttaattgtgtcaatgcccgatgcacctgccgtgatattattccagtagttttcaacaccgatgccgacaggtgttaccgcacccataccggttacaactattttcttcattcgttaagctccttgttttaaaataagttatttacattttgcatattattatgctatacttgaattgtaccaaatatggaaaaattattcaataccgttgattatgcaaaaatgacgatttggcagtcttaaatttacagttttgcataatattgaaaaaaaccgacaaaatactgcgggaaattgtcaaaacggaggttattatggatataaatcagctcaattgctttataactgtggctcagacgctcaacttttcagaggcggcaaggcggaactatgtttctcagtcaaccgtcagcagatatgtaagcgaccttgaaaaggagtttggggttcagctttttacacgctctcaccgtgatgttatcataacaagcgagggcaaggcacttttgccctatgcgattgaaattgttgaaactttaaagaaagcaaaaaccgttatcaagcagatgcatgacggaggtcagggtaaaattacgctcggctgtgatgttacctcgctttcgttcccgacaaaatgtatagccgactttgcggaaaaatacccgggaatcacgattgatgtgcgacagcttgacgaggctgaccgcacacttgcaatcacaggcggtgaatacgacttttgctttatgccgagagatatggttcccgaaagctcaggtattgaatcaatcattacacataatgaaactttgtccgttgtaacagcgaaaaattcaaaattcagcggaagaaaaagcgttaagctttccgaattggctgacgaaagtattttggtactttcggaatcggttgcaccgattgtgtatatggaaattatggacttgttccgcacattccatataactcctaaaatcagtaattcatttgacgatcttgtttccatatatgtgtcatcgtcatcgggaatcggcgtgtctgtcataccaacctcggtcgctgcatatacttctgacgaatacaccgattcataccttattgatgatgcggacacaagcatagcctatgttatggcatggggaaagaatatttcaaatcctgctgcaaagctttttatggaggctgttaagaaatatgccaagggagatgacaacatttacgggctgtaactgagcatatttctcaatataaattccaataaagaactatagtgaaaatttcacaaaataaacacacattattttcaaaaaaggtatttactttataaatcttcggtgttataattacggtagtcaaggagaagttgacaaaatatcctttcaggaggtaattaaaatgtacagatttactttaccgagagatctctatcatggtaaggatgctctctcaagtcttaaaaatttatccggcaaaaaggctgttgtagttgtcggcggcggttcaatgaagcgtttcggttttcttgacaaggctgttgattatcttaaagaagcaggtatggaggttaagcttatcgagggcgtagagcctgacccatctgttgaaacagttatgaagggcgccgctgttatgcgtgaatttgaacccgattggattgttgcaatgggcggcggttctccgattgatgccgcaaaggctatgtgggtattctatgagtatccagacacaacctttgaggaaatcatcactccgttcagtttcccgacacttcgtacaaaggctaaattctgcgctatcccgtcaacatcgggtactgcaacagaagttacggctttctcagttatcacagactatgcaaagggtatcaaatatccgcttgctgactttaatatcacacctgatgttgctatcgttgatcctgcacttgccgaaacaatgccggctaaacttactgctcacacaggtatggacgctatgactcacgcaattgaagcttatgtttcaactctcaactgtgagtacacagatccgcttgcactccatgcaattgagatgattcacgacaacctcaagaagtcttatgagggcgacatggcttgccgtgacaagatgcacgatgcacagtgccttgcaggtatggcattctcaaatgctctgctcggtatcgttcactcaatggctcacaagacaggtgcggctttcacaggcggtcacattattcacggctgtgcaaacgctatgtatcttcctaaggttatcaagtataactcaaaagatcctgttgcagctgagcgttatgctaagattgctaagttcatcaacctcaagggcgaaacaacagaagaacttgttgacgcactcatcgctgaactccgttcaatgaacgatcagctcaacattccgcagggcattaagaactacggtccgggcggtgttaaggctgacgagagcattatcgacgaaaaagaattcctcgaaaagctccccgaagttgccaagaacgcaattgccgatgcttgcacaggttctaacccacgccagccaaatcaggaagaaatggaaaaacttctcaaggcttgctactacgatacagaaatcgacttctgatttgtttgacaaatctatttgtacttatcacagctctccgttttcggggagctgtttttttaataaaaaatccgcataaaaatgctcttaaaaggcataaaaatcatatggacaatattgctttgttgtgctaaaattgacttgaaattgatgaatttggtgacataaaatgaaaattgcagtaataaacggtcagaaccataaaggctcaacctatcatattggtaagcaggttgccgataaattaggcggcgaggttacggagttttttcttccgagagatttcggtgatttttgcgtaggttgtacgcagtgttttctaaaatccgaaacactttgtccgcattatgagcgactgaaaaagattaccgaggctatggacgaggctgatgtactcatcttcacaacgcccgtgtatgtttatcattgcacaggctcaatgaaagcatttcttgatcattacggttatcgttggatggttcaccgtcccgaacagaaaatgttcacaaagcaggcggttgtaatttcgacagccgcaggttcgggtacaaaatctgccaacaaggatatcgccgacagtatgttcttttggggcgttccaaaaacttatcgttacggtgtcaatgttcgtgcaacaaattattcaggcgtcaccgatgaactcaaaaagaaaattgacaaaaagactacctcaattgccaataaggtaaagaaaaataacggcaaagttaaggcagggttaaaaacaaaaggctttttctttattatgagaatgattcagaaaagcggctggaatgaagccgataaaaattactgggcagaacgaggttggaacggtaaaaacagaccgtggaaaaatacataaggagatgttttaaatggcaaaaaatactgaaatcagcttgagaaacaaggttatttattcggtttatgtccgcaaccacacaaatgacggcacatttaatgccgttgcagaggatcttgacagaataaagtcactcggtactgacatcatttggtttatgccgattcatccgattggcgtcaagaataaaaaaggctctctcggttgtccttatgcaaacaaggactatcgcacaacaaatcccgaatatggcacaatggacgatttcaagagccttgttgaaaaaattcacgcaaagggcatgaagtgcatcattgatgttgtctataaccacacttcgcccgattcaaatctttcggttgaacatcccgaatttttctacagaaagccggacggcaattttggcaacaaagtcggcgattggagcgacataatcgaccttgattattctaacaaagaattatggcggtatcagattgattcactcgttatgtgggcgagaattgttgacggcttccgttgtgatgttgcatcattcgttcccgttgaattttggaaacaggcgagagaggctgtttcaaaggtaaatcccgactgcatttggcttgccgaaagcgtacacagctctttcaatgtgttctctcgcaagagcggaatttataccgcaagcgactatgagctttttgacgcttttgatatggaatatgactacgatatccgtgaggttttcgacaaatatttgaagggcgaaacctcactttcaaattatatggatatgttcaattatcaggaggcaatttatccgcagaattacgataaaatgcgttgccttgaaaaccacgatcagccccgaatctgccattatgtaaagaacaggagcgaccttgaaaattatacagcttttctgtatttcttgaagggttcaaccctcatctatgcaggccaggagtttggttgtgatgaaactccaagcctttttgacaaggatgttttcccacgcaacacaggcattgatttaagtaaccttcttgcaaagcttgatacaatcaagaaaaccgttcttgatgatgacgattatttcagggctgatgcagacgatgaaaacgatattgcaattcttgagcgtgacaacaacaagagcaaaaaagtcggcattttcagccttaaatcaaagtcggctgatgtaaaagttgacctccccgacggcgactataaaaacgaaatcagcggtgaaacagttgcggtttcaaacggaaaggttcattgcaacggcaaagcaataattatccgcaagtaaaataaaattctatataagaataatacaacctccctgcaaagcatttcagcttacggggaggttgttctttatataaaaatccgtgttgcatggttacaacacggatttcttggttttatttaattgaaccgtcgccacccataagagcggtcatttcttcaacgcgttccaaaggaaacggtggttcgcaaagcagttttttatatgctcacttagctttctttttattactgccgaaaattttagtcggaataatgcttccgaggaatgcggcgagcaaaatccacggaataactcttgcgtcaaagcagagcaaaaggagcattgttacggcaagcggttttttcattgtgacaccgagaagtcctgccgttacgactgccgcacaaaatgccgtgtcaagtccgccgagcattgcaacaccgtagccgatgctcactccgcagaagatgacggggaagaagtgaccgcctttccaacccgactttatgcagatgtttgtgagaataagtttcagcacaccgctgataatgagaatccacggtgcaaattcggcaaagctttccttgacaacggtaatgctttcttcgcccgaaaacattgtgagggggaggtatgtacccataacaccgaggataattccgccgagagttgtgctgataataatgccgagcttgccctgaatgagtgcgaaaaattttccgaaaatttttgaagatatgataaacagaaaaccgcatacagcgcccaaaagtgcgagaggaattccccacaaacgctcaaaatttgtaatgttataaccgccaagtcgtggaagtcccatacttccgccgaaaatcgagttaagcaaaaacagagttcccgccgcaaaaagtacggcaatgatgtttgaaataagctttgttgaacggatatcggtaggcttttcttcgctgtcaagcctttcttcattgaccgatgcaagaccgaaaagcggtgcgtagaataccgcactcagggttgcgcttatgccgatttgcattagttcgggaattttacttttagcgtctttcatatgacttcctgcccagtagcaaagtccgacgataacgcctgtcaaacctgcctcggggccaagacttccgccgaaaacaaggggcaaaagtgccgaaatgcagagcaaaagcaccttgttatacgggtaaaatttatctttttttacctttttcataacctcgtcaagttcatcgggaacggcatttgtcagcttttgccatattccgagaataattccgcctgccgtacagacgataatcggataaaatttgaaatcaaaatttgacggaattgtatcccacacaagaccgattcccaaacccataagttttagaaacagccacactatcagcgaagtaaccgcaccgctgaatccgcaaaaaatgtagtataaaaaattgttggcaacagtccgtttagtcattgttgcacctccgtgtgtttataattggattataacataaaacacagcaaaaaaacaattattccgcacaaaaagtacgaaataattgttttttgttattttttttaattttagagcctcttctaaacaaaaacagctgacaccaatgccgatgtcagccataaaaatctatttgattttaaatttcaaaagcggcgcttacctttttgaattctctttttctgatgatgaagtaggcaatcaaaacggatgtgcctgtgataagccatgaaacggggtaaaccataagaagcatatcataggtgtggaatgccttgaataccgtgaagagccagatgattctgaacacaacagaaccgaagattgtgagaattgcagggaggagtgaatgtccgattcctctgagcgcaccgccgctgatttcgtatgaacctgtcataagctcaaggagcataacaatcgccattctgatgattgcgtacttaataacggttgggtcggttgtgaagaaggtgatgaaaaatccgcttccaagcatgaatataacgctcacacagcctgtgaaaatacagctgaaaagcatacaaagcctaaacacctttttgcatctgtcaaactgaagtgcgccgtagttctgacttgtgaatgtaacggctgtctggctgaacgcacatactatatagtatgtaatgtattcaaagttgagttcagctgatgagcctgcaaccgcctgtgaaccgaagccgtttatggctgtctgaatgaatacatttgaaattgagaaaaccataccctgaatacctgcaggagcaccgattttcaaaatcataatgagatgttctttcttgaatgaaagtttttttggattgactctgattgactcgtcttcgtttctgatgaggaacatcataataagtccggcgcttatgccgtcggcaattactgttgcaatgccgactcctgcaacgctcatatcgcagacgattacaaaaaagaggttcaaaagaacatttacaatacctgaaattacaagacagtagagcggacggcttgtgtcgccgacacttctcaaaattgccgaaccaaagttgtagagcattacaaacggcatgcccataaagtaaattctcaggtatgttgccgcaaggtcaattacatcatccggtgtgttcatcagccttaacagcggtgctgcaataacctgaccgagtatcagaagaagaaatccgcatataagtgaaagtgttattaccgtgtgaacagcttccgaaacctttttacggtcattttgacctatatatcgtgcaatcaaaacatttgcgccgaccgaaagtcccgtgaataacagcacaagcatattgatgagcggagcgttgcttccgactgcggcaagtgcctgactgcttgaaaatctgccgaccaccgcaacatcggttgagttgaaaagctgttgaagaatactggatcctgcaagcggaagtgtgaaaagaagaattttttttacgagcggaccttccagcatatttatctggtgtgagcgccgtcgcttttcttttacggtattctgacctttgtttcttttaaacagacttgcaaacgcaagtgagggcatttttttgactttccccattaatttctaacctcttcaatcacataatctttgtaaacaataccattcttttccattttccacaattattgtaatccttttgcctgaaataaacaagcaaaataccttataaacataaagtttactttgctcacaattttagttacaataactacctcgtcaaaattcttctttttatgcctttataatatggtaaaaactgcttttctgcatattttcagaccgatttttctcaataagcaaggctttgaatttgtatgcaatttgtgcctcttcaacaaaagtaaaattgctctcttgtaagcattgacgaaaaattttttaacctacaaataaatgattttaaaattggtgtatatgccgattaaattataatgatacaattatgatacaagctcaatataatatatgtttatagggataagcgaaaaggagtgaatgttatgaagaaaaagattgcagtaattgtggttgcagttattttatgcgttgccgccgcagtatttgccgtgccgaaaatcagtttctatgcgtgtgagcctaccgtgtattttgatgttgagtactgcgacaaggttgacgctaagatgtctgccgaagatgccgaaaccgtgaagaaaatgtttgagggcaaatccgcatattttgattcaccgtcttgcggtttttccgaaaaggcatcaataagaataggctgtaatacatatatgcctgcgtgtgacggtgatgaaactgttaagcacggatttatgtattttagcctttcaaaaagcgaaaataacgaacttcgcaagattatgaaaaagtacggagcagatacgagaaaagccatctaataccgttgacagacgcatttccgtgtgttaaacttttctcgaaaaatatacggaggtgtttttatgaaaaactacaactgggcaacactcggttgcggagttatcgcaaatgagcttgcagccgcactcaaaagcagaggacagacactttattccgttgcaaaccgtacccatgaaaaggcggttgcgtttgccgaaaagtacggcattgaaaaggtttacaacgatattgatgagctgtttaaagacgaaaatgttgacataatttacatttccacaccgcacaacacgcatataaaatatcttcgcaaggctcttgcggcaggaaagcatgttttgtgcgaaaagtcgataacgcttaattcagatgaacttgacgaggcaatctctcttgcagaaaaaaaccatgttgtgcttgcagaggcaatgacaattttccatatgccgatttacaaggcacttcttgaaaaggtaaattcaggtgacctttgcgagcttaggcttattcagatgaatttcggcagttacaaagagtacaatatgaacaaccgatttttcaaccgcaatcttgcaggcggtgcaatgcttgacatcggtgtgtatgcgctttcgtttgttcgtatgtttatgagctcatgcccaaacgatgtgttgtcgcaggttaaatatgcagaaacaggcgttgacgaacaagcgagtattcttttaaagaataaagaggaggaaatggcaactgtcattctttcacttcacgcaaaacagccaaagcgtggcacaatctcgtttgacaagggttatgttgaaatctttgaatatcccagaggcatggaggcaaagattacatacacggctgacggccattgtgaaacaatctcggcaggtcagacaaaggacgctttgctttatgaggttgaagatatggaaaaggcgatagagggcgacacggctcttatgcaccttgactacacaaaggatgttatgaaaatcatgaccgacatccgcaaaagctggggcatgaaatatcccgaagaagagtaagttttttgaatttaatttgatactaaacacaaaactccaccgtgaaacgcggtggagtttcctttatatatttgattaaatcagaattagtagttttctgcgtgaatttcaaaatagctctgtgggtggttgcagacggggcaaacctcgggagcctctttgcctacaacaatgtgaccgcagttacggcattcccaaactttgatttcgctccttttgaaaacttctgcagtttcaacattgcggagtaatgcacggtatctttcttcgtgatgcttttcaattgcggcaacaaggcggaacttgtgtgcaagctctgtaaagccttcttcctcggcagttttagcgaaatcttcgtacatatctgtccactcgtagtttt

SEQ ID NO: 575 - DNA, 40561 bp, unidentified
  source 1..40561: mol_type = unassigned DNA
  misc_difference 19523: note = a, c, g, or t
  misc_difference 19524: note = a, c, g, or t
  misc_difference 19525: note = a, c, g, or t
  misc_difference 19526: note = a, c, g, or t
  misc_difference 19527: note = a, c, g, or t
  misc_difference 19528: note = a, c, g, or t
  misc_difference 19529: note = a, c, g, or t
  misc_difference 19530: note = a, c, g, or t
  misc_difference 19531: note = a, c, g, or t
  misc_difference 19532: note = a, c, g, or t
  misc_difference 19533: note = a, c, g, or t
  misc_difference 19534: note = a, c, g, or t
  misc_difference 19535: note = a, c, g, or t
  misc_difference 19536: note = a, c, g, or t
  misc_difference 19537: note = a, c, g, or t
  misc_difference 19538: note = a, c, g, or t
  misc_difference 19539: note = a, c, g, or t
  misc_difference 19540: note = a, c, g, or t
  misc_difference 19541: note = a, c, g, or t
  misc_difference 19542: note = a, c, g, or t
  misc_difference 19543: note = a, c, g, or t
  misc_difference 19544: note = a, c, g, or t
  misc_difference 19545: note = a, c, g, or t
  misc_difference 19546: note = a, c, g, or t
  misc_difference 19547: note = a, c, g, or t
  misc_difference 19548: note = a, c, g, or t
  misc_difference 19549: note = a, c, g, or t
  misc_difference 19550: note = a, c, g, or t
  misc_difference 19551: note = a, c, g, or t
  misc_difference 19552: note = a, c, g, or t
  misc_difference 19553: note = a, c, g, or t
  misc_difference 19554: note = a, c, g, or t
  misc_difference 19555: note = a, c, g, or t
  misc_difference 19556: note = a, c, g, or t
  misc_difference 19557: note = a, c, g, or t
  misc_difference 19558: note = a, c, g, or t
  misc_difference 19559: note = a, c, g, or t
  misc_difference 19560: note = a, c, g, or t
  misc_difference 19561: note = a, c, g, or t
  misc_difference 19562: note = a, c, g, or t
  misc_difference 19563: note = a, c, g, or t
  misc_difference 19564: note = a, c, g, or t
  misc_difference 19565: note = a, c, g, or t
  misc_difference 19566: note = a, c, g, or t
  misc_difference 19567: note = a, c, g, or t
  misc_difference 19568: note = a, c, g, or t
  misc_difference 19569: note = a, c, g, or t
  misc_difference 19570: note = a, c, g, or t
  misc_difference 19571: note = a, c, g, or t
  misc_difference 19572: note = a, c, g, or t
  misc_difference 19573: note = a, c, g, or t
  misc_difference 19574: note = a, c, g, or t
  misc_difference 19575: note = a, c, g, or t
  misc_difference 19576: note = a, c, g, or t
  misc_difference 19577: note = a, c, g, or t
  misc_difference 19578: note = a, c, g, or t
  misc_difference 19579: note = a, c, g, or t
  misc_difference 19580: note = a, c, g, or t
  misc_difference 19581: note = a, c, g, or t
  misc_difference 19582: note = a, c, g, or t
  misc_difference 19583: note = a, c, g, or t
  misc_difference 19584: note = a, c, g, or t
  misc_difference 19585: note = a, c, g, or t
  misc_difference 19586: note = a, c, g, or t
  misc_difference 19587: note = a, c, g, or t
  misc_difference 19588: note = a, c, g, or t
  misc_difference 19589: note = a, c, g, or t
  misc_difference 19590: note = a, c, g, or t
  misc_difference 19591: note = a, c, g, or t
  misc_difference 19592: note = a, c, g, or t
  misc_difference 19593: note = a, c, g, or t
  misc_difference 19594: note = a, c, g, or t
  misc_difference 19595: note = a, c, g, or t
  misc_difference 19596: note = a, c, g, or t
  misc_difference 19597: note = a, c, g, or t
  misc_difference 19598: note = a, c, g, or t
  misc_difference 19599: note = a, c, g, or t
  misc_difference 19600: note = a, c, g, or t
  misc_difference 19601: note = a, c, g, or t
  misc_difference 19602: note = a, c, g, or t
  misc_difference 19603: note = a, c, g, or t
  misc_difference 19604: note = a, c, g, or t
  misc_difference 19605: note = a, c, g, or t
  misc_difference 19606: note = a, c, g, or t
  misc_difference 19607: note = a, c, g, or t
  misc_difference 19608: note = a, c, g, or t
  misc_difference 19609: note = a, c, g, or t
  misc_difference 19610: note = a, c, g, or t
  misc_difference 19611: note = a, c, g, or t
  misc_difference 19612: note = a, c, g, or t
  misc_difference 19613: note = a, c, g, or t
  misc_difference 19614: note = a, c, g, or t
  misc_difference 19615: note = a, c, g, or t
  misc_difference 19616: note = a, c, g, or t
  misc_difference 19617: note = a, c, g, or t
  misc_difference 19618: note = a, c, g, or t
  misc_difference 19619: note = a, c, g, or t
  misc_difference 19620: note = a, c, g, or t
  misc_difference 19621: note = a, c, g, or t
  misc_difference 19622: note = a, c, g, or t
cagccaaggaactcgcagaaatatgcgataaaattctgtaatcacagtatgacatactgctataactacagtaattaaacaatattttgaagatactgaacagttacgagaaatcacaacattcagtagaaaggagcgtaaatatgcatacagcacttacaattgcgggaagcgattcaagcggtggtgcaggagtgcaggccgatttaaagaccatgcttgcaaacggtgtgtttggcgagagcgtaatcacggcactcacggcacaaaacaccatgggagttgatgcggtgatgaatgtaccggctgattttattgaggcacagatgaaggctgtttttatggatatttttccggatgcggtgaaaatcggtatgacatcatcggtagatacaattgaggcgattgccgcaggtcttgtaaaatataaggcaaaaaacatagttctggacccggtgatggtcgctacaagcggaagcaggctgcttgaagaaaatgccgcaaacactctgatggataagctttttccactggctgacatcatcacgccaaatatccctgagcttgaggtgatatcaggcagacagattgaaagcacagatgacatcatagaggcatcaaaggctgtttatgataaatacggctgtccggttttaagcaagggaggtcatttcacagacacagcatgtgtgtgtgactatttgtgggatggaaagcaaatcatcacatttgagaccaaaagagtggataatccaaactcacacggcacaggctgcacgctttcatcagcgatagccagcggcctggcaaagggacagccgctcgagcaggctgtggataacggcaagcgatatgtcacggcatgtttaaaagccatgcttgatctggggcacggcagcggtcctatgaatcatggagcgttaatcttgaaataattactaattaataatacaaataacaataagaacaggagagtacaatgagtaattacacaacacagatggatgccgcaagaaaaggcatcgtaacacctgaaattgaaaaggtagcaaagaaagagaagatggatgtagacaagctgatagagcttgttgcaagcggaaaggtagctattcctgctaacaagcatcacaagtcacttgatgcagagggtgttggaagcatgcttcgcacaaaaatcaatgtaaacctcggtgtgtcaagagactgcaaagactatgatgtggagatgcagaaggtcatgagtgctgtaaagcttggagcagaggctatcatggatctttcaagccatggcaatacacagccattcagacagaagcttacaagcgaatgtcctgcaatgataggaacagtgcctgtttatgacagtgttatccactatcagcgtgatcttgcaacacttacagcacaggattttgtcgatgtagtcagactccatgcagaggatggagtggactttgtcacacttcactgtggaatcacaagaaaaacgatagaccagattaaaaagcacaagcgtaagatgaatatcgtaagccgtggaggcagccttgtatttgcatggatgtgcatgacaggagaggaaaatcctttctacgagcactatgatgagatacttgaaatctgtgaggagcacgatgtgacaatctcgcttggagatgcctgcagaccgggatgcctggcagatgcaacagatgtatgccagatagaggagcttgtaagacttggagagctcacaaagcgtgcatgggatcacaacgtacaggtcatggtagagggaccgggacatgtgccgcttgatcaggtagcagcaaacatgaaggtacagcagtcaatctgtatgggagcaccattttatgtacttggacctctcgtaacagatatcgcaccgggctatgaccacatcacagcagcaatcggtggagcagtggcagcaatgaacggcgcagctttcctttgttacgtgacacctgcggagcatcttgctcttccaaatgtggaggatacaaagcagggaattattgcgtcaaagattgcggctcatgcagctgatattgcgaagggaataccgggagccagagatatagatgataagatggcagatgccagacgtgtgctcgactgggatgcacagtttgcatgtgcgcttgatccggagacagctaaggctatcagggatgaccgtctgcctgaggatgaccacagcgaggcatgcagtatgtgcggtaagttctgtgctgtgcgaagcatgaacaaggcacttgcaggagagtatattgatatactataactttttagtacagaaacgactcgcaactgtgaaggtactgaacagttacggtatactttaaggtgaggtagtaatggaaagtaaaaagaacactaaaaaaagaactctttcaatcagaaagattgccatggcaggagtgcttgtggcagttgctgtagcaggaagcttaataagcttccctgttgccggcagcaaatgtgcacctgtacagcacatggtaaatatatgcgcagcagtatttttaggacctgcatggggtgtcggtgtggcattttgtgcgagtattatcagaaacctgacaggacttggaagtctcatggcattcccgggaagcatggtaggcgctctgtgctgtggactgatgtacagattcagcaaaaaaatcataccgacatgtattgcagaggcgcttggcacaggcatactcggaggcctggcagcgtatcctcttgcaaaatacgtgatgcttattcagccggaaggcatgtttatatacatagtgccattccttatctctacagtggccggaagcatagtggcagcaattgtcatgctgattttaaagaaaaatggcgcactgacagtatttaaggaaaatcttgagtaatatccagagctatggctttataagaagcttcataagctcatcctgacagatagacctagagtagtgatagccctgaaagcaggtgacgtcgaactgcctgagatagctctcaaggctatcattttctatgccttcaatacatatctttaagtctgcggcattggcaaaattaatcattccgattacaagtgcctgcttctttttctcctcgagaatgtctttaacaaagaacatatctatcttgacaccctctacaggaagctcaagcatcatctgagatgaagagcttcctgtgccatagtcatccatagtgatgtggattccggcttccctgaatgcagtgacagttttctttatcatagatataggcagatctctgcatcgctctgtaatctctatccacagctgtgaagctggaaaatcatactctttaagaattgccagagtatcttccacaaaacattccttttcaagctgctctgaggatgcatttacattgatgaaaaagcccggttttatctttgcaaattcactggctgcgcttattgcagttctcatgatataatttccgagctcatacatagcaggggtatcctcaagccagtcgataaacagtccaggtggcaccgtgccaaaaggctcctttttccagcgcaccagagcctcagcacccattatttcaccattgcaagcctttacaatgggctgaaactctacaaaaaagccatcacagccattgataaccgactgatgaatgattttcatgatatctatatgcgagctgccattgaacctgaccatatcattgaaaaataacaaatcagggctgtgaagctccttcgcgcggtctagagtgtattccaccttgctgatgacagttgaggtatcaccatcataatccttgagaatcagacacgcagcatatatatcaaactcaaatttaaagcatttaaagaaatacatggactttattgtatcggcaattttttgatagaaggcctcgaccaaggcgcggtctgcttcctttaccacaaatacaaacttgcaattattcatatagtaggtagctgtgctgccatccatcatgtagatgaatttgagcgcaagctcacgctggattgcagtgttgaaattggaaccatacagtatattgaactcatctatatgacctatctccacctcgattatggttacagacctgttttccatgatatagccgttgatgtctctttcaaactttgactgaccataaagatatgtatatgggtcgatatccggaagggtattttcgtttctgagcacgaggacatggtagcggtgtccgtcatcaccggtaaaaatatcagaataaaatcccatcatatattctttggtatgctttcccatgcggacataaaatatatcatccggtttttcaccatttaagcgatagcggatttcctgcttatattccggcaggtcaacgtcgttgacacaagagctcagctgttcaaagaagcaggtatgctcgccggcttcaaagccgaaaaaatcagctgtcttatccggtacgtatgataagtcattatccaggtcggtgatgataggatatatcccgtctgataattctgaaattttatcaataaattccttgtatatcgtgtgttctatcataaattaaaactccatatgtgtataatgcacaaaattcttttattattatagcatatgtatacattatatacaataagttagttgggctctgaaaatgaaatttaggtatgaagcattaatataaattaatgattttagtgtgtcatttatatatttgaaggtatactgatgactgaaatataccatcagctgcttcaaatgcaacgtcaccatcatatttgccggcaacagagcggatggatgacagacctataccatagtcgtccctcttagaagaacggtattttccgttttggatggtaacatgtccgtcaaagctgttgtccatagtaataataagtgtcttatagtgtacgtgggcatgcagtcggataaagtgcgatgatttctcgttcaaagaatcagaagtatccatgcgtctgcaggcttctatagcgttttctatcagatttccaaataccaggcacaggtcattgtccaaggccgcatcatcggtttccggaacaataagctttgtctcaagagcgatattttcatttctgcatatggcactatagtatgacagaatggaattgactaccctgttttcgcaatagcttgcaggcgcagatggtatgctgtggatcagggcatccaggtattcattcagctgtttattttcagtgtttgcgaggccttttattgcaaccagctggtgacgcagatcgtgacgctgcttcttaaaaagctgttcgtttgttgtgatgagcgaattatatttcttctgctccaacagggaatgctcaaggagattcatatcgaatatgagtctttcattctcacgttttatcatgagcatatcgcttatattaagccccattataattcccatgattataatgaaaagcagagttccaatctggtacagtaatgacaatgaggccacaaattttaaatgataattgattatctcagcacatgaagcaagtgccagtatgaataccggaaccatcagccgttttgccctgctgttttggctacgaacagcctcaaggatgatgtatgcagtcaggaagcaaagtatgagaggcagaatgacatggaacacgtacatgctctgggatagtgcaaccgtaccgctaagctgtaagacacaagcgacaaggtcaagcacggtgaggagcttcgcgatagctataattggcttgtcattcttaaaaccaactgcaagcctgcagaaatacagcagcggaatcatctgcgagaaaagccctataaaagcacacagatacagcagtgtagggtttttgactatgacacctgtgtagttgcactcgccgatagaccacatgccggccatgagtgagaagaatccaaaatgaaatatcatcttgcaaacctctttatcgtagtataaaagcattagtgagataaatataaacaaaacacctgcggcaagctcaagcagtgctataaagaatgaccatttattcagctttaacagagtgaaaaataaggatttgtatgctccgtagataggagaatataccgtaagcgagcttctggtaacaggagacagatactctatgcgaagctctgtatcacctgaatgaccgtcagtgcctatcaggtacccctcggttgcgggatccttcatataggatggatagttttcggccctgccaaactcatatatgaggtcatcgtccagatagaccttcgcaggggaatagacagtttttatgtagattggatcatccttgttcaggttgatatgtgtggtgacggtgacatgtgtgcgcggcgaaaggtgcttaaaggtatgtggaaatgtgatttcttctttatctgaatccgagccttccactacggcatatgcagagcttacgatagtggcttcaggatagctcgcctggctcataatcatgttttttgaggaaagaagcagtatgcaaatcagtgtaagcagtataattgtcagatagggaatatttcgtatagcgctaatttttttcataatccgggctccttgcagtgtattacttttgacagtctagctcatatcaaatcaataggaaagtgccttatttaagccctctggtgtgatcaaagtagtatctctccagagcctttttggctttgccggagagctctctcttgatagggatatttgtgtcatcggccatcacgaagcatttgagtgaagtatcaatgcgtgtgacatacgacaggtttaccgcgtagcttttgtgcggcagaaaaaacagctcagcgggcagctgatctgaaagatctgaaagcttctcatagcagctgatttcctcattttcttttaaatgtatgaaaatctgcctggctctctgctctatgtacatgatatcagaaagggcaagcctctccatactcttgtttctcttcacataaagagacggggcatctgatttcttcagcatggcaaggtgaagaatgttacttagctcagctgcagaaaccggcttttcgatatatccgatggcagacagcctgtagctttccaaggcatgctccgtgcttgtcgtgatgaaagcaaccgggatatcggcatctgtctcgcggattatggagactgcctctatgccggtcatggaatctttcatgtatatatccatgagcagcaggtcatactttccgtactcatatgaggcaagaaaagaatctgcatccgtaaagacagtgtatgtattttggatatcgctgtggttgagaatatcacaaagcagcacggtctctgcagcttcgtcctcgcatacagctatattaagtgtttgtggcatgtttattcctctgtagaatgtgaatgattataaataatcataatataatatgaaataaatatcaaataaatatcaaataaatattgctattaaatatccgaaatgctaatataattatcagcagtttattaattattttaaggaggtttcagttatgaaatactgtacaaattgtggcaggcagttagctgatgatgaggtatgcacatgtcgtcagcaggcacagccacaggcaccaaatcagacacaggacaacaatgcacaggcagataatgcagcacagcagggacagtttaacggacagccgcagggcagcgcacaggcacagttcaacggacagccacagggacagttcaatggacaaccacagggcagcgcacagtcgcaggcgtttgataacttcacacagcaggtgagtgcagcaggacagcagctgcagaatgacaagaatgtggcatctatcattacattctacaagggtcttgttaagaagccggcacaggctgcagcagactttgtaaagaatgcaaatatggcatcaggctttatatttattggcttatttgccatagtagaggtagtgctgtctgtagtatatctgttatcaagcgtaattggcagcataggcggttttggattctcattttacccggcgagcttctttgagggaatcttctcaggaattgtaggagaggtggtgagagtactcatcctggcagcagtcattctggttgtattaaacgcagtgcagaaggataaaaaggtgacatttgcacagacactttcagcagcatgtctgtatgatgcagtataccttccgattatccttgttgcagcaatcatcgacataatcccattccagttctttggcaatgtgagcagctggctgcatacatttgcgggtgtagtaggatatgtaagcatattctttggagtaagggcaatagaagaggatgacaacaagcttccactcgtgtgtggactggcattccttgcaacagccattggttcaacaattgtaaatgctattttctaatttaatatatctgaaaagccggatcctgtgagattttcttgcaggatctttttttatttctggctttgaatagctatcatatatcttacgatttgtcaagtacgagttttgacactttttgtgtaaattgtcgttgttattgccatgcgcggaattgatgtataatgataattagattaatttgtttagttaaaaactagctgaatatatgagtcaatgataatatgaattctataataagcaggtttataaaactcgggaagagaggcacctatgacgcataaaatcaaggtacagatgtttggcaatttcagaatggactataacggggcaccatttgtggcggaaaaaatgcataaggaaagccagttcaaccgcatgatgcaggctttgatacactattctgactgcggaatagcaaaggataagctcgaggaaatagtaatcggtgagcgtgacatagatgcacctcacacggcactaagagttattgtatacaagacaaagcaaaagctcgcacagctcggactgccgggaaagaacctcatatatttggagggaggcatatattactggacaccggatatagagatagaagaggatgcagcagagtttgagaagctctataacgaggcctgtgcactggaaaagcagatgccacaggaatcagagagtgcagagacagtgtgtgatgagcggataaaggaaatagaagacaatatgcttgagctgtacgtaaaagcactatatctgtacaagagagagtttttggtggcatatacaggcgagacgtggatagcacaggaggccagacgctatcacaccatgtttgagaaaatcataaatgaagctgcgtacatactgcgaaagagaaaacaattcaagggactggagaagatcggagtatatgcggcaaaggtcgacccgttcaatgagtgggaggagctcatcatggaggcgatggtagagaccaggcgctatgatgaggcggaagagttatacacggatgtcgtggactattatctcagggagtgcggtatttatccatcttcaagactcttggaaatacttgagaaatacagtaatcagatgaatcatgcacatgagatactggaaaacatccaggagggcatgaacgagcaggaggaaactgaaagaggcggatatttttgcagctatccggtattcaaaggaatataccaggcgtccatccgtattatgaagcgcacaagggtacctgtgtatctcatgctctgtactctcgaggacgaggaagacagacaggtacagagcgagacaaagataaacaagtattcaaggcagctcaagaagtgcgtcggtgaatcaatccgctacagtgacatatatacctcgtatggaaaggtgcagtttcttatcatgctcatcggaatcaagcgtgaggactgcgagatagtcaaaaagagaatcaaccgccagttcgcaaagaaaaatccgagagtcgcagagaaatatcatgtgaacagtatagtttgtgagttgtaaagggaatagtacaaattggttggaaaagatgcaaggtgctgttacacaattaaggttagagttaatttgattattttatatattatggagaaaatgttatgaatggtaaagacaagatatcagtaattattccatgctacaatgtccaaaaatatattatgagatgctttgattcaatttacagccagacatatggctttgaaaaccttgaagtgatactcatagatgatttatcgacagacaatacatggtctatattagaatccttacaaagaaaatacccggagaatgttatatctcttaaaatacagaaaaaaggaaaatgtggcggtgcacgtaatctgggaatggatatctgcaccggcaaatatatcacatttgtggatgcagacgattatgtgcatccggatatgcttagggtgctgtatgatagaatgacagaggacgattatgatgtggcacagtgtggtgtatcgtgttttaaagcagataagccaaatgtattagaagtaaatgatttagaaattcaaaggcttgatttggataatgttgataataggaaaaatctcattataggtctgaccggatttactagtgtaacagcatgggcaaagctatactcgaccaaatttataagagaacataatctaagatttatagaagatgtatattatgaggatacacatttttctatgctttgtgtgttacttgcaaagaaatattgtaaggtgcaatcggcattatactattactttgagaatacagagggcattatacgttctgaaattagcaatgcaaagatccgggatgctaagattattatggatcatataaggcaggctattcaaagtagaaaagcagaactgggaaatgtaattgagcagtgttattgtgaaatccagacatttttgttatggcaccaatatattgagccatatagtagaatagaaacctttatgaatagggaactggatatttgcaaagaagagtttttaaagagtgaaccggatatatttaataatccatatgtgaagtttttttcagatgatgtggtattgaaaagaatgtcaaggctgagagtaactgcgaaaaaaatgaataatgtatgctttttagataatgcaatacatatctgtcttggtatacatgataaggatggaaattacagtgtctgggctggaacaacgatgcaatccattgttgaaaacacaaaagcgccaatagtttttcatatattacatgatgacacattgaacgaaataaataaaaataagctgagttttattgccgataatagtggaaatgatatagaatttcatcattttaattcggacgtttttggcacgtttgctgattcaatgaatagatttgcaattggaacaatgttcagaattatgttgcccgatattatgccggatttaaaaaaaataatatatttggactctgatttatttgtaaatacagatattgaagaattatggaacctaaatatagataattactgtctggcggctgctcaggattgttcgacaataagaaattggggaactccatacgctgtagcagcagggcagacaagtcgtgacagatattttaatgcgggtgttctttgcatgaatcttgacaatatcaggaaaaatggaagcctgtttcaacaggttatagattatctgaacgataatccacggacatggcttcctgaccaggatgctttaaatgccatattcagcggaaaaaccttattgatagatgaaaaatggaattattttattgatgaggcaagaaaaaataatgagaaagcagagaaaaaaatatatcattatgctgcaaccctgttgatgctgcatacaaataatgaaattgacagagcctactatttcacaatactgagaaccccatggggagagcagatggaggatggcttattgtgtaattctatgggtagaattgtggatagaacaggtatgctggagaagctgctaaaaaaagttactcaaaacaatatacgactcgtattctatggcggagagaacagctcaataaggaatgcaatgaggctattaaacagaaatttcgatagctgtgaatggcatgagcatttaaaggagaatgagattatctgtgatgataatactgtctatatagtctcagcagaagcggacgatggcaatggactggaaatactggcaaatgccggattagaaaatggtgagaattattttataacacagaggtttttacattatacagagggtgggtttgccctatgatttttattactgatgaattaggtaagtttgagaaaaatataatagagctggcagaaaatgtgggatttaaagaatgcaaaacaatagaagccatagatttgttttgtggcatatctgaaagaaacgatgtgcttaaggaaaaagacaggtattatgcattcatagatatccctcaatattggagtgttcgtgcagatggtctaaatggtgctatatatgataataaaaccaaaaaggcaaacatctattttaagaatccgatagagaaaagaatggtcagcagagtcgagtggattgacaggaataatacagtatataaagtagattattacaacaaatacggatatatgtattgttcggagaatgtgagtggcggcaatgttacagtcagggaattctatgatagaaatggtgacattaaagtattagaacagacaggtccaaagacatataccacgtttggcacccgcattagtccgaagagctatagaggctttgctgattatttggaagcttatcttaaatataataaaatttatgatgaaaatatatggctgacaagtgatgagatattaaataaatttgcctgggattatggaaattttaaaatatcatacctgccacaaaatagattaaactcagatttgacagtaataactcagactaacacagcgtttcgaatactgtgcagtgaagagcagcaggtcaattggtataaagaaaattcaaattataaatgcgacagattatattcatatcttgagaataataaatcaaaatttgggagaaaagaagcatttattattacagaatcggatcagcttgagtatattgaacagcttataaatgactttccggaaataacttttcatatagctgccagtaccattatgtcagataaattaacgagactggatataaataataatgttgagttatatccatgtattacggaacaaaagagaaaagaactgtttgaaagatgcgatatttatttggatattaatcattacagagagctatacaatgcagtaaacgaggcaatggttaataatatgataatactagcgtttgacaatacagcgcattcaaaagaattatatccaatgggaaatatttttgaaagcagcaactatgtgaagatgaaagaaactctaaaaaatataataactagtcagacgatattcaatgaatatatagacaggcaaaagaagcaattaaaacaattagctgcaaaagtagttatgggtgatacagatgagagtatttgattttacattacttagtggatatgaattttccggagtcgatgttgctcagggatttagagcaagattgtttgcaaaaaacaatgtaaacgctaaatttatttttacagagctgccgacaattagggatatggaactgtatggttcgcaaaaaataaaacgtggtcagattatgtctgcacatctttttatgaccggaagattagatatgagtttgtctgtgaaaaaagaagctcttttagaaaatgaaaaagaaaactatgagtatgacaatatagatgaggatggaaaggtgattcgtctatataattccggtgaaaaatcagttgaaatattatgcgatgaagatggatttgttataaatgaaagtctctttaaaaacggaaaaaagtatttagaaaattattatacagacagtttgtcatatacagagctgtataattgggataatgattcgaacgatggcttaaatctaggaaggagaattttttggaacaaacaaggacagatggtttatgaacaatgtatctataaagataatgttgaatatctgtttaaaaatggtgaagttatagacaatgtagagtttctagaaagatttgtaaagacacttaatctttgtgagaatgatatatgtataatggatagagcgggatatcttgattatatacagcctctttttgaaaataaaggcaaatcaaagctgatagctgtattacattcagatcatttttacaaaatatatgaggatgaaagctcattatacatgaactatgagtattattattggttcaaatattcagaggcaatagattattttgttgttggtacggatgaacataaaagaagtctggaagcatttttaaaagagtatgattgttttgttccgcatattgcagctattccaccgggcgccataccagaaggcaaacttaaaagtaaaaataatcgttggcaaggcagtataatatctgcttcaagacttagtccaaggaaaggtattgatattcttattaaaagtgtgataaaagctcatgagataaatcagacaattaatctggatatatacggaagtggcaatgatgagtatacttcatatttacaaaatatagttaaagatgctggtgctgatgattatattcactttaaagggcgctgtaatcttgaaaagatttatccacactatgaattgtttgcatccttttctttgtgggaaacatttggactttcactcatggaggctgttggagacggactagccatggttggactggatgtaagatatgggaacaggctttttatacatccggatgaaaatggctatctggtggattttgatattgaaacagactatcaaaataaagataagctctgtgaaagaactgcagcagcaatagttaaaatatttgaggatgatgacagattgaagaaattccatgaaaattcttatatgattgctgaagaatataaggagcatgtaatagaatcaaaatggatgcagcttataaaaaatataccatagctcaatccgtcaaacttaattttatagagaaatgcagtaacatgaaggtaaaacatcctaaggattattggcttgagtatgagagaaaaatgttggaaaacatcaatgaaacaacaggcttgtagacaggagtatcaatgaaaacacacattactacattaaacaacatggcaggaactgccagtctggcacatagaagagtattaaaggtggcgcagagtattggctgtcatgaaatgggcttgtctttttatcctttaaagccagactatgcaaaggagatagacaaacgtcttgatgggataatagcgcctcttaactatggtgatattgtgatttttcagtatccaagctggattggggtgaattatgatgagagctttgtaaacaagataaagtcgtaccgggatacaaagctgataatttttgttcaggatatacaaaagctcatgtttgattctgagcaggcaattcttgatatggaaattaaaactctcaataaggcggatttacttattttgccatcaaagaagatgcatcgctatctgaaagaaaatgggcttgatgagaagcctgttatctatcagactatctgggatatgccatcagacatttgttttgtggatcatgctgtaacgagatgctttcactttgccgggaactataatcgttttccgtttctggcagagtaccatggcaagacaccgatttatcaatatgatgcaaataagccggacagagaaaatgatgacagcttttgctggagagggtattttgagcaggaaaagctaatgcatgagctttccaaaggtggctttgggcttgtttggagtgatgacgaatattttgacagatattattcgatgaatcagccgtacaagctcggtacaaatctggcagcagggataccagttatagtaaaaagaggctgtgttcatgataaatttgtcgaaagaaacggtctgggatatgcagtcgatacgttggatgaagctgataaactggttcagagtattacggatgcagagtatataaagctttaccataatgtgaagaatattcaaaagctgatattagatggcgcatatacaagaaaaacacttcaggatgcaataattgaggttttggaaaatgcctgtacaccggttgaaaacagatatcaagatcatatatagatttagcagacaaatcaacagtgacaggatatagtatttgaccatgatcaggtgtatgaatcacagatagttgctacagtggaataatggggaagagattatgagcgtacatattacaaaaacttataacataggcggattgattggtctccgtcaaaatgcagtgaaaaacgctggtgaaacacttggctttaaagaaatgagtttatttaaatttcctgatgcatatgatagtgatgatgagcttcatgttaggatggatggcataatcgcatcactttgtccggaggatatagtgatttttcagcatccaagcggagagagtcccagatacgatggatttttatttgagcatttaagaagatatcatggaacaaaaattgttgcgtttatacaggaaatagcattcgatagagatgacagtgagtattctttgagtgatgaaatcacgctgcttaacagggctgatatgtttatttttgcctcagctgcgctgcgggattactatatcgcaaatggattaaaagaaaaaccttatctgattcagaatataccggattatatgacagacatttgcgcaaatgagcataaaaataaaaaactatatatcatggcggaaacgagtcaaaatgaatatccattgaacaatttgaatatagaggtggtgcaatatgatgagtaccgtgccatggaatctatactcaggttgtcagacggaggctttggattgatttgggatgcggatgagcaggcgcttggactttatatggctgccggaatcccagtgatagttaaaaaggggttgagctgtgaaaagtatgtgacagataatgaaataggagcagcagcgacagattttgaagatgtataccggatagctgtatcagaatcggaagataaattgagtcaatactacgcaaatgtcaaaaaactgcaaaatttgttcataaatggaatatataccagaaaattattgctggataccttgattatgtgtggagaaaggctataatttggcggtatataaatgtttttatacgattttagatacacctaggagtttatatttatagtgttaaagaggaaaactatagttatgtccggatgaaagaggattaggaaacagataatcaagtatccggattcatgtgaataaggagagactatatgaataagaagaaggttgacagtattttaaaaggtataaccgcagcaggaattgccatgggtggagtcagctctatccagggggctgatatggttatggctgcaattaatgaatcggcagcagattccaattcattagttgacgcaggctctttgtctgagagcgaacgtacagagtatagcgagagtacaacacagagcatgagtgaaagcgcttcagagagcactagcgagagtgagagcgtgagtgtaagtgaaagtgaaagtgaaagtaccagtgaaagctcaagcatcagcgaaagtgctaagcagagtgatgcagaacaacagagtggtgataatgttgtagcggctacatacacagatgatgcagaacaggatacggctgtttatgctcgaatgagtggaatgccgcagcttgcaagtaatgatacatatagagatggttgtgtatcaaataaggtacatcatgtgactaagattacggaaagtaattattcgcagtataagggggatacattgtttggaacaaagtacaatttaatccaaacaaaggaaaatcattcatttggaaaatgggaaaagtcgagttgtaaatatagaattcaaaattctaatacgaatgaatgggaatattttaatgactttaattctgtgacatttaattggacagaaggaccttggtgggatgaaactagatataataaaacaggtgaattgtatatatgtgacggaaatgcgtttgtattaaaagtgtctgataatgaatgggtagaatttagaagtagtagtacaggtggagtacatacgtataaatacgcatataagcatggggattccattgatttattggatagtgcagatccaaactatgagaagagtgaatcagtaagaatatcagagagtttgagtgttgaagcaagcactagcgcgtcaacaagtgcaagtacatcggcaagtacaagtgcatcaaccagcgcaagtatctcagcaagtacgagtgcatcgacaagtgcaagcacctcagccagcacaagtgcatcgacaagtgcaagcacctcagcaagcacaagtgcatcaacaagtgcaagtacctcagcaagtacgagtgcatcaacaagcgcaagcacctcagccagcaccagtgcaagtacctcagcaagtacaagtgcatcaacaagtgcaagtatctcagcaagtacgagtgcatcaaccagtgcaagcacctcggcaagtacaagtgcatcgaccagtgcaagcacatcagcaagtacaagtgcatcaaccagcgcaagtacaagtgcaagcacatcagcaagtacaagtgcatcgaccagtgcaagcacctcagcaagtacaagcgcaagtacaagcgcaagtacatcagtaagtacgagtgcatcaaccagcgcaagtacatcagccagcaccagtgcatcgacaagtgcaagcacctcagcaagtacgagtgcatcaacaagcgcaagcacctcagccagcaccagtgcatcaacaagtgcaagtacatcggcaagcactagtgcctcaaccagtgcaagtacctcagcaagtactagcgcatcgacaagtgcaagcacctcagctagtaccagtgcttcgaccagcgcaagtacatcagccagcaccagtgcctcaataagtgcatcaacaagtgcaagcacctcagccagcacgagtgcatcaaccagtgcaagtatatcggcaagtacaagtgcctcaaccagtgcaagtacatcggctagtaccagcgcatcgacaagtgcaagtacctcagccagcacgagtgcatcaataagcgcaagcacatcagcaagtactagtgcatcaacaagtgcaagtacatcagcaagtacgagtgcatcgacaagcgcaagcacaagtgcaagtacgagcgcatcgacaagtgcaagcacctcagcaagcacaagcgcatcaaccagcgcaagcacaagtgcaagtacgagtgcctcaaccagcgcaagtacatcagcaagtacgagtgcctcaacaagtgcaagcacatcggcaagtaccagtgcctcaacaagcgcaagtacatcggcaagcactagtgcatcgacaagcgcaagtacatcagcaagcacaagtgcctcaacaagtgcaagtacatcagctagcacaagtgcatcaacaagcgcaagcacatcggcaagtaccagtgcctcaacaagtgcaannnnnnnnnnnnnnnnnnnnnnnnnnnnnnnnnnnnnnnnnnnnnnnnnnnnnnnnnnnnnnnnnnnnnnnnnnnnnnnnnnnnnnnnnnnnnnnnnnnngtgcatcaacaagcgcaagcacatcggcaagtaccagtgcctcaacaagtgcaagcacatcggcaagtaccagcgcatcgacaagtgcaagcacaagtgcaagtacatcagctagtactagcgcctcaaccagcgcaagtacctcagccagcaccagtgcatcaacaagcgcaagcacatcggcaagtaccagtgcctcaacaagtgcaagtacctcagccagcacaagtgcatcaacaagcgcaagcacatcagcaagtaccagtgcctcaacaagtgcaagtacctcagccagtacgagtgcctcaaccagtgcaagtacttcagcaagtacaagtgcctcaaccagcgcaagtacatcggcaagcactagtacatcgacaagcgccagcacaagtgcatcaacaagtgcaagtacatcggcaagtacgagtgcctcaaccagcgcaagtacatcagcaagtaccagtgcctcaacaagtgcaagtacatcggcaagtacaagtgcttcaaccagcgcaagcacatcggcaagtacctcagcaagtactagcgcctcaaccagtgcaagtacctcagcaagtacgagcgcctcaaccagcgcaagcacctcagcaagcaccagtgcctcaaccagtgcaagtacatcggcaagtaccagtgcctcaaccagtgcaagcacctcagcaagtactagcgcctcaaccagtgcaagtacctcagcaagtacaagtgcttcaaccagcgcaagcacatcggcaagcacaagtgcatcgacaagtgcgagcacatcggcaagtacaagtgcttcaaccagcgcaagcacatcggcaagtactagtgcatcgacaagtgcaagtacatcagcaagtacgagcgcctcaaccagcgcaagcacctcagcaagcacaagtgcaagtacatcagctagtatcagtgcttcgaccagcgcaagtacctcagcaagcacaagtgcatcgacaagtgcaagtacatcggcaagcacaagtgcatcaacaagtgcaagtacatcggcaagtaccagcgcatcaacaagtgtaagtacctcagctagtacgagtgcatcaacgagtgcaagtacatcggcaagcaccagcgcatcgacaagtgcaagtacatcagcaagcacaagtgcatcaacaagtgcaagtacatcggcaagtactagcgcatcgacaagtgcaagcacatcagcaagcgagagtgcctcaaccagcgcaagtgagtcagagagcacatcagcaagtgagagtgaatcaaccagtgcaagtgagtcactcagcacaagcgagagcatcagcactagcacaagcacgagtcagtccaatgcaaatgttgtaccgacaccggctccaactcctgcaccggcagtagataatgctcctgcacctgcaacaactatcacaccggctgctacacctcttgcagcagctacaccggtagcaccggcaacacctgcaccagcagctcctgcggcaccggcagcacagaatacaccaattcaggatgcacaggttcctcttgcagtaaatgaggaagacgataatcttcagaacatcgaggatgaggatacacctcttgcagcaggcggaacagccaaggacggtatcaaaacatggtggtggtggattgcagcagcagttgcagctatcacaggaaagggtgtttatgacaaccgcagaagaaaacctgcaaagagcgacgattcagaagataattctgatgagaaataaataattaatagcaatactaacaatattgttttataatattagtgaccatctgtagcggatggtcactaattcgttaaacgaaattactttgtgaggaaaggtgaattccttgaagcagaaggatagtataaagaagaaaaaacaaaaacaacagaaggaacacgtattattatataagcttttatattcgttcatgaccatgctcgtgtacatggtcggcagaaatataccactctacgggattgatatagatgcatatagcaatgtaaacgtagatgcgcagtccatacttttacaggctatttcaggtgatatgaagaactgttccattttcatcataggcttgtggccgtacatgctggcatccatgcttgccatactgatagttgcaatcatatcgcttgaccacaccagaaagctgtcaccgaagaagataaacatatggacagttaccatcatgatgattatagcggcggttcaggcatatcacaaaacacagacacttatgtatagagttagtggatatgaacttatatggaataagataatagttttcatacagctcatcgcgggtatgctgatagtggtgtatatgtgcgacagagctaccaggtatggtatcggtggcaaggtgagtgtgttcatggtcaatatagtcagtggtatgatgaccatgtttacaggaaagccgcttgagaagctgacactgcctgtagctataggcgtggcagagattgctgtcatgatagtacttgagaccactgagaagcgaatagcagtacagagagtttccataaacaatatttatgcggataagaactatatcgcttacaagctcaatcctgtcggtgctacgccacttatgtttgcgtcagccgcttttttgcttccacagtttatgtgcaatggacttcattatctgtttccggacaatgctgatattcagtggtggatggacaatatgaggctcacatcaccgcttggaattgtggtatatatggtgattatatgtctgcttacggttatcttttctatggttatgctgtctccgggcaggatagcagatgatctgcttaagtcgggtgattctatacaggatatatatgcaggaaagcctacgaagaggtatctgattggcacagtgctcagcttttccgttatcagctcaataattatctgtatatgtcagggtggaccgctgtttttacagtttggcggatatgtggacgcatcacttgccatgctgccgtgctctatcatgatgacgacagggctttggatttcgctgtaccgcgaggctgaggtgtaccggaatatggacagatatcatacattcatatgattaaagggtcaaaaggtatcatcgatgcatgcttgcatgcaattcgatgtataccttattgacccgcactacaccgagaaagtagcaatttgctgcggggacgcagaaaattagcggatttcgaggtgtagtcagattacgggaatgcgtagcatgtagtaatctgattaatcataaattaggaggaatcataatgctatattttataccggcatggtataaacagaatatgtggtgcgaaaacgagcagcagtggtataagcgcaggctcaagtcagagtttgacgagactataaagcagattactctttttcatagaaatgtggacaggccttacaggattctcgcgctcggatactcgccaaatttcaggcattttctacacaggcagggcatgtaccgctcaaagtactggtcatgctttgatgcgatagcgcaggtcaggagaaagaaggtcgctgtgctgtcttatcatgatatcaagtggccgaaggggctggagtttgtatattcgcccttttctataatcgcattacagggtgatgtgaagtatgcgcaggtagagtttggtgaggatggcaatccgatatccatagatatgtttgaggatggcaaaatctgcaggcgcaactattatgatgacagaggctttgtttccagtactgttatctatgaaaacggcatagagcagtatcaggattttttgatggaaaatggcatctggaagatacgtgagtataaaaatgatggtcatgtgattgtcaatcagatgtgtccggactatgatgtggtgcctgatgctaagagtggtaaagcaggtgagccggttgagatgcgctttacaaaggctgaatatgacagccttgaagcggttattgaagaggtatttgcaagctatgtgaatctcacaaggcagggtgacagctttttcgtggcgatgcatccgcttcatatcagggttgcagagcatgtgcttaaggggaaaagggttattgctacattttttgaaaatagatttgatttcacgcagacaacacaggcagcggattttttagagcatgcggaaaatatcattacggattctgattatactacgaagcttattatggcaaatctgggtgcagtaaataacaagccgttcagattacatatcacagatattccaccatatgataccaggatggatttcggtatcagctcgcagcttcgggtgcagaacatcctcgtgccggttgatggactgactaaggatgcatttgctcagattataaaggggcttgcggattatctgaccattaatgaccttgcgagagttcatttctttacaagagatgcctcatgggggcatgaggatgctataaagaatgatacggtaaagcttcttgatagtatgggctatgattcccgctgggtaacaggcgatggtgaggcagctttaggctttggcggaagtggggctgatgcattcgctgagaatgagctgggggatatagaaaaaccggtggagcagagattttttgtggatgtgtgtgtggatgagcgtgatatcagcaagtgtatcaacgaacagagagtcatccttgatatgagaggtacgatggatgtgttcgtctatgtcacagctatcagcaagggcgtgccgagaatcagcctgagtgcagaccagtttcttatttcagggaaaaatggaatggtcatagatgatttttcagatatcggaaggagtctgacctattatctggacagttttgaaaactggaatcaggcattggtggagtgctatgagcttggtcagaaatataccacatcggtgctgcttaagaagtggagaaaggtgctaaatttcagtgagtaagattcatgttttatatgttggcgatgacgactggacaactaaatacagcattccggacaatatagagtttgaagtgtacgagtctgatgagagtgaactaacggcaaacagacctgcgagaaagctcatggatttagttattcttgacagggatataacactttcagaggaaaagaaatttacgaagtttacaaggggctactgtctttttgcgacggaaaatgtgcagatgctaaacagcgcgacgagcagatatttcaaggcacgaatgggacagtatctgtataccggcgatgtgcagtattttctgtctcatgaggtgagaaattactatccaaatccttatggtgagaagtttaatccggccaagcttgctatcagtgattcctttacaggaagggtatcatgtgaaggaaactataacctgtttctggatggagagtttggagaggatttttcacagattgcctactggagatataatatcccggtttttgagggacagtgtattgatatgtatcttgagtatgagaaaacaggtgatgttgagattaagctgagaatatttcagttctataacggctcgattggtgatataaagcaggtctgggagcttgatgaggaacagcttcaggatgttttcagaatagataatgaatcagattatggccctgtttttgtttctatccttgcaaagggcaccggcagcctgaatatcatatcacttcacgacagacattcccgccgtgggcacggatttttcctgcccggaggtgagaggcttgtctcttctaagggagaggaagtgtttgtatactttgagaaaggcgatatgaagccaccacttgctgtctatttctcaggctataggactcaggagggctttgagggctactatatgatgcgaggcttcggatgtccgtttattcttgtgacagacccaagaagtgagggtggagccttttatctgggagacagtgaatttgagcagatgattacggattatgtgactgataagctcgatgagcttggccttacaaaggatgagctcgtgctctcaggagcttcgatgggaaccttcggttcactatactatggctcaaagctttcaccacatgcactgcttcttgcaaagccacttgccaacatgggaaatgtagcacgaaacgagcgaattcttagagccggaggctttgcaacctcgcttgatatattgatgaaaaattatgacagtctctctgacgaggcgatagagcagctaaacaacaggatgtgggacagattcgacagtgccgactggtcgcaaacaaagttcatcatctcatatctgtatgaggatgattacgacccggatggttatccgagcattttgtcgcatcttaagtcgagcggtgttgaggtgtatggcaagggctcacacggcaggcatactgataattcggcaaatgtcatggcgtggtttaagagtcagtatgagaatctgctgcatgatgatttttcgagataggcaaataaacgttgccggtcacacagtcaggtgtgaacagtaacaggaaaacaaacattaagtgaacaatagtaagacaggtaagtattatgtatggtgacacatggcaggtccgctggaaggaatttctatcggactcgtatgtatatggatctaaaattgaatttaatgaggatggttcagtctcttataagaaccgcctcatgccgccgggcacggtgattcacacatggtattctatgacgaatttccaggggaataggatagagccgtcgcttccgctcatcgatggagagcgggcatattccattgcggtgaatattgactatcacaacagtgagagtgaggcactgatgcttcgtatcatattttttgacaggtatgatgtacaggcgcagagtattattgtccgcgataaaaaggcgtttttcaagccgtccatcaggacctacagctacaggatagagctgataaatggtggaaatgctgattttacattcaaatcactggtgattaaagaggtttcagaggaagagtttgatgcagagcaggaaagaattgagagacttaaagaggactctaacaaaagtaagaaaaagcgaagaaaaaataaaaaatctaagtgatgaagagctttctgcactgacagagcagtttaagagcaggtatagcgatggggaatcgcttgaatcgcttatgccggaggcttttgcagctatctgcgaggctgattacagggtgcttggaaagagaccgtatgatgtgcaaatcttagcggcagcagctcttcacggtggatatctcgccgagatgaatacaggtgagggaaagactctatctgccacgatgccgctttatctgaatgcgctgaccggcaagagctgtatgctcgtgaccacaaacgagtatctggcatcgcgagatggtgctgagatgggagcggtctataatttcatgggtctcacctgctcatatccggatgcggatgatacgaaaaagcaggatgatgacgagaaaagacagttttattcggctgatatcatatacactacaaatggcgcacttggctttgatttcctttttgacaatctggtaaagaaaaaggaggacagatttctctgtgatttccattatgtcataattgacgaggctgattcggtgctgttagactctgcaattatgccgctcgtcatatcgggagtgccgagagtgcagtcgaacctgtacgatgtatgtgattttttcgtcacgacacttgtggaggatatagactacatagaggaggataaggccgtctggctcactccaaagggtgttaagtttgccgagagcttctttggcatatccaatttctacggtaaagaaaattttgagataaacaggcatgtcacgctttctcttcgggcgcacaagcttttgaagaacaaaaaggattatgttgtcactgacaagaaggaggtagagctgtttgatggagcgacaggccgtctcatgcacggtgtcaagctgcgtggcggtcagcatcaggctatagaagcgaaggaaaaggtggagatatcgcaggaatacagaactgtggcatccgttaccttccagaatctgtttatgatgtttgacaagatggcaggtatgagcggcacactcatggatgcaaaggatgagctttttgagacctacggcaagcatgtggtgaaaatacctacaaacaggcctcttaaaagagtcgacaggaaggacagatgctttaaaaacggccatgaccagttctggacagcagtggatgatgtgataaggcttcacgagacaggccagccggtgcttgttgtgcttaattccgttacggatacggatcttttttcaaggcttttaatagagaaaaatatcccgcacaatgtactaaacgcaagcaatgctttctgggaggcacagattatcgcaggcgcaggccagctgaatgctgtcacggttgctacgacgatggcaggaagaggaacagatataaagctcggagacggagtgaaggagcttggaggcttagctgtcataggtataggaaggatgaacaattcaagatccgagaggcaggcgaggggccgcgccggcagacagggtgatccgggcttcagccagtactatgtgagcctggaggatgacatagtgggagctgaggatgatgacaagctgcagcgctatatagatggcaaaaagcgtatcggaaagcgcaaaataaagcgtattgtcaaccagtgtcagaagcttagtgtggagtctgaggagatgaaccgcaagaaatcacttcagtatgaccaggtcctccagcgccagcgagacttaatctacgcaaccagaaaaaacctgctcgacggcgcaagcgtcgagcaggagaagatagtagagattgcgaaggagaatatctcagacttcgttaataattttgactgcatacagagtaataagaagcatggcaggcgccgtggcagaaagaaagataacgataaaaatacgaatacagagcaatacacatccatactaaacagatacattcttgacaacatctcctacaagctggatgccggtctgactttgtctgacatgcaaagcgccgccactgttagcgactacctgatgcttcgcgtgtatcaggggctttcaagacagcgtgagcgcataggcgatgaggaggcttacgagcagtttgtccgtgaggcaactctaaaggcggtggatgatggctgggttgagctgattgactaccttgagcaactcaagtatgcggtagcgggaagagcatccgcacagagaaatgttatgtttgaataccaaaatgaggctttcgagtcgtttttggatacagaaaaagcggtaaaatgtaatatcataaggaatattttgcttagtgacgtgaaaatcggcaaggatggcaggctgcaggtcatctacccatagagacagtgtaatatcaatagtttgacagatacgaggagaatcatatggtatataacttcaatctaggaataggctgggcttcaagcggcgtggagtacgcacagagctacagagcgaatctgcttcgcagggcacacattccggcaaggtttattttcacagatatgtttccaactgaaaatatagagcacatgacaagaaatataggctttttggatgaggaagtgatatggctgtacacattttttacagatgtgaggacatcgcctgtcacctttacgctaaaggagcttgaggctacgatggcagaggaggattataccttttccagagatggcaagacatgcaggtatcagtttaaggagagcggcaggttctacacctgctacatggtcgatgatacaagtgatctagtgcacagagtcgagattgtttcaaacggatgcctgatcaggaaggatttttacacctattgcaggaccttcagcgagtactatgctccgcttgacggcaaggctcatctgtacggcaggacatttttcaatgaggatggctcggtgtgctacgaggaggtcatagaggatgacagcaccttttacaggatcggagcgcaggtgctttataccaaggctgacctggtcggctacatggtaaagaggcttaacctcacggctgatgatgtggtgatcatcgacaggacgacaggcatagggcaggcaatcctcgaaaactgtggaccggcgcgcgtaggaatagtggtgcatgcggaccatttcagcgagggcggcacggatgatgattacatactgtggaacaactattatgagtattcgttttcacagactgagcacatagatttctacatcacagcgacagatgcgcagaatgagcttatgaggcagcagttcaagaagtactgtggaaaagagcctcaagtggtgactattccggtgggcagtcttgatgagcttaaatatccggatgagccaagaaagaggcactcgctcatcactgcgtcgcgtcttgcgactgagaagcactgtgactggctggtggaggccgttgtaaaggcaaaagaaagcgtgcctgatatttcacttgacatatatggaaagggtggcgatgaggcgaagcttaaggggcttatcggcaggctggactgtgccgattatgtgcatttgatgggacagcagaaattagatgatgtatacaagcactatgatgcatatgtggcagcttcacagagtgagggcttcgggctcacactcatggaggccataggctcagggcttcctatagtgggctttgatgtgaggtatggcaaccagacctttatcgatgatgggcaaaacggctacaggattccaatcactgatgagatggatcagaaggagaagataaagctcctttctgagcgtatagtgaggatgtttacagaggatgatatggatgcattttcaggacattcatatgagaaggccaaagaatatctgactaaggaggtggttcacagatggatagagctgttgaagtaacacacgaagcagttggtatcacactgctctttgatacattttcaggcgagagcaagaatctccttgagtcatttaagaatgccggtgctgcctttcatgcagcagtcattgaggatgacggtttcctgccggatgatgtgatgagcgtgtatggatttttcttaggcgattatcgggaggctgacagcttaccggggaagccgctgtatttcaatcagatacagattcctgattactggcgcatagagggagataattcatctgcgaaggtcatggaccgcaccagggagcgagcgaggatatttttcacggagcctacgcacaggcggcaggttaagattgttgactggctcgatgatgccggtcaggtcaggctttcagagcattataacaggtatggcgcgatcttctgtcacacggtttttaataaaaagggacagaaggcactcaggaagttttttgacgtgacgggcagggagatgatagtggagaacttcgtcaccggtgatatactcgtcagatggcaggataaggactggattttcagaagcaagacagactttatagcgtttttcatcaggtgctcagggctggaggatacagcggtttatttcaactcgctgtcatatccgttttttgcatcacaggcgcttgcgccaaacggctttcgcgacgcacttttctggcacgagccggtgggagatgaaatacccggcaatatgcagattatactgcatgatcagggaacgagggcaaagcgcgtatttgtatcgcgcagggagtcctacgacaggcttatagcacttggtgctccttccgataaggtgaagcagcttggatatatctacagcttcgtcagggaaaataagcacaggccgcacatacttgtatgtaccaattcagagaatgtggggcatctgacagagcttgcgtcactcatgccgcagatgcattttcatgtggcggccatcacagagatgtcgtcaaagcttatgtcggcagggcagtatgacaatgtgtcactctaccctaatgtgaagatgtccgtgctggatagtctttttgagaagtgtgatttctacctcgatatcaatcacgagggtgagatagtggatgcggttcacagagctttcttaaacaacatgcttatagtgggctatgaggagaccatgcacaacgcatattacaccgcagacacgaatacatttaaggagagcgagtacgctgatatggcggaggcactcaacctgacactggctatgccgcatctcattgatgaggcacttgctatgcagaaaaaggctgctgtagcggctgatgcaacagactacatggaaatactccatttgtagtaatacagggtttatgaacagaaaggagcttaatatgagtaaaaacactaacaacaatcagacagtagacgagaaaaagggtaaaaggacagggcttacaatactgggctatgtgcttgtgatcgtggcacttcttatagtgcttccggttgtgcttccaccgatatttggctatcatacatatctttcgggcacagatcacacaggaaatatctcaaagtatggcagtgtggtatatttaaagactatcgacgaggcatcttacaaggatggcaatatagtagccatcgaatcagctgattcatcagccagaagggttgattcttattatgtagattctaatgattcttctgcaaaagagattgcacttcgtgatggaaatggtgtatcatataaggtagttaaagggcaggttatcgcaaagactccgtttataggatacttaagccagctgtgcttttcagcagttggaattattgtcacggtagtgatttttgctgcaggtgtagcaatcatgatgtatgtaaacaaaatcagcaaggaaatcaacaccatggttgaacagcagactgcatagtgtgtctgaattcccatctgcggcattagaaaacctgactattataaagcagaccttatgtttgcggaataggataagttatggatagatacagtgtgagtaggacaaagaggtcattgttttatttaatgatggcctttttgattgttggatttataattgccgagtgcatattaccgagtgagagaagccagtctgtaagtgataataatatcacctacgagggcagctttacatgggagaagtccgatggtgaaagggagactattgaagtacccggcaggtacgatgtcaagccgggggatacgatggtcataactactgttctgcctgatgatttcaatgcaagtgtcatggcaatcagagcatcacttcagacagtcagattttacgtggatggcagtctgagagcagagtatgatacaaaggacacgagacccttcggcaaggattccgcgagcagatatgtattttgcaatatgtcggaggatgatgccggcaaagagctgcgcattgagctgacaagccatgcatccaactattcaggcgttgtaaatacagtatactgtggagaaaagagcgatatatggacaaatatatttcataatagctcaagagagacgattatagcatttttcattttttttgctgctgtagtgtctgttatgttcagtatagcactcagtattgtatacaagacacattttgacatggagtatgtaggctggtgtatgcttcttggggcaatatggatgcttggtgaatcgaagctgcgtcagatgctggtgccgaatgtatctgttttggcggctatgtgctttgtggttattctgattagtcctattgctgtttcgatttatattgacagcatacagggcgggcgttatacaagagtgtatacatgcatagaggcgcttgcggctgtgaatttaattgtctgcacatcactgcagctttttggtgtgtgcgattatatagagactctgccggcaggacagggaatgcttgctgtctgctgcgtggtcgtcatcacaacatttatcattgatataattaaacacagggctttgggctacagacctgagagggttgccatgattgtggcacttgttctggcgcttatagaggctgcatctgtgtactttgttgtcactatgtcaggtttctttatcggaataggccttattgtgattttgtttgtcaatatcatagtcacaataaaaagaatcagcgagatagaatataagcgccagaaggaagagagtgacaggcttagaaatcagacagagagagtttcccttcagatgatgaagacacttgctgctacaattgaggcaaaggacgattatatgagaggtcactcatacagagtcgcagagtactctgctctcatagcaaagcagcttggctggagtgagcatgaggtggaaaatcttagaaatgctgcatatctgcatgatatcggaaagattggcgtgcctgatactattttaaataagccgaccaggctgactgatgaagagtttgccgccataaagagccatactgtgatgggcgcagatatcttaaaggatattaccctgttagaccatctggtggatattgcaaggaatcatcatgagcgatacgatggaaagggctatcctgacggactggtgggagaggagataccgctttctgcccgtatagtgtgtgtggcggacagctatgatgccatgaggtcgcgcaggatttacaggaatgctctgcccgatgaagaaatccgaagggagcttttggataactgcaacactcagtttgatccacagatttcgcgtatgtttgttgatatgcttgacaatggcatggttgtgattgatgaggataatccggcggctcagggctaccgtgataatgcggctatcgagtcagtggcagacaaattcatatctgaggtcatgaagaccatgagcagtcaggaaaaagccgatagtgttgattatctgacaggactttacatgcgaagtcgtggacagcaggtaatagcagccctgatgcaggataatgatggctgtcttgccttcatagatatggataatctcaaaaaagtcaatgatgtgcatggtcacaaggcgggtgacagggcacttaagcttataggtaatctccttgctaaagagactgagaatgagacctttgcagcctgcaggcttggaggtgacgagttcctcatctttatgccatattctgacagggcaagcgtggagagtgttataaagcgcatatttgaaggcttcgagagcgccagggaagcagactgtgagataaaggaggccgctctttcagcaggactgtgtatgacgacaaagggagccatgtttgaaagtgactacacaaaggcagataaggcactttactatgtgaagcagaactgcaagggttcatatttcttctatgagcagctcttagctgacaataaggagaatacaaatctgagcgtggatttacgaaacgtggcaaagcttttaaaggagagtggcagctatacaggtgcgctggatttaaactacagagagtttgcaagaatctatgagttcgtgaacaatgtaggagatagacacaagcacaactgctatctggtcatggtgactatgaacactctgccggagcagcttgcagatatcgagaaaattgagaaggcacttgactgcatggagcagtctatccgcagcaagatcagaaaggtggatgtctgcacgcgctacagctcaatgcagtatcttatcatactatttgaaccacaggaaaatcagattccaaatgtgatggagagaatctttatgcattactatgagctctgtgacagagaggatttcaagccacagtatgagtatatcaagatgactgagccaaaataaaatagggattgttaaataatagtcaatgtggtatagttttcttcgaacggtattcgaaggaaactgtatcatggaggatgtgttgtcaccttatgacagagcatatccggcagacacaataaggccaaagcgaattgctgtatcagaatatgaagcaggcagcaaagtgacaggcgcgcacaggataaatcgaccgcagccatacggcacatggcggagattatatcggctgcgatataggaatggtctgaccggcttggaaagaaggtggtagcatgaaaataggcataatcggcgcaggcagagtgggttgttctataggtaaatacctaaggacaaaggacatagagcttgcaggctattatgacgtggattctgtggcagctaaggaggctgcggagtttacaaggacagagagctttgattcgctaaagcaactggcggatcaatcacagattatatttatcaccacaccggattcatttattataccggtttgggaacaattaaaagaactgtctctaaggaatcagattatatgtcattgcagtggcgcattatcatccgattcattttccggaagggagagcatgagtgtatcatgctgttcaattcatccaatgttaccgttcagtaacaaattttcatcatatgagcaattaaataaagcatttttcacagtggaagggcaggatgctgcggttgaggcaatatccgggctgttttcttctattggaaatgaggtatgccgcattgatggcgctaaaaaggcaaaataccatgcagcagcgagtattctgagtaatcaggtgattgctgtccttgacatgggctacactcttttggaggactgtggctttacaagggatgaggcgctaagagccacaggtcagcttgtgatgcgcaatatcgaaaatgtacttgaagcaggctgtgacggcgcactgaccgggccaattgagagaaacgatattgaaacagtgaaaaagcatattgcatgtatgcaaaatgacgatagtgatgatgtcagattgtacaaaatgcttggtgcaaaactggcaaatattgctgaaaaaaagaatcctgataaggattacactcagatgatggaattgctaagaggctgacaataccgtgaatttataaaaaacggattgttgcagaaagacagagggattggacaatgaaaaatacagtagtaacttttaaacaggcaaaggaaaagggcgagaagctcacgatgctcacagcgtatgattattcgactgctaagctgatagatgaggctggaatcaatgcgattttagtgggagactcactcggcatggtggtgcttggctatgaggatacactttcagtgactatggaggatatgattcatcacagcgcagctgtttcaaggggaatcaaggacacactgctcatcacagatatgccttttatgtcatatcagacatcagtatatgatgctgtggtcaatgcaggtcgactcgtgaaggaaggtcatgcgcaggctgtcaagcttgagggtggcaaggaggtatgtccacagataaaggctatcgtggatgcgtcaattccggtatgtgcacatttagggcttacaccacagtcagtaaacgcatttggcggcttcaaggtgcagggcaagggtgaagaggcagcacagaagctccttgacgaggcacgcgcagtcgaggaagcaggagcatttgcagtggtgctcgagtgtgtgccaaaggcacttgcaaaaaaaatcacagagagcataagtataccgacaatcggtatcggagcgggagcagactgtgacggacaggtgctcgtatatcaggatatgcttgccatgtatgcaaacatgaagccgaaatttgtaaagcagtttgcacaggtcggaaaagagatgaatgaggcattcacagcctacaaaaaggctgttgaggagggaagtttcccaggtgaggagcatacctttaagatggatgagacaataattgacaaactgtactaatatcgaagaatagttacgaagcatagaagaataaggagacataaaatgttaatatacggacaaatcaaacaggttagagaagcagtaaaggaatggaagagagaaggcaaaagtgtaggctttgtacctacaatgggctacctccacgagggacacaagagcttaatcgatgcggcaagacgtgagaatgacaaggttgtagtgagcatttttgtaaatccaatgcagtttggccctacagaggatttagacagctatccacgtgatttaaacagggatgcaaagctttgtgaggatgcgggagttgacattattttccatccggaggctgatgagatgtatgcagacggcttctgctcatatgtggatatgaatggcctcaccactgagctttgtggaaaaacaagaccgattcatttcagaggtgtgcagacagttgtactgaagctgtttcacattgtgacacctgaccgtgcatactttggacagaaggatgcacagcagcttgcggtcataaagcgtatggtaaaggatttaaatgttgacacagaaatcatcggctgcccaatcatccgtgaggaggatggactggcaaagagctcaagaaacacatatctgagcgcagatgaaagacaggcagcgcttgtactgagcagaagcttaaaaatcggaaagcagctcgtagacgcaggcgagaagagcgcaaaagtggtaaaggatgcaattacagcagagataaacaaggagccgcttgcgaaaattgattatgtggatgtggttgattttgacacaatcacaccgattgatgagcttaagggaacaacactcgtggcaatcgctgtctatattggaaagacaaggctgattgataattttatcgcgtagtaggacaagaatgatatatgaaaaagaggtataaaaaatgaattatacaatgcttaaaggcaaaatacacagagcagtggtaaagcaggctgacttaaactacgtgggaagcatcactgtagatacaaagctgcttgaggcagcaggtatcttagagtatgagatggttcagattgtcgatgtggaaaacggaaacagattcgagacctacaccatcgcaggagagccgggctcaggcatgatatgcttaaacggcgcagcagccagacaggttgcagtcggtgaccatgtgatactcatgtgctatgcacagatgacacctgaggaagcaaaggagcatcatccgaaggtagtgtttgtggatgatgaaaacaagatagcgcgtgtgacaaattatgagaagcacggaaagctgacggaggattttatttgatttctgaacatttacacagcattaggaatatagaaaagtttcgttagtaaacaatagaaaaatcaagtctgctgtagtataattatttatcataaatgagggtcaaaataccttttgaccctcataatcatgtatttatgcgggaggtaaatatgtacacagcagacgaaaagagatatgacacaatgagatacaacagatgcggcaggagcggactgaagcttcctgttgtatcacttggcttatggcacaatttcggtgatttttcatcatacgacaacatgaagcagatgtgcttcacagcctttgaccacggcatcacccactttgacctggcaaacaactatggccctgaatacggcagcgcagagaagcacttcgggcttatcctgaaggaacatctgtcagcataccgcgacgagctcatcatcagctcgaaggcaggctatgatatgtggaagggaccgtacggcaactggggcagccgcaagtatctgattgcaagcctggatcagagtcttaatagaatgggactcgactacgtggatatcttctatcatcacagaatggacccagagacaccgcttgaggagacaatgggagcactcgaccagatagtaagaagcggaaaagcactctatgtcggattgtcaaattatgatggcgagaccatgaagagagcctgcgagattcttactgatttgaaatgtccgtttatcatcaaccagaattcatacaatatcttcaatcgtacaatagagcaaaacggcttgaagaaggctgcaagagagtgccaaaagggcatcatctcattcagcccgctcgcacagggcatgctcacagatcgttacctgaacggcattccggatgacagccgtataaagacagacggccgctttttgaatcaggaaaagctcactccacacatcggacagattaagaagttaaatgatatagctgcaaaacgtggtgagacacttgcacagatggctctcaagtgggtggtaaaggatgatgacgtgacaagtgtacttgtcggtgcctcaaagccacagcagattcttgaaaacttaaaggttatggagggcacaggcttttcagaggaagaacttaagatgattgatgagatagtgggagtatagcaagaaataaacataactgttgctatgttaaaaaaaacagtcatagagccaaacgcaaagtcgcagaactactaataagagaaaaaaagctgatttggtgttgactttagttaggtttgcatataatatatatgtagaagcagaagcttcttcggggtgtttgtcagaagaacccgtcataaaaaactgaagaaattgtgaggggttcgtcagatgcacctgtctaaaaaaagctgaagatattgatcttgaagggaactgaaaaagttcccttttttcattgatagatcacaaaggagaagtatggaaccaatattatgttatataagggaaagctattttaaagagcaaaaggatttgaaaaaagttttagatccaggagatactagcaaacaatcgaagcgaacacatttatgtataaaagtggaaatagatagtaaccagtattatataccacttcgaaacaatcttggggatgcagtgcgtaaatttggtagaataggacactctgtgccttcggctaaaagaaaaaatgctggtcttgattatcgctatgcgttaattataaatgatagtcaatacattgaactacagacagaattgaagattccaaattcgcagtataggtgtatcaggaatgatatggatattattacaaaagaatttgaaacatatttgagaggttatgttaaggcggttaaga

SEQ ID NO: 576 - DNA, 26013 bp, unidentified
  source 1..26013: mol_type = unassigned DNA
tcatctgtttttcatcgctttgtacatcaaaattcctgcggcaaccgacgcattaagggaatttatctgacctttcatgggcaatgacgctattacatcgcacttttcacggacaagtctggaaatgcccttaccttcgttgccgataacaattgcacacgcacccgaaaaatcacactcgtcataatccgtgccgtccatatctgcgccgtaaacccacacgcctttttctttgagttcatcaagtgtaaccgcaatattggtcacccttgcaacacgcatatattcaattgcgcctgcagacgctttggcaaccgtgtagcttaaaccggcacttctgcgtttcggaataataattccgtgaactccggcacattctgcggttctgattattgcaccgagattatgcggatcttcaacctcatcaagcacaacaacaaacggagcttcgcccctgctttcggcatattcgaggatatcgtcaaccgttgaataatcctttgccgctgcaaatgctacaataccctgatgagttgcaccaccgctcacataatcaagctttgtgcggtcaacttccttaacgggaattttcttgtcacgggcttttgcgaggattcccacaatcgcaccgctcttttcaccctttgcaacaagaattttgtcaatcgggcggttactgcgaacagcctcgcttacaggatttcgccctgcaatcacatcaggcttttgttctgtattttcaaatctttcgtttttcatcataatcagccttattcggtttcctttttattttttgtgtctgcatgggacacaccacttcattttgctatctattataacataacaattcaaattattaaatacttttaagccatttgtttttaaaaactcaaactctgtacaatgtatcaagagcaatcgctccggagtcgatgtattcgggaattatgccgtacattcccgtttgtatgtcctcaaaaagtatcatgtgcggagggaacactgtaaaactgcagtacacggcaatcaaaagcaacatcataaacacgcagggcaaaaaaagctgttcaatttttctttcaccgtattcaagccttgcgctgagtgcaaacgcagaaaaacacacagcaattgcacaaatgaaccttgacagacctgcactttcaacaccgagtgcatagattagcagatatgtcgcaagacagaatattccgacaaaccacagcgaaattattcttgacacggcaaagcgatggaagcccgagcgttttccgattgcctcaacaagactccacacaaggtaggaaagcataacaaccttagtctgctcccacatactgccgtttacagcaccgaaaaatatgccgagcaacgcaccgtttgtcagcgaataaagatttttgaacacaattatcatcagcggaacaatgacaagcccccaaagcctcattttcacggtttcctttttcataaaacacacctcgccgatgtattttatgagtatagattgtcatatattaccttgccacaatttgaatcgcagaaaaaaatgtttttttgaatcacaaatttgcgatttatttttctaaatttgcacttatacattctgtataactcaacattttaaacatcaatgtggaaaactatgttgaaagtgttgaaagtgatgttaaaaaatcccgatactacacgaaatttacaaagttgtaacttttaacattaaaaaaataggttttccacatttttggatacaggattgtaacggggaaattagattacattctgtataatccacatgtcaagtggtattttttgctttttttcaacatttttaatttacagaaaatgttttataaaatcaaaaaaacaggcacaccgccgtgtacctgtaaatttcgtgttaaattgtcggcttttagtttctgagaagatgaatcgccgtttcagctttctcaataatcctcaaatcattatcataggagcacatttttcgtgcctgttgcaaatcaacccaaatataactgtcaatttcctcctcctgaattttgacattatccgtaaatgcctgtgcaaggaaaaagacaacccgtttgcgaattttaccgaaaggacagtattcgctgatttcacgaaagcccttttcaatcacgacatcaagacctgtttcctctttaatttcacggattgctgtctgatgttcgttttcaccgtcttcaatatgtcccttcggaaagctccaatatctgccgttgctgttctttacaagcagaattttcgtgttctgtctgcttttgtagaagataaccgcaccgcacgacttttcgtaaaggcacacaatgcttttcagcttaatatttttcagttttgaaagcacctgtcgcagttcgggctcataaaacacctcaccgtattgtgagattatcggacgctcgccgtcaaggccgtcaaattcggcaacggcaaccacaacgccctcaaaatattctgttacgggtttgtgcgaaatcacatacgcacttttacagcgtcctgaaacggaggtaatttgtgccgaatacagcttatcgcctatttttccgaacacgctcaccttcacgctgtctgctatcatcggcatacacctccttacaagaatttacccgatatgatatcagttaaaaagtccgctcatactgtcaagctgaacctgagtgttggcactcattacaccgttcataaaaagcacctcgtcaattccgttggttttgcagtaatcaacaagattatgtttgaaatatctgaaatcgataacatgaacttcttcgtagttattggtgagatacggaacaaaagcgttgccgtaactttcctttacaacggcaatcttcttgcctgccgccgcatttttcgaagctgatttcagaaccgtgagggcattatcacccataataaacacaccgtaggtgtttgaaccgccctctgcggcttcatagtagggactgttatagcttgcggaagaaccgtctgcctgtgtgatatccattgttacattataagggaacttccaataacttaccgtatcgctgtcaagaccgtctgccgagttggtaaacgagcctgtaaagccgtcaatcttctgttccttgcaatcatcaagcgaaagaacggacaaatcgtttgtatcggcaaatgctgtgtaagcatagtaagcgccgaggcctgtccaatggtggtcgctcttaaagtagatgtaatctgtattatgttccgcaagacggttgtagcagttaatcggagttaccttgtcggaaagagccgcataagccgccttgatgttgtcagcctgtgaggttgacggagcgtcgctgtctttgagcctttgcggaagtcccatttcggtatggttaggaacaatcatatcataaacctttacggaactgccgaacttgtctgcaaagccgttaattgtctgagcatagttctgcgctcttgcatcatcactgctgaacaattcatagcctattttgttccacacataaatgccgtacgaaagagttccgtttgtattgtcgtcctttatgctcggtgtcataaagtatgtaggagaaagctcgtctgctttgttagctgtcgaagattttgcggtttcgtcgggagatgccgttgtacccactgttcccgtgggaacgcttgcaagggcatcttcctttgaacaacccttaaaaattgaagttataataaaaataataacaaacagaattaccaatgcgctcacaacgataacaattctgtttctggttcttcttttgtttcttctttttacaggtcttctgactggacgctgtgatgacggtcttgcggcatagcttgcagaacggcgctgttgctgtctgcgacgatattcacgggaatcaatgctgtcatcgaaattatcaagatcgaaataatcgtaatcgtttcttctgctcatagtgttactctcccaaactgaagatttttaaattcaatttgaattcaatgaattatataagtgtattaattactcgcagtgtactcctgtttgaatcaaagcaagccttgctctgaccgtaaggacattatcacttagattatacaacagaaactcatcaaaaacaatacaaaaagcacaaaaaatacaatttccgtgaattaacatttacaaatgcaaaataataaattacacattttttgaataaaatcgcagtaaaaacagtcaaatttcttgaacatatatgcaattcgtgatagaattacagggtatggaattttaaaaaatccttatcatcttaaaaggagatatttttatggaatacaggttttccgacagggtttcaagcctgaagccgagtgctatcagagaaatctttaaatatgccgccgatccgagcgttgtatcgctttcggcaggaaacccgtcgcccgatgcatttccctcaaaggagattgcggaaatctcggcaaaggtttttgcagaagatccgatttcggttttacagtacagtgtttcggagggttacactccgctgagaaagcaccttacggaatatatgaaaaaggagcataacacaggctccgacgatgacgacattctcatcacaacaggcgcacagcagattatggatttatgctcaaaggctcttgtaaacgagggcgatgttgtaatctgcgaggcaccgtcattcatcggctcgcttaacacattcagaagctacaacgcaaagcttgcaggtgttcccgttgagcctgacggtatgagcacagaaaagcttgaagaggctttaaaagccaatccgaatgcaaagctcatttacacaattccgaattttcaaaatccttcgggtgttacaatgagccttgaaaagcgtaagaaagtttatgagcttgccaaaaaatacggtgttctcatcattgaggacaacccgtacggcgacctgcgttacagcggtgaatatgttccgaacataaaaagctttgatacggacggaattgtaatctatgccggttcattctcaaaggtaatttcaccgggtatgcgtgttgcttacacaattgcaccaaagccgatttttcaaaagcttgttgtgtgcaaacagggcaacgatgtacatacaaatatctgggcacaatatgtatgcgatgaattcatcacaaagtatgacttcaacgctcatcttgcaaagcttcgtgaaatctacacaaagaaagcgaacttctgcatggagcttcttgacaaatactgcgcaccgaaaatcacatatcataaaattgacggcggtcttttcatctggtgtgatttgcccgaggatattgatatgccgaatttctgcaaagaactcgttctcaaaaaggtttgcgtagttccgggcaacgcatttttaactgacgaaaacgaaacctgtcacagtttcagaataaacttttcaacaccgactgacgaacagcttgaaagaggaatcaaaatcctcggcgagtatgcaaacagtctttaatcacggaggggaataatggaaaatcagacaaaaaaagaggttgtattcagcgcaatacagcccagcggaacaattacactcggaaactatctcggcgcggttcgcaactgggttacaatgcagaacgaatacgactgcatttacgctcttgcagatttgcacacaatcacggtaagacagactcctgccgttatgcgtaagaatataattgacgcttatgcttcaattatggcttgcggtattgatgttgaaaaaagtcttttcttcattcagagtcatgttcacactcacgcagagcttgcatgggcgctcagctgttacacacagttcggcgagctttcaagaatgacgcagttcaaggacaagtctgcaaagcacgccgacaacatcaacgcaggtcttttcacatatcccgtactcatggctgccgacattcttctctatcaggctgacaaagtacctgtcggtgcagaccagaaacagcacattgaaattacaagaaacattgcagagcgttttaacggtatttacggcaatgtgtttaagattccggacggtttcattccaaagaacggtgcaagggttatgagtcttcaggacccgacaagaaagatgagcaagtccgatgaaaatgtcaacggctgtgtacatcttcttgatgcacccgaggttataatgaagaagttcaagagagccgttacggacagcgaggcaaaggttcgctatgcggagggcaaagacggcgtaaataaccttatggcaatttacagcgcagttacaggtctttcatacgagcagattgaaaaggattttgacggcaagggctacggcgacttcaagacagctgtaggcgaggcagttgttgaagaacttcgtccgattcgtgaacgctacgaaaagcttgttgcagacaaggcatatcttgaaagctgttacagaaaagccgatgaaattgcccttaaaatcagcagccgcacaatgggcaaggttatgaagaaaatcgggtttatctaattaaaaaggaactctgccatgacaaaaatcgaaagtaaagcgattaactttataaagaaaaacattcttctgtttttactcggggcagtgagtataattgcgattgtcataagagcctgcggaatagattttcaaagcgatgatttcaacagctttttaaattcgtggtggagcataatcaagctgaatgattttacggggcttgcaactcaggtgggtaactacaacattccgtatcaagtcataatctatcttatgactcttttgccgctaaatgctctgtatgcgtacaaaatcgtatcaataatctttgactttgtacttgcaatttcaaccgcaatgcttgtttattcgtttgcaaagaataaccgacggctcaaagcgatactcacctactcagccgtacttctttcggcaacggtgatttttaactcatcgttttgggcgcaatgcgattcaatttacacctcgtttataatccttgcaatactgtttttgcacaaagacaagccgattgcatcgtttgtgttcatcggcgttgcgtttgcattcaagttgcagaccgtattcatcattcccgttctgctttattactggatttcgacaaagaaaatttcgattctgcatttctttataattcctgcggttgatgtgataatgtgcctgcctgcaattattatgggtagaccgtttatcgatatcatcacaatatatgcggaacagaccgactacggaaagcttattcagatgaactgtccgaacttttatgcactcatatgtgacggaaacgatataacatattattatctgttcaagcagttttcggtctttctgacaattgccgtactcggaattatgatgtgcattatcatctataaaaaggttgatttgaaaaaccttgaaacttttcttctgacaacagcgtggactgtgttcacctgtatcatgttcctttcgtcaatgcacgaacgctacggttatctgcttgacattattttaattgtctatgcggcggtaagtgcaaagcatttgtggattccgattgtgtcaacgcttataagcctgagaggctattgctactatctgttctcctacgagcttgtaagcctcaaggtgaccgcaatcatctgcaccgcactttatgtttatataacattcttgctcgtaaaaacaattttcagagcaaaatcatctgataatatttttgcaaaaacaatttaaaattaaacatattttaaataacaaacaaccgccaaaatccattatatcgggttttggcggttgttatttttatttattcaatgatttttaatttttgcaaatacaacagcaacaagaaatgtaacaaattctgtaattgggaacgcaagccatatgcctgtcatttgaacagcgctgtttaaaagccaaattacggggactaacagcacgccctgtcgcaacagttgaactacaacgccgggcataatactgtctgttgcctgttcataggttgcaatcattgcagaaaagccgctgaacacaaatccgagtgacataattctcattgccggcactccaaaagcacacatttcttccgacgccgaaaacaaaaacaatatctctttcgggaaaatcagcaccaagagcataccgacaatcatcataacagtcgctataattgttccgctcttatttgcttgtttaaggcgaccgtactcttttgctctgtaattaaaccgcattataggcaaacagccctgaatcagtccgttcaccgtcataaaaatcaactgctgaaccttgaaatatgctccgaaaaatgcaaccgccgtgtccgaatatcgcaccaaaaacatatttgcaaaattcacggtgaatgctcccaacgcattcataacaaacgagggcaatccgtaggaaaatatcagctttatcatctgcggttcaaggcagtttttaaacaccggcttaaccttttgttttgtaagaaacagctgtatcaacgcaatgattgttgaaacaacatagcctaaaaccgtggcaactgcagctccgaccacacccattttcggaaacggacctatgccgaaaatgagcaaagggtcaaacacaaaattgaatacaacacctgcaatttgaaaccacatcggagcaatcatattgcctgttgcctgaagtattttttgaattacaatatgcaccatatttggtatctgcataaaaacgcagacgctcatatacgcaattccgtattcaaaaatctctttgttttgcgtaaaagccgaataatagggatttattatgaaaagcgaaaggaaatttatcagcactccgacaactaccgaaattaccactccgagagccgctgcagaatttgccttttgctgatttttctgtcccaaataacctgcaatcaaaacattaacacccacacctatccacacggacaacgcattcataagcgttgtaatcgggaatgcaagcgatactgccgcaagtgcctgttcatttatccccgcaacaaacatactgtcaacaaggttgtatgaatactgaaaaaacattgaaatcagcggcggtgccgacatttgaattataagtttgttgacaggttcataagccattttattttccgttttaacgcccatattaacaccccttgcgtaaaataaaaatcgccatacacccataatgagtgtatggcgaaaataagaatcacatcttagaaaaatccataccaatttatatttatcatatcaatgagttaagtatatcatacctgtaaaaaatattcaagattatcaccaaaaatttactttttgctttcaagccacatatcaagggctttttcgtagacatcaatgcttgtgattccgagattcataatgaatgtgtgatattcctttgcgtcaaagcttgagccaagctcgctttcggctgtttcacgcatatcaatcatcttgaggtagcctacggtataggggagaaaataacccggatttgaacgggcaaggtcatacgcctcttttgttgcggcagtaacgctctcatcgtcagccgaaccgagtgccgttgacatatactccttgactttttcataatcccagccgttgtagttcacaccgacatcgaccatggagtagagaatatagccgagaatatcatttgcgtagataagcttcttaatgccctcgcttgtatcaaggtaatcaagcgtacatttcgaggcatactgcgcccaaccctcggttgcgccgataaagcttaaaatcttgcggacattcgggatatccttgtttgcatttgatgcggtaaactgataaagatgaccgggatagccttcatgggcaagagttgtgtacatctgagtcatacccttatttgcaaagtcggggttgattttgatgatattaacgcttgtatcgtcaattcgtccctgaacatagtacgctcccacattgtcgctctttgcggaatcgctcatataatctgccgtgtaagaggttgtaacgggagtcggaaagtcctcctcgatattctcaatcaaaaattcaagcacctcatcggcgtccttaaagtcgggtttgtagtcctgaaatttgctcaagtcatcctgcgaaacattgctcatgctcattccaacctttgtaaagctgtttgtaaggtatgatttaagctcctcgggagtcatactgctacttgttttgtctttgacgattgccgaataatactttttgccgattttgccgtaaccgcaaagaccttcttcgtttttgcctgattttttgagacttttaagtgctgaatttgctgatttcaaagcaggaatgtagtattcttcaaaatactttttattggtttcgacaacagtctttttctcggaatcgctaagaccgagtgactttattctcgattcaaactcgtcaacaagcacggacttgtcattcttaatatgcttttcgcactcgtcaattgactgctgtgcaatatcttcagccataaagtaaccgtcctcagcctgtttccttgtgaactcaatgcactcgtccatatagcgttttgtgtccttcaaaacagcaaggtaaaggtcggtatcatccttttcatagaaagtgaattcggacagggtggtaaagaggtttgcaataattcccgactgcggtgcaaatatactctgcaattctgttgtaccctcatatgaaagctgaatttcaaagtagctttcaagggtgtcatatgtctgcttttgagaagaagtaagtcccgaacggtcaaactcctccaaatccgtttttgcctttttcagttcatcaaaggattcttttgtatcttcatcggacacatgaccgagggtatagtcctcctcgtcatatttcagaccgtagtccgacggatttgaaatatcaaaatgtgcggtaagagcgtcatcctcaagttcttccgaaaacaaatcgtcacaatatttatcaaactgaatttgtgcatccgttttggttggttctgtgttagagtcaaagtcacaggcacagacagaaaatgccataacggcacataacataacagcaagcgcacccttgagtgactttttatttataattttcttcattttgtcctccgtaaagattgttgtttaccaaagtataacatattatcgtgctgttattcaataattatttttcattttacccttttccgcagtaaccgtagcaacgctcaacaggcattgccgttctttttcaacaattgttgaaaaccatgtggaaaatgtgtataataatcagccctgctcaattgtatttttgtaaattgtaaccatttgtaattatttgtaattttctcggataattgagccaacaatatgccggaaccgtaaactcgtaggggtagccttgcgactgccgcctgtggcggataatatccgcctctatagatttgtacaaacggttgcaatgttacgcccgggcataatatgttttttacattacaaactgtctgcccgacattaattttcaattttccattttcaatttgaaattcgttctatcgcttcgcttaaatccgtacacaaaaaatctatcatcggtttaatttcgtctgtcggctctgacaaatcgggaaccataaccgtggtcatacctgcggcatgtgcagattttatgccgttaatgctgtcctcaaacgcaacgcagtccaccggctcaagcccgagcttctttgcggcaatcaaaaaaacttcgggattgggcttgccgttttttacatcatcaccgcacacgaatgcgtcaaatttatcatagagattgattttcttcataatcttcaaagccgtttgtgacgaggttgaagttgcaagcgaaattttacaaccgactgattttaaataatcaaaaatttcgtacaagcccttttttacaggcacaccgttcttttcgatacgcttaaaatagcggattctcgactccgccttgtaagcaggatagtcaaaatcatcgccgtaaaccgacttgtaatattcgtaggaatcctcactgcgaagtccgattgtctttttgaaaatgtcaagattaaactctttgccgtcctcatcaagcatttcctgccagattgaataaacaagcctttcgctgtcaatcataagcccgtccatatcaaaaactgcgcccttaaacataaaaccgccccttttttcgcttttaagtctgtatataatagcatattttacaaaaaaagacaaatcggttgtaattgcgacaaagttatgatacaatcgtttaaatggtctgtgaaaaatataaatttgagggtaaggaaattttatggcaacatcaatttatgcaaaacctatcaaagcaaaaacgattctgaagttcactttgccaaccgttcttatgatggtttttatgtcactttacacggttgttgacggaatcgttgttgcgaactgtgtcggaagtgacgcattgtccgcaatcaatattgtatatccgttcacgctcgtatttatggctgtgggcttaatgttttcaacaggctcaaatgctataatcgcaaagaaaatgggagaaggcaaacaggaggaagcaaaccgacttatgtccggtgttgcaatcacggcaacggtcatttctgttatcattgctgtgctgttcacaatttttgccgaacctatgtacatgatgttcggctcaaacgaaaaaattctcccctactgcattgactacggcagcgttatgattccgtatggctttgtaatgtgctggcagatgctcaaccaatcgtaccttgtaacagcagacaagccacatatcatgcttgttttctcgatactgtcgggttgcacaaacattgtgcttgacattctttttatggctgtgtgggattttggaataatcggtgcaggactcggcacaatcatcggaatggctgtgggtgcaattccgcttttgctctttttcaacaaaaagcagactctgcactttggcaagcctgaattcaaggtaagtgaaatcctctttgctatggcaaacggctcgtcagaggctgtgacaaatctttcaacagccgtgacaacagcgctgttcaacattcagatgatgcactttgcaggcgcaaaaggcgttgcggctataagtgctattttgtacattcactttattttcactgcggtttcgtttggattcacttcgggagtttcacccgtcatcagctttaactacggcgcacaaaatcacgaaaaactgcaaaagctgttcaaattatgcataaaaatcacgctgataatttcggttgcaatgattacggcatctgaattttttgcagaaccgcttgtcggaattttctcggcaggcaacgaaaaaattcagcagattgcactcagcggattcagaatttttgcaataaattatctgttgtgcggaatgaatattttcgcatcgggacttttcaccgcactcaacaacggcaagatttcagccgtaatttcagttgcaagaacgcttgttttcgagtgtgccgcaatgctgattttgccgatgtttataggcataaacggtgtatggtcggcattgcccgttgcagaattgtgtgccgttgcaatttccgtaacatttataattgccaatgcaaaaaaatatcatttggtaaaagtttaatatatagcgatacgtagcggcgatcagtgatcgccatttgatttggctgcaaagccaaatcaaccatacaccaatattttgaaatacggtcgaaccgattttgcaatcgtttcgattggcgttcactgaacgccgctacatatttggattcacaccaaacaaaaagtccgaacattttgcgtgttcggacttttttcatagattaaattttcaacgattaaattttaattaaaatcagattgcacgaactctgattacgccgtcaactgctgcgatttttgcaaggtcatctgcaccggcgcctgcaacatcaataattgtgtaagcatagtcgccacggctctttgaaagcatattttcaacattgccgctgatctgtgtgagaaccttcttgagaagctcgggaacattcttgtgagcaacgcagaaacgggtatcgtcagcatttgttcttgcaagtgaaattgcaggatagtttacggagttgatgatgttaccgttctcgagatactccttaacctgatcacaagccataacagcacaattttcttcactttcgggagttgatgcaccgaggtgtgggaggcagataatattctcttcaccgaggatatcgtctgttccgaagtctgtaacatacttagcaaccttgccgctcttaacagcctcaagaactgctgttgaattaacaagaccgtcacggctgaagttgagaatacgaacaccgtctttcatcttggcaatcatattggcatcaaccatatctcttgtgtcatcagtaagcggaacatggattgtgagatagtcgcaatttaccataacatcttctgcgctcttcatgagcttaactgtaggagcaagcttgagagcgttgcctacagacataaacgggtcaaagccgattacattcataccgagagcaacagcggcatttgcaacaagaataccgattgctccaagaccgataacaccgagggtcttgcccttgatttcgggaccgacgaactgactcttgcccttttcaaccatcttaccgacagctgcaccgttgcccttgagagtctttgcccattcataaccctcaataaccttacgatttgaaataagaagtcctgcgataacaagctccttaacagcgtttgcgttagcacccggtgtattgaacacaacaataccctgctcactgcacttatccttcggaatgttgtttgtgcctgcgcctgctcttgcaattgcaagaaggttatcggcaaattccatatcgtgcattgcggcacttcttacaagaactgcgtcagggttctgaacatcgtcaccgtatttatagttatcaccgagacggcttgtgccgatagcggcgattttgtttaatgtaagaatgttatacatcaaaatcaatcctttttaattttttattttaagaatttacaataacaggcgaacagcgttcgcccgttatatcataatattcaataattacttgttttcagcctcgaacttcttcataaactcaacgagtttttcaacgccctcataaggcatagcgttgtagattgaagctctcataccgccgactgtgcgatgacccttgatattaacaagaccgttttcagtagcctctttaacgaatttagcgtcaaggtcagcgtcacctgtaacaaacggaacattcataagcgaacgatcctcgggaacaacagtacccttgaaaagctctgaagaatcgaggaaaccgtagagaaggtcagccttcttcttgttgatttcatacatcttatcaagaccgccaacctcgttcttaatccactcaagaacaagctttgcaatgtagattgtgtagcaaggcggtgtgttgaacattgaaccgttgtcagcgtgagttttccagttaagcattgtaggagtgatatccatagcgttgccgataagatcctcacgaacgataacaaccgtaagacctgccggagccatgttcttctgtgcgcctgcatagagaacgccgaactttgaaacatcaatcggtcttgaaagaatacaggaagaaatatctgcaacgagcggaacatcacctgtgtcgggaagctcgtgataaacagtaccgtaaattgtgttgttcatgcagatgtagaaatagtcagcatcctttgtgaatgttgaaggatcaagctttggaatgtatgtgaaggtcttgtcagccgatgaagcaacaacattagcctgaccgtaacgggcagcctctgcatgagcctttttagcccactgacctgtgataacataatcagccttaccgctctttgtcataaggttcatagggatagccgcaaactgtgttgacgcaccgccctgaaggaaaagaaccttgtagttgtcaggaatgttcataacctctctcaaaagagcctcggcaccctcaatgattgtaccgtaaatttttgagcggtgtgacatttccataacgctctgaccactgccttcgtagtcgagcatttctgccgctgcttttttaagcacagactcaggcagcattgaaggacctgccgaaaaattatatactcttgccatttctgatatctccctttttaaagaaaatttaaaaatatagttgtaaaaataaatacatttaaattatacgcttttagcacgctaaagtcaataaattcatagcactaaagcataaaaaacgaaaaatttcgtgattctgttgtgcaaatgaatcagccaagcttaattttgccgatgcaaccaacgatttcatctctcatacgctcagcctctttacgagcggcaacggcaaaatcatcttctgtaagcccctgctttttccatgcgcacataatgccgcggcttgagttgatgattgcaccaagaccgttttcgtcaaatgcgtttttaacatcatcggcaccgccgccctgagcaccgtaaccgggaacaaggaagaatgtgtgcggaagttttgctctcatttcaccgagctgttcgggatatgttgcacccacaactgcacctactgccgaatagccatgcttacccataaggtcttcgccccagccttcgcacatcttgcccatatgctcataaacgctctcatttgtttcaagcttcatatcctgaagttcgcccgagcttgggtttgaagtttttacaagaacaaaaatgcccttgtcgtccgaatcgcaaatttttgcaagcggcttgataccgtctgttccgaggtagccgtttaccgtgagtgcgtctgcaccgaatgcgtcaatactttcgcctgcaacatctgtatgaccgaggtgtgccgtagcatatgcctccatagttgtgccgatatcgttacgcttgccgtctgtgataacgaacataccctttgactttgcataagcgattgtgtcacaaagagccttaacaccctgccagccgtacatttcataatatgcagcctgtggctttacggcaggaacaatatcataaagtgtgtcaataagcgccttgttgaattcaaaaagtgcagcagccgcaccctcaagcgtcttgccgtacttttcaaagcattttgttttgattgattcgggaacatagtcaagcttagggtcaagacctgcaaccgtaggattctgcatttttacaatattttcgataagtctgtcaaatgccatagtgattctcctcattttttgttattctttctatggtcgggcaaacaattcatatcccgactgcaatatcttttttacaatgctgttgttcgcccctacgaattattattttttagctgttgataatatcataaagttcatttgagaacttgtaataatcctgtctgtcctcttttacaaactgaattgcaggacggggatgtgtgttgtactgacctgtgagaaggtacggaatatcgtaaccccacttaacgccctcagccttaaacttgtgggtgtactcctcaatgattttgagaataggagcaacctgatacttcgggttcttgaggaaaccgagaagaagttcaagtgcacagttgcctgcgcctctgcccatgccgtcaacggttgcgtcaaggtagctgacgccctgagtcatagcctcaattgtgttggcaaaagcaagctgctggttgttgtgagcgtgaataccgaccgacttgccgtacttgtcggcaattgagcagtaaaggtctgcaagtcttcttgactcctcgggatagagtgcgccgtagctgtcaacaatgtaaaaagcgtttacgggagttttggcgagagtttcaagagccgctgtaatatcctcggttcttgcctttgaaacagccataatattgatagttgtttcgtagcccttctttgcagcgtcctcaatcatttcaacagccgcaggaattgcgttgatgtatgttgcaattctgatgaggtcaatcgggctgtccttctttgcgataatatccttcttaaaatctgttctgccgacatcagccataacagcgattttaagaggagttttgttgtcgcctacaatttttctgatatctgcatcgttacagaatttccacttaccgaaatcttcttcgttaaagatttcctttgatgccttgtagccgaattccatataatcaacaccggctttaacatttgcattgtaaagagccttgataaatttgtcgtcaaatctgaaatcgttacaaagaccgccgtcacggattgttgcgtctactactctgatatcctgtcttaccgacaggaggtcacccttctgtgccataattttactcctttatgttaaagtttatattaaattaaatgtattttgtatggacgaacacggttcgcccatacagcaatttgtttattaaacaaactcaatcttcaaaaactaccttaccgccgaggattgtctttttgactttacctgtgagggttctgcctttaaacggggtgtttttgcttttgccgtgaagtttaccagcatcaactgtccattcttcatcgggatttataagaacaacatcggcatttgcaccgactgaaagagtgcctgcgttgattttcaaaatccttgcaggattaacactcatcttctcaacaagctgtgaaagcgtcattctgcctgtcttaaccaggtatgtgttgcagaccgcaaacgaggtttccatgccgattgaaccgttgggggcttctacaaaatcagccttttcctcgggggtgtgcggtgcgtggtcggttgctatggcatcaagtgtgccgtcacaaagcccgttgataatctcgtcaacatcagcctgagttctgagaggcggattcattctgtaatcagcgtcacctcttaaaagctccctgtccgtgagcgaaacataatgcggagcggtttcggcggtcaccttaacacctctccttttggcatcacggataagtgcaacgcttgttttggtgctgacatggcagatatgaataggctcgttaagagcggcggcaagtgcaatttctcttgcagttccgcagtcctcggcaccggcagggattcccttgacaccgagctttttcgaaacctcgccctcgttaattttaccgccgtcggcaagaaacaagtcctcgcaatgtgcgacaattgtcatgccgagctttggagcttttttcattgcgtcactcaaatactttgtgttttcaacaggtctgccgtcatcggtaagtgctattgcacctgcacttttcacagcgtcaatgtctgtgggttcttcgcttttaagccccttggtaacgcttgccgcaacataaacacggctgtcggcgtctttagctttgtcaagaatatactttacaatttcggggctgtcggttgtggggttggtgttaggcattgcaagcaggcttgtaacaccgcctgcggcagccgccttgcatcccgtgataatatcctctttgtgagtctgaccgggatcacgaagatgcacgtgcatatcaacaaatcccggaacggcacaaagaccgtctgcatcaataatctctccgtctgatgtaatgccgctgccgatttcggcaatcacaccgtcctttatgagaatatctgttttttcgttaagcttgtcggcaggggaaacaaccactgcgtttttaattagcatttccatgtttttcctccgttaagaaaagaaattatcttctcttgtttctgtttgcagggtggcgattctgctgggggcggcggtcggttctgctgtgaacctgaacaagtccgtcactttcgcctctttcggcacgcattcttgcacgctctgccttttgtctttctctctctcttctctcttcctctgcctttttgcgtttggcaattgcacgcttacgctttatcattattgaaacattcttgcagaaatatccgcagtgaatgccaaaattcttaactccgcctgcaaagcccctgagagcgttaccgatgtttttgcctacattggcaagaacctcttccgttgaccgtttatcattcggttcaccctcggtttctttattattctctttttcaagagcgttctgctttacggtttctgcttttctttcaacctcgccgataacatcaacgtcctcggcatctctgaggtctgagcttttgataacccccattgactttttgggagcttcgtcaaaaaagtcataaccgctgtcaaacttgtttttcttagcctttgcccttacaagctcctcatcatcaacctcttccccggttttctcctcgggatcgtcactgccgaaaatgatgtttgcgtacttgtcaacctttttttcaagcggatgcttttgttcggaaacctcctcggtttcttcaacatcggcatcgtcctcacggtcgatatcgtcaggctcgcttgtttcaaaaagatcgtgttcgggttcggggataacgagtgtaggacccgacgaagagcttatgtcctcgtatttttcaggtgtttctgcgttatctttttcgttttcgtcaattttttcgggttcagtctctgaggtatctgctgcggtaggctccttttttttttcgtcctccgtgctgttttcctcgtaaccgtagttgtttttatatgcctcacgctcaagctcactcttgtaagcctttgcggagttgattatctcgtcaatttctttttccttggcatcatccgtgtcataaccaaagtttgaatactcacttgtaatttcttccggttcttccatattttcgattatcggctcgggagcatatcttctgcccggcaaagccggttcttcttcaacttcttccgcatatttctgctttttctttgagcgtttatcgggcttttcgggagaatcgtcaaaattgtcgatgtcgtagtccgtacccttttcaccgagtttatacttgactgcaagctcctcaagaattgcgttattcttcttagcctttttatgctttctgattctcacggcaaaaattatgatgagtacaatcaaaataaggataacaacaccgccgccgatgattatgtacggaataaatccctttgaaaacggcaggtcgctgaattttaccgaagatacaactttggaaaaagtatcgtagtcaacggttgtaacatcaccctctgttctttgcattgtgatattaatgttcataccgtcataaaccgtgttggcaacaaaggttttcacatcgcccttactgctctgagcagttgcgtcaaacacaagccacacagctttttctttttggtcgggagtacagctccgatactcgtcggaattaagaaaattgttgcgtatatttgaaagctcgcttgaagaaagctgagcatagttgccaacattctcgctgctctcattttttgtcattgtcacggtcagaataaccgatgacatattatccataccctgaagatagatatttccgttctgaaaggttttcattgttgtgtcataatcaagaccgaaaacggaaaaatatttatctgtgcttttactgtcccttgtaacagcgctcataccgtcaggcattgaaagcgtcatatcgtcaatctgcggaatctcgtaatcttttgttgcgcccgaacaggcaaaaataccgcaaaataccgttacggcacaaattgcaagcgttacagctcttttaaaaacagttttcatcatgtccgtatattcccccgaaactaaattagattcatcaatactgctttttagaatgtatatctaattaattatacataatctgtcaaaaaaatacaaggtttttaccgcttaaatttgaaaacaagagtaccctattcgtgaatgcggtatgatattaaagaacatattacgcctgagcgtgcataaaattgaaaattgaaaatggaaaatggaaaattatggtcgggaagacaattcgcaagaatgcaaaacattgtcgcccgactgtttttgtatatttttgttatatacggaagttgttgcaaaactgtatgtacggatattatccgcctgcagataaccacgcaaagatttgtacaaattaaaattatataaataaacattcactttcatataaaacaaaaattgcatcaatgccgtatcgggcatcaatgcaatttctttatctgactatcttctcgaattgactgcggtggcacaccgccaaccgaaattttacattttcaattttcaattttcaattaaaaacaagactgccgtttattctacagtaaccgacttagcaaggttctttggcttatcgggatcaatacctctgttgattgatgtgtaataagcaagaatctggagcggaacaaccgctgtaatcggcataagaagctcgtctgtatgcggaatttcgataacataatccgcaacaccgtccttgagttctcttgcacaggcgtctgtacaaacaagaataacttttgcacctcttgacttaacctcaacaacattgctgattgtcttggggataatacctgtctgagttgcaacggcgataacgggaacatcctcgtcaataagcgaaattgtgccgtgctttaactcgcctgcggcgtagctttctgagtgaatgtacgaaacctctttgagcttgagcgaaccctccattgaaagggcatagtcaagacctctgcctatgtaaagcaagctgtcggttgcaacaagctttgtggcaacgaacttgcagatatcctcgcagttgtcaattacatactgaactgcctcaggcatttttgtaagagccgaaacaagtcgcttgcactcggctgtgctgattgtttcctttgcaagagcaagctcaaaggcaaagagatacataacggaaagctgtgtgatgtatgcctttgttgacggaacggaaatttcgggacctgcaagtgtgtagatgagcatatccgcctcacgggcaattgaactgccctttgcgtttacgattgcaagagtttttgcacccttctgctttgcaagacgcattgcggcaaggctgtcggctgtttcgcccgactgtgaaataatgattacaaggtcgccctcgcctacaatcggatttctgtaacggaactcggacgcaatgtcaacatttacgggaactcttgcgagatcctcaataacatacttgccgaccatacctgcatgcatggcagtaccgcaggcaacgattgtgatatttttgaaattcttgattgtttccgttgtgatgccgcactcctcaaggaacggaagtccctctttgattctcggcataatcgttgttctgatagcctcgggctgttcgttgatttccttaatcataaagtgcggataaccgcccttttcggcagcctccatatcccagtcggctgtctgaagctccttttcaatcggatcaaggtgttcgtcaacgaacgaaacaccgtcaggtgaaagtgttacgatttcatcatggtcaagaagataataatcccttgtgtactgaagaattgcaggaacatcggacgcaataaagcactcgccctctgcaacgcctacgataagaggactttcacggcgaaccgcaaaaactctgtcggggaaatccttgaacataattccgagtgcaaacgaacccttaagctcagccattacactgtcaattgtttcaagaggatttccgttgtatttatagtcgaggagctgagcaacaacctctgtatctgtgtcgcttaaaaaagttcttccctttgagatgaggaagtctttaagttccatatagttttcaataataccgttgtgaacgattgtaacccttgtaccgctgtgtggatgtgagtttacatccgaaggctcgccgtgggttgcccaacgggtgtgacctatgccgacatgacctttcggagtgccgacctctgcaagcttatcctttaagtcctgaagcttacccttggtctttacggtcttgatttccccgttatcaaaaaccgcaatacctgccgagtcatagcctctgtattcaagctttgtgagagcattaacaagcacctcactgcaatccttaggtcctacataacctacaataccgcacataaaatttctccttttcggttaatcattgaccttgtggcaaaaagtaggtacaagttctgccaaaagttcaactgtcttttcactgtcattgttttctgcggtttttttgagaacctcaagctttgacagcatatctgtttcgtctattttaatttgatttcctatgaaaattttcttgttctgtgttgacttaagaccttcttcgtccataagaagctcctcaaaaagcttttcacccggacgaagtcccgtgaaaataatcggaacatctttgtacggaaccttaccgtacattctgataaggttctcggcaagggttgtaatcttgacgggagcacccatatcaagaacaaaaatctcaccgccctttgccattgcacctgcctcaagaacaagcgaaacagcctcgggaatagtcataaaatatctgataatatcgggatgtgttacagtaacgggagcaccgttttcaatctcacggcgaaacagcggaataaccgagccgtttgagccgagaacattaccgaatcttgttgttacaaattcggtatcggtgctgtgctgcgccttgtactgaataatcatctcgcacgcacgctttgttgcgcccataacatttgtcggattaacagccttgtcggttgaaatcataacaaacttctttgccttgtacttttctgcaagggttgcaacattgaatgtgccgaagatgttgttctttacagcctcctcgggaacggtttccataagcggaacatgcttgtgagcggcagcgtggaatacgagttcggggcgatatgtcttgaagataagctccattttgtcgtaatcacgaaccgatgaaataagcgttacaaggttaagctttgtgccgtattcaagcacaagctcctgctgaatgtcatatgcgttgttttcgtagatatcaacaatgatgatttgtttcggatcattctttgcaatctgtcttacaagctcactgccgattgaaccgccgccgcctgtaacaagacaaatctttccgttgataaggtcatgaatctcctttcggtcaaactcaatgggttttctgccgagaagatcctcaatcttgatttcctttgcctgtgaaataagctgtgtatgcccgtcatcaaacaaaagctcaccgagataagggataatcttgattttgcactctgttgcggaacagtagtcaagaatcttcctcttctcatcttcctcacatgacggaagtgcaacaatgatattgtctatgcggtattcatcacatattttaacaatttcgggacaggttccgacaacggggattccttcgatcttctgattcagctttttcaaatcatcatcgacaaagcataccggaatgatgctttttgaaggattattaacatcaccctgctctttcgcattgtgaatttcacgaacaatcattctgccggcattgcctgcgcccacaataagggtgcgctctccgccctctgcccttcctgcctcggtaaggtcaagaaaagcccttctgaaaacaaaacggaatgcaagaattccgacaagggctattgcgaaatgtactatacaaaaaatctttctctgcggaatctgcaaaaacaacgagattacaaagccgagcgtaaaccccgaaaagacggcaattccgcacaccatatagtcctttgcgttaaagtatcgccacaattttgaatatgttccgcttatataaagcgtaaacagacacatgacaagatcaataacaatatagctcaacaagcctttgcttgaagcagcacctatgtagccgacaagcaagagaatataatttgcaagaataccgctgacaacgataataaacacatctgcgagagccagcaacatcttacgcaaattaatcttcttcat

SEQ ID NO: 577 - DNA, 14079 bp, unidentified
  source 1..14079: mol_type = unassigned DNA
tcagcggaacaatgcctccccgttcaccggttccccgttgtgggtcagagcaaagtatacgttgcttccttcggcgctgtagtatttcgtgggcgctgccacactgccgatggtgtcgccgggattcacataggagttctctttcactgtgatctccgtcagctgtccataagtggcctcatagccgtcacccagatccagggtcaccgccttgccgatctcctcattttcgaagatcgaagtcacttttccctgcgcacaggcggtcactgccgtaccttcttccgcggaaaaaatggtggcgggattgtatttatactgatccagtgtagcaaaataagtgctcttgtccatagagtaatgcatcagaatatcactctgcaccggttgctgtaatccgtcgctttctgcaaagtgcagtgtcttctcaacgaccacatccccgcctgctgtctgctttcccccggtctcttccttttgtcggtcggcatcggaattctgctgctctttctgtgcggcctccagcagggtctcctgatccgtcagccccggaatctctacgttgccggagcctacctcctggggcatatagtccagatcatcctcggtgacaggagttcccgcgatctcatttcccgctgtattatttgccgtcagtccggggatgttctcgtcctccttcagaagatgttcgtcgttattctccgtgatctcctgtaatttgtcatccgcattgttgggaagcgcagtgaagtccaaggtataaccatcatccctggactccacattctgccccttcatatagacccctgtcatggtcaatgctgccagtacaaaggctgaagaggctaacattataatacgttctttgttaataccgctctttttatttcttctcatatcctatccgcatccttcctgttccctgagtcaactgcctgctatacaatcgtttcaaccactttccctggtttatcctatagtcttgcccgattcatgggttttattcagaatgtcttcgatatgaaatttgcatttatttggaactattcagagccatgtaaatagcgtcgaatgtttgcattcgtaagaacatttgatgctatttatagggcgaagtaactgaatagttatatttattctatgcctgtgcggcataggcagccatatccacgtgctgtaccgtacccacatttccgttttcgtataagaaaataccggtcttgcggaccacagcattggtcgcattggcattggtagtgccgtcctgagccttacggtctccctgcagggtaaaatccgtagaaacgttttgcagacagatagcaccgacacccttgtcagaaagtttgtacagtacgtcgttgccgttttcatccttgcaccagatttttaattttgaccagatggaatcgttctcatcgatccagccgttgccatcctcatcatactgcgccagatctgtaaagccatccccattccgggtgccgaacagctcactgccgtcgttgatagtgccgtcaccgttcttgtccagtgccagatagccgctgccattcagcacggagatctcttcttccttgccatcggcatccagatcaaaataaaaggtctgatccgacacttctgccacatcagtatccaggttgatcaccagcggatcatggagcgtgaattctgctacattgagttgctctttgtagtattcctcgcatctgcggctcatatttacatttacattaaaattgatctctctgccatccttggtccgtacgcttcccacggtggaaaaactggtatcctcctgttctatgttccaggtctcgctcacatagttcaatattttcacacgggacgtgaccagattgaacacgtctgacgcaggtgttgcggttccctgtgtgctgccggaattcgtctgggtattatttacgctattccctgtattccagctgtttccggtctgattaccgctgctccatccgttttcctgcatccagtcccgcaaagtgctgttcctggacgggaataataaatcaaaaatataacgcaccgtatattcccggatggtagacaatgtctgttcactggcactgcttcgcatatcccatctggcagaagataccagcaaacgactctgccagtctttggctgtcatcgtggtgttctctgcagtgttctcctgttcctccgtgttctgtgtggtatcctcaccattcggtgtcttctgtcccttagtggatacatctgtcagacctgcctgataatccgttatctcaaatcgtctgacgcttgtcttagaagcgtgatagcttctggcggaatccattcctatgcttgcggaatcaattctcaaatctgtaattttctcctttccccgacctcaccacgaaccaacagggcgcgcttcctgtaacgtttaacagttcaccgccgcatgtattcataaaagcgcctgctccgcagtcgacgccgctaagcggctcatcttttatttcatacatgcggcgctccgctcatgcaatatcatatgttctgctttgtgtgccagcatccacgcagaacatatgatattgcatggctgaactgttaaactaaaaaaagatggtaaagaaacagaatacatataatatgcctctgtctgattaccatccgtggtgtcattatcaaactgtaaaaaataagtagcaggaagtgactggccttgtcacctctctactacttatatcgtccgctatggacattttatttagtgttaatttactgctgtttgggctgagtgggagcgccaggggttccgggtgcgggaggcaccggtctgccggctgctttcagctttgctgcgatcatgctggctaccatttctctggtcaccacgatgttgccaccgaagggattgatcacgaatcccagcgccgggctgatattgccctgtgcatctttgcgcagcagcattcccgcataatcgtcaaagttcatggcgaaagtctgctgattctcctcatctctccacctttttagctctgtccagtcagtgaacgccatgaagaacttccgaccgtcctcggtggacagcatcgggaactgtactttggcatctcttgcgatggtcacccggccgttttcatcgggcacaggcaccggatcgatcacgaccggagacagtaactttgctttctgcagttcatccaggaacatctgtctgtgttccggggtgtcctctgcttttaataattcaatggatcccaccatcatggggttggataccggtttgttaaattccatattttttctccttacttctcattgtaactattcagcctctcttcgcgaaacgcatctgcgatggttcgtcacatgtctctgaatagttacactcggttatagttgatcaggcatcccttcagtatgatctgacgttcttcgtcggtcagctctcccagcttcagggtgaattccttcatgccttctcctgttgttaccacatatgccttaatttcctcggccttgtcttccacggctttcttaataccaggaatgaacaggtaatccagattcttgaaaggcaggtctccgggctggatcaggaaaggaagcatgccccagttgatcaggttggaacgataacgcttggtggcatactcgttggcaatatttgcccagccgcctaataccttctggcaggaagcagcctgctcacgggcagagccgtctccgggcttcactgcgaaaatagtggaaccgaatccggtgttctcacgacttgcatcgggatactgtttctttacttcacccataacatccttcagtaccggaactgcctgacagggatgtccgccgttcatacgctctttctctgccttctggatctccttggcacgtcctacatactgcggatccttacggcttaaagtgaactctgccagtcccagaggattggagcggtaggaagaggtctcaccggatggaatcagctcatcggtagtagttacgggatcgtggatctcggatactacctgcagtaccagattctcaggtagggcacccatagcgggccagtccttgatattggggccgaactggatctctacgctctcatctgccacaccgtgggaatcgaagacacggttcttgtaaatattgctatcgaaatgatatttgtattttccgaaatctccatcgaagtccgttgcggaagtcagcacacccttgttggctgcggtggctgcgatggaacgggcatccatcagagctacggaagcgatctggccgttctgcagtttggagccttctcggttcgggaaatttctggtagagtgacggatactgaatgcgttattggcaggtgtgtcaccggcaccgaagcagggaccacagaacgcagtcttcatcactgcaccggtctctaagatggtagccgcacagccgttgcggatcagctccatgtatatgggcatggatgcgggatatacgcttaaagtaaactcatccgcaccgatgtatctgcccttcagaatgtcggcagccgcacagatattctcgaatccgccgccggcacagcctgcgatgataccctgatctacaatgaacttgccgttctttactttatttttcagagtgaagtctaccgcaccgtccagacttactttcgcacgcttttccgtctcatccagaatatccatcaggttcgcattcagctcttcgatggtgtaagtattgctgggatggaacggcatggcaatcataggacggatcttgtccagatccacctcgatcaatccatcatagtatgccacctggccgggattcagttccttatagtcttcggtacgtccgtggatctcatagaactcacggatctggtcatcggtcttccagatggaggacagacaggtggtctctgtggtcattacgtcaatgccgatacggaaatcagcactcagggaagccacgccgggacctacgaattccattactttattttttacatagccattcttgaatactgcgccaatgatagccagtgccacgtcctgaggacctacacccttcacgggagcaccctttaagtatacagctaccacgccgggcatattgatatcataggtctggttcaacagctgttttaccagctcgggaccaccctcgcccatagccatggtacccagtgcaccgtaacgggtatgggaatcggaacccaggatcatcttgccaccgccggctaacatctctctggcaaactgatggataactgcctgatgagggggtacatagactccgccgtattttttcgcacaggtcagaccaaacatgtggtcatcctcgttgatggtgccgcctacggcacacagggagttatgacagttggtcagtacatagggcatggggaacttctgcagtccggatgctctcgcggtctggataatacctacaaaggtaatatcatggctggtaagcttgtcgaaacggatcttcagcttgtccatattgccggaggtattatgctcctgcagaataccatatgccatggtgtttttcgctgcttcttctttggagatcgtaatgccggtcttcgcctgtatctgactggctgcttccggggtatccgctacgatgtccgtaccgtttaccaggtaagcgccgccctgtgttaactgaatcatgctcgtcctcctgttattccacttcttatgcgtaatgtgcatctaaatgtgcactcctttcattatactggattgttttctcagatgcaatgatcttataggatgtttttgccactgtaccacgctaaattttatttttctccgggaaccattcctcttttgttccggtgttgctataatatcctcagaaattatgccattttccgaaaatctatacgaaaacgacagttgtcggccgaattccggcggcagcggaaaggaaccttatgaatgtagtaatagctatcgattccttcaagggaagtatgacctccatgcaggcaggtttgagcgccgccacggggatcaaacgtgtttataaagatgcacatattaccgtccgtcctctggcggacggcggggagggcaccgtcgatgctctggtaaacggctgtgacggccgtatgacacaggtgcaggtcacaggtccttccggtcaccccgttgtctgtccttacggcatcgtcgacgagacccataccgcaatcattgaaatgtccggtgccgccgggattacccaggtcagcggagaggaaaagaatcctctgaacaccaccacttacggtgtaggcgaagtcatcaaagatgcaatccagaacggctgccggcattttattgtcggtatcggtggcagtgccaccaatgacggcggtgtcggaatgctgcaggcacttggctttggctttctggataaaaacagaaatcagatccgcttcggagccaaaggactggaggatctggaatccatcgctacggatcatgtgcttcccgaactcaaggaatgtactttccgcatagcctgcgatgtctccaacccgctctgcggaaagcagggatgttccgccatctacggaccgcaaaagggcgctacttccactatgatcctgcagatggacaaatggctggcttattatgccgctctggccagagaacagtttcctcatgccgatgccaaatatcccggtgccggtgctgccggcggtatgggatttgcttttcttaccttctgcaatgccacactggaatccggtattaagatcattctggaagaaacccatctggaaaaatatatccgggatgcagatgtcgtgatcaccggggaaggccgccttgacggtcagacggttatgggaaaagctcccatcggtgttgccaagattgccaaaaaatatgaaaaaccggtacttgctttttccggctgcgtggccaaagaggccgttgcctgcaacgcagagggcattgatgcctttttcccgattctgcggaacgtggtatccctggatgaggctatgcataccgacaatgccatgaccaatatgacggatacagtagagcaggtattccgggcgcttcagatttttcaccgttaagaatcacaaaaggacatgacccaccggccatgtccctttgtatgtttcaatattgttttattattcttcgtatccgtttggattgttcttctgccatctccaggagtcttcgcacatctctttgatgccgttctcagccttccagccaagttccttctctgccagagaagcatcggaatagcaggtggcgatatcgcctgcacggcggggtttgatcacgtaaggaatcttcacgccggtagctgcttcgaagttcttcacgatgtccagaacactgtagcccacaccagttcccagattgtagatcttcagtcctgcattctcctcaatcttcttcagagcctttacgtggccctttgccagatcaacgacatggatgtagtcacgtacaccggttccgtcgggggtatcgtaatcatcaccgaagacacccagctctttcagcttgccgactgctacctgtgtgatataaggcatcaggttgttggggataccgttgggattctcgccaatggtaccgctcttgtgagctccgatcgggttgaagtaacgaagcaggatcacattccattcgggatctgccttctggatatccgtcaggatctgctccagcatagatttcgtccagccgtaagggttggtgcactgtcccttggggcattcctccgtaatgggaacaaatgcggggttgccgtatacggtagcgctggaagagaagataatgctcttcacaccatgttttctcatgacatctaccagggtcagggtaccggcaatattgttctcataatattcccagggcttctgtacggactcaccgactgccttcagtcctgcaaaatgaatgactgcgtcgatctgttccttgctgaagatctcttccagagcttcacggtccagaatgtctgccttatagaaaggaaccttcttgcctgtgatggcttctactctggggatcactttctcacttgcattgcagagattatccaatacgactacatcatagcctgcctgctgtaattccactacggtatgactgccgatgaatccggcaccacctgttaccaaaattctcatacactctctcctatccgccgtgcataggacaatactatttgttcactatggcggctgcacaatctctcatctgtcagagccggatgaaattttttcttcgtttcttacagtatcagattactgtaattctatcgattcctcaataaccttatgttgtgaaaatctgtcgaaatgtttacagcgccacaccattctcggtgagcagttctctggcactttccacagagtccacaccgatcttgttcttgatcggcgcaaattcttttcttctgactacctcaaaaggcaggcagctgtccatctgatggatcatatccagcaccagactctcgaatttataaccattgggagtatccggctttaccaactctcctgcagcatccagataagggatcttcttctctacgatatgcagcggcatcttctctgccatgatcttttccagatcctgtaccttgaacagataattcaggatcacaccataattatacgcgggttctcccttctcatccttagcattcatcagttcatcggtcagctcgtagtactccacgatggaaggtctgccgtcctccaagcacataactcctactttttcatccggtgcattcttacggaccaccttggagcctacgacacagcctctctggatcgtagcaccaataaagcagggatcagcgatccgctgcagtacattgtctaccgcaaacacattcagccactcaatgccttcgttatgtacgatatccagcatgccgttatttttcatggaaatgaaccagccgccgttaccgttgggagaggtggacagcttgcccttctcctccagataaatcttgccttcataatcggttgccgcagccatctcctgtttgaagaagtggacataatccgcgttgtatccgaagaaatcatgctcttttaaaaatgcgatcgttgcgtcattgttcttatcgctggtcatcacaaacaggtggatccagctgtctgcctgatgcacgacttccatcaggttattgatcaggcattcaaagatgtacagttcacgggtcagacccacattgtacatgcccttgggattatcggaacccagtctggtacccatgcctccggcaagaagaacagctgctaccttgccctgtcggatcgcttcgataccggttgcggtaaattcctccctgtttgcttcgatttcgtctaactgcatggcagccaacggtgtgatcactcctttttttgccagatcttctttatgcttgcaagcttccagaatgctcatatccgtagtttcgatctgattcagaatcccctgcttctcttcctcgttgagctccccgtaatacttcagaacatgttcctgaccatactttgcaagcttctccttagcctgttccagtgtcatactcatattcctacctccgttttattttctccgactattccaccccgggtaacagtcaattttctctattatacttgatatttcctgtgattgcaaaccttactcccgggatcgttcccgcccgtaagtcctgccgttaagattctgtaaacgtgttgcaaagattttgtaaatatcccgacaaaatggtgttaagggtcgctcaaaactattcacccgggggtatctgtttactataatacggtatgtgaagtttttaaggacttcatcgaatgttgtacagaatgacagaaagttgaggaattcattatgaatattggaattttaatcattgcaatcgtaggcggtgttaccggacttttatccacagcatatctggcagtcagtttccctgctgtgctcctgtggaagctctatcgcagagtagttcacagaattcctctcacccaatagtaatcagtcagctaccaacactttccctctaaaaaggacccggaagcttttgcccgggtcccttgtcgtatgtatgtattctattttattcctgcaccgggttccaattttcgtccatcaaggtcgcagttactgtaattccctccggtgcattttctgcgcagatcacaagatagaacattccttcttccgaatccacggcatattctgacggatcctccggcaaaaagacagaaaatccctccgggtactgctgcatctccagaaatcccttttccagcagtgcagttttgtaggcttcttttactgcatcccggtccccacaggagtacacctttattgaagtaaaagttccatcttcgctgtctgtctccgtacaatctgaaatcacagcatcgggatagataatatcctgctgcaccgctttcagatattccgttgacatccggacactctgtaagatctcaaaagtatcttttccatcctcggaatgcgccatgagtaccagactcaaaaacaaaatgagcagataacttcccagtgctcccgccagtattttcgcaaaaggattctctggctgccccagatttgtataagaagtgatgatccagccaaaatttcggtagtccaccgcggtattacagtattcgcagactccgccgcccaaaatgtccacactgcctccgcagttggggcatttgtattcccggagtgccctgctgtgctgcgttaccacatcctgtctgccttccagttccagccggatctcctcataacggttccggatcttctttcctgtatccagtgtcaatcgggtcctcacttccacgctgattctgtaagactctccccgtgtctccgcctccagaaaacgcacaccgcaaatgcaacagtccaccacattctgataccgtgccaccaccgtatccagatcacaggatgcgaaaaagcgtacctgctctgccgtatccgccagatggatcattcgcagctggtattccagattctgaagaaaattacccgtggagaattccgggattgcggcctttactttcgattcgtcttgaattctcggctttctgcgagtctccatcacgatcaacattacaataaatataatgagcatgtaaaacaacgaccggaaaaataccggagccagaccaattcccagcatcatggctgcggctgcctttaccgcattgtatccgttcctgcccaacgccaacagcaaaaacataatgccgcccgcacagatggccagtaccgcaagagaaatcgctgtaattcccaccaccgcaccggctttcataaagttggaaatacttttctgtcttgcgtcctcctccagagaaaatccggatacctttgtctcaaaatcactgacgagaaactttgccccgcaggcatcacagccatcgatatagctggtcagttttccctcatgtccacagttagggcagataaccatatctccctgcacatccgctttcaaaaagcttgccgctgcaatctccggtgtctttaggaacgcaatcttttttcccttgcggtaataagtccgtctcatttttaccggctgggtacggcggcagctataatcatagccatccttccagggaccatcatagtccgccagtcgtgccggctcctgcatctccatatccaccgtcagttcccgctgccgcagtctttttctgctcaggcgcagactttgccagaaaggctgggttgtctgctccatcaggttctgttccgcttccccgttgccctgatagaatgcttttaattccccacagaagtcttctgtccgtccctcgatctctttccgtgcatcattcagaaactctgttgccatttcgttttttctctcctcataagtgatcctgctgcgcaaaggtcctgatatcttttgtatcttatgtcccaactactttgtcccatatagctatgtatccattatataagttggtacccggtatttcaagacactttcccgtatagaatgatttgcctcatcgaatatctagtgctggtgcagatacttctctctggtagccagtccgccgcggatatgacgctcggatttattcacatccaataccttccgcgcctgctttgccaacgccggattcacctgggccagccgctccgtcacgtccttatgtaccgtgcttttgctgatgccgaaggccttggcagtctgccgcaccgtggcgttgtggtcgatgatatagcccgctatccctatagctcgttcttcaatatagtctttcaaaggaaaacccctcaggatacttttttacagtgtatgaaagtatctgaggggttatgcatcctgacaattaagccgctatttgacaattattttgtttcaaaatataatagttgtactttgcaagtatccattttgaacatacgggagggtttttttgtgaaagagtcaaagctccggctgcgttccgccggtttactttctgttgcggcaggatttatgttgtttctttatgctccattggaaatttattttaataacaaatatgaattctggtttgatttttatgatctgatcccgctctgtctgttgatgtttgcggtatttacgggtgtcagcttcctgctggctttcatcgtttcgaagataaataccaggctatatcatggatttctcacagtttatctgattgcgttcctctgcacttatattcagggcaatttcatgataggcaatctgcctcatctggatggaagtacggtggattgggcacagtattccggattgcgtatcggctccgttgctctctgggtggcagtcgcggttctggtgatactgacggtgaaaaagctgtcgcttacaaaggtggcagatgcagcaggtgctgtcagcgggctgatcagtctggttctgttggtgactcttgtaacgctagggtttacaaaacagggcctggaacacaaattttctatgatcaacaccacctatggggaactggaaatgtctaccgatcaaaaccttgtacttctggttctggacacagtagacggagacatcatgtcacaggtgatcgaacaccatcccgaatataaggaaactctttctgattttacttattataataatacgatgtcggcctatccattcaccgtatattcaattccttacctcttctccggcgaatggtatgaggatcaggaagaatttatcgaatatgcaaagagagtctatcgggaagctcctttctttgatgatctggaagccagaggataccgcatgggaatgtatgaggaggacgcttaccgtctggaagaaagcatgttccgatttgaaaatatgatcgacacgacccccacgatctcttccattgcacaatttatgaaactggaaatcaagctggtcggattcaaatacatgccttttgatctcaaacgcttctgcctcaccatcccggcggaattcaattcactggagaagaccgatgatatcagtgattacgaactcttttcttccgacaatcaggtcttctatacctacctgaaaaagacaccggtaacactgaccgatgacaaatgcttcagattcatccatctggtaggcgcccacagtccctggcatcaggatgcacagatgaacgagattgaaaacggcacctacgaacaaagcattgaagccagcatgacaatcgtggctacgtatctgcaaaaactgaaagacagcggtgtctatgataatacggccattatgatcctgtcggaccacggatacaacattgaggatgatgacagttccgagaaacggcagcatcctattctgttcgtaaagggtgtcggtgagcattatgatgagctacagatttcctctgctcccatttcccaatctgattatctggaagcctacacacgacttctggatggcaaacagggggatgccatctttgattacaaggaaggagatgccagagaacgacgtttcctgttctatgattacgatgagcccactcatttttatgagtatatgcagaccggatatgccggagatgtagacacgatgtacttcaccggtgtggaaatcacaccataa

SEQ ID NO: 578 - DNA, 5716 bp, unidentified
  source 1..5716: mol_type = unassigned DNA
atgggagctaagaaaaattttgtgattgatacgaatgtgattcttcacgattataactgtttgaagaattttcaagagaatgacatttatcttcccatcgtagtccttgaagaactggacaaattcaagaaaggtaatgagcagattaatttcaatgcgcgtgagttcgtccgtgagcttgatttgattaccgatgacaatctgttcaccaaaggggcgccattgggagagggcttaggccgtctgtttgtggtggcaggcatggtggactctccccgagtacgtgattcctttcccgaacgcatccccgaccatcagattctgtcggtagtggactggctttccaccaaaaagcctaaaatgaaaaccatccttgtcacgaaagacgtgaatctgcgcatgaaggcgcgttccatcggtctgctgtgcgaagactacatcaatgataaggtaatcaatgtggatatattcgaaaagtcgaatgaagtgttcgagggtattgaccctgcgctgatagaccgcatttattcttccaaagaaggactggacatcagcgaattcgattttaaggacatcattcgtcccaacgaatgttttgtgctgaagagtgaccgcagcagtgtgcttgcgcgttataatccctttgcccattcgatttgccgggtccacaagacaaagaattatggcattgaaccgcgcaatgccgagcagagctttgcttttgaggtgctgaacgacccgaacatcaagctggttgccctgaccggtaaggcgggaaccggcaagaccctgctggcattggccgccgcattgggaaaacttaccgactacaagcagattctcctggcacgtcccatcgtggccctatccaataaagaccttggattccttcccggtgatgccaatgagaaagtggctccttacatgcagcctttgttcgataatttgaatgtaatcaagcatcagttcgctgccaattcctctgaagtgaaacgcttggaggatatgcaaaaaagtgaacaattggtcatcgaggcattagcctttatccgcgggcgcagtttgagcgagacctactgtattattgatgaagcccagaacctgaccccacatgagattaagaccatcatcacccgtgccggcgaaggtacaaaaatggtgtttaccggtgatattcagcagatagaccaaccctatctggacagtcagtccaatggacttgtctatatgatagaccgtatgagggaccagaacttgtttgcccatgtcaatctggtgaaaggagaacgtagccagttgagcgagttggcaagtaatctgatgtagcggataccgcattttccggggtaaaactatttctatcccgctttccgactgttaaaaacgggggaggtgggatggtttctttatagacgataaataattgttataacatttttttatcgatttattgtctgttttgactaaaatagtgtatctttgcctcgcctaaaacaaaactgtcaagcgaaatgaagcgaaatttttttcatcggtatctttccgcgaaagtgcttccgatatggactattctgttaattgatgtatttatcatcgtcatatccagtctgttggcctatgctctccgatatgatttcagaagcatttttctggaatcatctaccattgacaagaccattttatggacggttgctgtcaacctgattttcttccgtgttttccgtacgtattccaatgtactgcgcttttcctcctttgtggatatcatgcgcatttttgtgtcattgacggtgtcgtatgcactgctgatgataacgagcgtcctgacggaaagctatttggagtttaacctggctccggtcagcgtgctgttcatgtcctatatcatcagctttgccatgatggcatgctcccgtgtgattgtcaagactttcttcgaggcgctgaacttcgacggcacccacagtgccaatgtgtttatttacggtgccaaggaagccggggtcaacattgccaaggcattgcgtgtcaatctgcgcaaccactaccgtctgcgcggattcattgcggacgaacctgagcttatcaataaggtgatgatgggtgtcaaggtgttccccaacgatgatacgctgattgatgtgctgaacgaccgcgatgtgcagaccatcatcatttctcctgccaagatggaggaactgaagaagtctgacatggctgaccgcctgctggtgcacaacatcaaactgatgaccgcgcctcctttgagcgagtggaacggtcaggcgctgagccgcacacagttgaaggaaattcagattgaggacctgcttcagcgcaatcctatcgagatagatatccataaggttgcctctcatctggagggcaagcgtgtgatgattacgggcgccgccggttccatcggcagtgaaatcatgcgccaggtggcttcgttcaatccctataaacttattttagtggaccaggccgagacccctctgcacgacatccgtctggaacttcaggaccgttggcgcgacatcgatgccgagaccatcatagccgacatctccaatgccacgcgcatggaggatatcttcagggagttcaagccccagtatattttccatgcggccgcctacaagcatgtgccgatgatggaggacaacgtttccgagtccatccaggtgaacgtattcggcacgcgcaccgttgccgatcttgccgtgaaatacggtgccgagaagtttgtgatgatttctacggacaaggctgttaaccctacaaacgtgatgggctgttccaagcgtatttgcgagatttatgtgcagtctcttgcgaagaagttgcagaaggagggaggccatgccactcagttcatcactacgcgtttcggcaatgtgctgggttccaacggttctgtcattccccgtttccgcgaccagattcagcgtggcggcccggtgacagtgacccatcctgagataatccgttacttcatgaccattcccgaagcttgccgccttgttcttgaggccggcagtatgggcaacggcggtgaaatctacatcttcgacatgggtaagccggtgaagattgtggatcttgccaagcgtatgatcagcctttccggacgtacggatgtgaagattgaatttaccggtctccgtcatggcgagaagctctacgaggaactcttgaatgtgaaggagcttacaaaacccacctaccatgagaagattatgattgccacggtgcgtgagtatgactatgacgaggtgaaggagcgtatccagaagctgattgatgtaagttacacctatgaccagatgaaaattgttgctgccatgaaggatattgttccggaattcgtgagcaagaattcctgctttgaggcgctggataagaagaaataaaaagatagcggtatagtataaaatgaaagggtgataacgtcattgtagtgttatcaccctttcatttttattgtcttcttgtcagccttttgtctcattcatgtgaagagaagtatttcaagaactgtgtacgttcgaaagtattgactcccttcgggtcgtttacgttcagaatacctttgaactggctgatggtttccatacctttgcggtccatccacaagttgaggaagcggatgtattcttcaatgatggtagctgaattctgataaagcacactgcatatctctacggccgaagcacctgctaatattgccttgacaacgccttcgggcgagtggataccaccggaagcggcatagtccagcttgtttacggctgccgaagcgatgcctatccagcgcagggctttagataaatcggcttcgttgctgaatacgttgccggatacttgtatcattttctcaatgttgatgtccggctggtagaagcggttgaacagcactactgcggcggcaccgttggcatacagctggtctatcagagctatcggattggtcaggttgtcacccagcttcatgatgacgggtatcttgaccgtcttcttgatgtggctcagaatgtcgatgtggcgttgctcgaaactgcagtaagcatattgtacatccgtctgcagtgcaaggatattgatttccagtgcgtctgcaccggcctcttctattttggcggcaaattccacccagtcggcattctgatagcagttgatgctggctatgatggggatgttgcacaccttcttgctttccttaatcaagttcagatattcgcctaacttatgttcacggatatatcctacaagatagtcgctgccttcgggatacatattcgggtctcccagccagtcagcctccatcatgatttgctcttcaaagagtgattttagtacaatggcacctgcgccggcctcagatagtttctggttcttggcggcactgtctgtcagtccggagctgctgacgataatggggtttctgagtttcagccctgcaaaagtagtttctaatgttgccatgataatgattttttatggttaatagtttctttctccaaaaatcttgcttcctacacgtatcaaagtgctcccggctgcaatggcctcgtggtagtcgtgagacatccccatggacagttcccggaatgactctgcatcggcaaaccacttggctttcacttcattgaagaagctacttaaagaacaaaactcagttttgatttgttcgtcattgtccgtattcgtggccatgcccatcaatccgcatatccggatatgcttgagctctctccattcaccggctgccagcatttcccggcattcgtcaaagctgaatccaaacttggtctcttcccgggcaatgtgcagctgcagcaggcagttgacggtttttccggctttggcagcctgcttgtccacttcggccaacagcttgtaggagtctatgccatgaatcagcgctacgtaaggaacgatatattttattttgtttgtttgcagatgcccgatgaaatgccattctatgtctttgggcagactttcgtatttagcggtcatttcctgcaccttactttctccgaacacacgctggccggcacgatatgcttcttctatcgcctcgttggggtgaaatttggaaacagccaccagccgtaccttttcaggcagttcgctcagtacttgttttaaattctctgcaatcatcgtttttttgagttatgagttatgagttataagttatgggtcgcaataataactcataacttataactcatcactcaaattaaacttccggtttgtcgtcgggctctgcactgtacggatatacatccataatggcggtttccgctacagatgctatctgatagtcggccattgtgcctttcatgccctcatccagtttcttcactgcatcacgcaggtcggcagcctgcaccaatacctgggtagaggttttcttttccgcaccgcttttctcgtccagtgtgatgaaaaccagtttacatttaaaccagcggtcggcagattcctcttcgctggggaacaattcgctatagttggcacgtttgatgtccgatacggtgaactctcccgaaatgaacggcgtcatctcttcgatgatgcgtgcttccgcttccgtaaaactgagggcatccaccagatacggttcggtcaccttcttgttcattccattttccattgttttctcgtaacggatcttacattcaaaccatgtatgcattgccat

SEQ ID NO: 579 - DNA, 6547 bp, unidentified
  source 1..6547: mol_type = unassigned DNA
  misc_difference 2964: note = a, c, g, or t
  misc_difference 2965: note = a, c, g, or t
  misc_difference 2966: note = a, c, g, or t
  misc_difference 2967: note = a, c, g, or t
  misc_difference 2968: note = a, c, g, or t
  misc_difference 2969: note = a, c, g, or t
  misc_difference 2970: note = a, c, g, or t
  misc_difference 2971: note = a, c, g, or t
  misc_difference 2972: note = a, c, g, or t
  misc_difference 2973: note = a, c, g, or t
  misc_difference 5775: note = a, c, g, or t
  misc_difference 5776: note = a, c, g, or t
  misc_difference 5777: note = a, c, g, or t
  misc_difference 5778: note = a, c, g, or t
  misc_difference 5779: note = a, c, g, or t
  misc_difference 5780: note = a, c, g, or t
  misc_difference 5781: note = a, c, g, or t
  misc_difference 5782: note = a, c, g, or t
  misc_difference 5783: note = a, c, g, or t
  misc_difference 5784: note = a, c, g, or t
ctacactctttccctacacgacgctcttccgatctcgccgaacagctgcaggcagcggcgggtcacatcgcttgcggtgcgggctgcgatcagcttagcctgagcagcctccacgctgtaacggacctttgcgccgtccatggcctgctgcttcttcagagcggcagcgtagaccagatacttggcagcctcaacgcgggccttcatctcagccagctcgaactgggtgttctggaatgcagagatgctgcggccaaactgcttgcgctccttgacataggcaacggtctcctccagagcgccctcagcaatgcccagagcctgagaagcgataccgatacggccgccatccagggtagccatggccagctggaagcccttgccgcgcacgcccagcatacgatccttcgggatacggcaatcctcgaagatcagctcgcaggtggaagaaccacggatgcccatcttatcctcagccttaccgacggagaagcccggatcggtgcgctcaacgatgaaggcagagcacagcttggtgggacggcccttcttatccagaacgtggtcggtgacagcgatgacgataaagacatcagcgaaaccggcgttggtgatgaagatcttggagccattcagaacccagcagtcatcctcttccttggcaatggtctgctgaccctgtgcatcggtaccagcgcccggctcggtcaggccgaaagcgcccagccactcgccgctgcacagcttgggcaggtactttgccttctgctcgggggtaccgttctcataaataggagcagcgcacaggctggtgtgagcggagacgatgacaccggtggtgccacagaccttgctcagctcctccactgccatgacgtaggacagcacatcgccgcctgcaccgccgacagaggtggggaagtaaatgcccatcatgcccagcttgcccatcttctcgacggtctctttggggaagtactcttctgcatcaaccttcttagccaggggcttgacttcgttttcagcaaactcgcggtacatcttctgcaccatctgctgctgcttggacagagtaaaatccatcgctatatcctcctaacgggtgttttttatctcccggggtcagggttctcccctacccggttgcaaacaaattcctcctgaccgctttccccacggccaggagaaatgtttatcagaaattacagctggtcaacaggagtcttggtgcggtctgcgttgtaaacgtagaagcccttgccggtcttgcagcccaggttgccgccgcggaccatcttgcggatcagcgggcaggcgcgatacttgctgtcgccagtctcatggtacaggacatccatgatggccaggcagatatccaggccgatgaagtcgcccagctccaggggtcccatggggtggttggcacccagcttcatagcggtgtcgatgcctgcgatatcagaaacgccctccatcttgatgaaggcagcctcgttgatcatggggatcaggatgcggttgaccacaaagcctgcagcctcgttgacctgaacagggttcttgccgatggccacggagatctccttgatcttctcaacggtctctgcgggggtgttgcagccggcgatgacctcgatcagcttcatgcggtcagcggggttgaagaagtgcataccgaccagaggacggctcaggcccttgccgatctcggtgatggacagagaagaggtgttggaagcgaagatgcactcgggcttgcagatcttatccagctcgccgaaagtggtctgcttgaccttcatatcctcaaaagcagcctcaacgatcaggtcgcagtctgcgcacagattttccttcaggcccggggtgatggctgcaacgatcgcgtcagccttttcctgggggatcttgcccttagcaaccagcttctcgtagcccttcttgatctttgccaggccgttctcagcccactcctgcttgatgtcgcacagagcaacggtgttgccctcaacctgtgcaaatgcctttgcgatgccctggcccatagtgccagcgccgataacaccgatcttcataggaaatctctcctttaatatcaaaaattatgtaatggattagttgttggtgaacactgccttgggcttcggtttctcacggctcaggaagcaggccatgccctcctgctgatcgtgggtctcgaagcaagcaccgaacagcttctcctcaacttccacagctttctcaatgggcaggctgatgccaccgttgatggccttcttgcagttgcgcactgcaatgggagcgttcttggcgatcttgccggccagcttcagcacgttctccatcagttcagcctgcggatacacggcgttgaccagaccaatgcggtaagcctcatctgccttgatgttcagggcagagtagaccagctgctttgccatgcccatgccgaccagacgtgccagacgctgggtgccgccgaagcccggggtgatgcccagaccaacttcgggctgaccaaacacggcgttgtcagagcagatgcggatgtcgcagctcatggccagctcattgccgccgcccagtgcaaagccgttgacggctgcaatgacggggatggggaagctctcgatcatcaggaacacgtcattgcccagcttgccgaaggcctcgccctctgccttggtcatggtgctcatggagccgatatcagcgcctgcaacgaagctcttgtcgccttcgccggtcaggacgatgcagcggatggtctcctgatcgacagcctcaaaagctgccttcaggtctgccagaacctcggggttcagggcattcagtgccttgggacggtcgatggtgatgatctcgacagcgccctgcacctcggtttttacaaaagccattgtgaaaacctccaattcagattctcagtgtttcaaaacagctcccgcgccccggcagagtctnnnnnnnnnnggctgtcattcaattcaattccaaagggggaacttacatctcaacgatggtagcgcagcccatgccgccgccgatgcacagggtagccagacccttatgagcaccacggtgcttcatagcgtacagcagggtgaccaggatacgagcgccggaagcgccgaccgggtgacccagagcgatggcgccgccgttgacgttcaccttgctcatatcgaagttcagagcctggctgacagccacagactgtgcagcaaatgcctcgttggcctcgatcaggtccatatcagcaacagtcaggccggtcttagccatgaccttcttggttgctgcgatggggcccagacccatgacctcaggctcaacaccggccagagcgccagcgacccaggttgccagaggctcaacgcccagctccttggccttttcctcgctcatgatgaccagagcagcagcaccgtcgttgatggcggaagagttgcctgcggtcacgatgccgtccttggtgaaggcgggcttcagggttgccagcttctcgaccggggtcagacgggggccttcatcggtatcgaacacggtgtcgcccttcttgcccttgatgacaacaggaacgatctcgtccttgaaagcgccatccttgatggccttgtcggccttgacctggctgttgtaagagaactcatccagcatctcgcgggtgatggggctgtagccgtacttcttctggaaggtctcgttggtgcagacattctcagcggtcatgcccatgtgcttgttgaagccggtggcatcccacagagcatcgttgaccatggtatcaaccagctcgctcttgcccatgggagcgcccatgcggtagccgtaacggcccttcatcattgcaaagggagccatgtccatgttctccatgccgcctgcgaccacgatatcagcatcgcctgcctcgatcatctgagcagccatgttcacgcagttcagaccggaaccgcagaccacgttgacggtgacagcgggggtctcgatgggcaggccagccttcagggaagcctgacgggcaacgttctggcccagaccagcctggatcacgcagcccatgtaaacatgatcgacctgctcaggcttgacgtttgcgcggttcagagcctccttgatgacgatggagcccagctcagcagcggggacgttggcaagggtgccaccgaacttaccaatggcggtacggcatgcagatgcgataacgatctttttcatgtgaatagcctcctgattgtgtatgttgtgatttaagaaagactgttttatcaaaacgccgaagcgtttcttgcataaggaatggggggtcagacgttctctcccctgctgcgcagctcggccatcttctgctccacggcggcttccacattcggggtaacgaacttggagatgctgctgccgtagcgggcggcttcctttacaatggtagaggaaagatagctccacttgatgctggttgcaaggaacatggtctcgatgccgggcatcagcgcgtgattggtctgcgccagctggatctcgttttcaaaatccgttaccgcccgcaggccccgcaccatgaccgaagcgtggcgcttcttggcgaactccacggtcaggccgtcgaagctctccaccgtgacattggggatacccttgcagcattcctgcagcagggccacccgctcctccacggtgaacaatgggtgctttgcactgttgatgagcacggccacgatcagatgatcgttgatctttgccgcacgcttgatgatatcgagatgacctcgtgtgaccggatcgaacgacccggggtaaactgcagttgccatcggttttgtcctccttgcgcgcctttgaaaagcgcattggttctgacatgatagcactttccagtttgctgtgcaagatgttcttttcttctgctacggtgtatcgttaatttttaaacaatcttacccgcagtgccacgctgcatcctgctacgctataagtaaagcacatcgtcaaaattttatcaagtattttttgtgtaaaatttattttttgtgcaccaaagaatctctacaaaaagctaagatttttagtcatattgcatccggccctgttttttgccaggaaagtattgattctcccgtttgttaatgatataactaagttggaatttacaattcctttatgttattgtaagagaggatggtttataatggattttacggaattgtatgcgcagaagaaaatgacagctgaccaggctgccgcgttggtcaaaagcggcgactgggtggattacggctgggccgtgaacacccccgttgcagtggacgctgccattgcaaagcgtctgcctgagctggaggatgtcaacttccgcggcggcatcctgatgtgggtgcccgccatcttccagatcgaggatcccgctgcccacatgacctggaacagctggcacatgggcggcattgagcgcaaggccattgcccagggcttctccttctactcccccatccgctactctgaactgccccgctactaccgggacagctctgaccccgtggatgtggcggtgttccaggtgacccccatggacgagcacggctatttcaactttggtccctgtgcttcccacctgggtgccgtctgcgataaggccaaaaagatcatcgttgaggtcaaccggaacatgcccaaatgcctgggcggcaccgagaactgggtgcacatctcccaggttgccggtgttgtggagggcagcaacccgcccatcggccagatggccgctgccggtgccannnnnnnnnnccccagcgaggtggatatggccgtggctaacctggtggtgccccagattcccaacggtgcctgcctgcagctgggcatcggcggtatgcccaacgccatcggcaacctgatcgcgcagagcgacctgaaggatctgggcgtgcacaccgagatgtatgtggatgcctttgtggatattgcaaaggcaggcaagatcaccggccgccacaagaatctggacaagggccgtcaggtctatgcctttggtgcaggcacccagaagatgtacgattacctgaacaacaacccggagtgcatggccgctcccgtggagtacaccaacgacatccgcagcatctccgccatcgacaacttcatctccatcaacaacgcggtggacattgacctgttcggtcaggtgaacgcggagagtgcaggcatcaagcacatttccggtgcaggcggtcagctggactttgttctgggcgcatacctttccaacggcggcaagagcttcatctgcctgtcctctacctttatgaataaaaagaccggcaagctggagagccgcatccgtcctaccctggaaaacggcagcatcgtcaccgacacccgcgcaaacgtgcactacctgtgcaccgagtacggctgtgtgaacctgaagggactgaccagctgggaaaaggcagaagcactgatcagtgtggcacaccccgatttccgggacgagctgatcgccgaagccgaaaaactgcacatctggcgcaggagcaacaagcgctga

SEQ ID NO: 580 - DNA, 7030 bp, unidentified
  source 1..7030: mol_type = unassigned DNA
tcattgtttcttatagggcagacatcggtatcggggtttatttttgctccgacttccatattcaatcgcctgggcagggcagttgcagatgcaggccatacaatgtgtacagtgctttccccatacagggatttggttattgagtttcacgttattcaaagggcagtttgcaacacattttccacacccaacacaggagtcttttgcgtaaaagaggtctgcctttatcacaaagcggtaaaaggcacggttgactaagccacttttgatgcgatccacaatccctactttacgttgggggaagtccctatcctgggcgatccagttaacaccatgttgaaggacagggagtgctctctcaatgatctgctctgcctcctgttcttccggcacaggaaacaacgcaatataattttctggcattaccacctctagggttcctcggtaaataagcccctttgcctggcataattccgctagatatcgccctgcgccgccaatatcactgccacaagtcaggacaaaataggcccttttgtcccccagcagctctacggctctaagatattcctcaaagatatgaggaagttgccaaccataggtaggacttacaaaaacccaaggcccagtagaaaaaattgggcttttttcaccacttttgattcgttttcctagatctaggagtttttcattcaactgctctgacaaaagttcagcggcataacggctgtttccagttccggaaaaatataagatcattaggacttctcccccatctcaatagccacttttatcacgttatcccgccgatgttcaaagaggtcataggccgcctcgatctcctctaggtgaaaggtatgggtgattaacggcgtggtgtccagcattccctccttgatcagctttaatatctccgcacagctgcaaccatccacaccaccagtcttgaaggtcagatttttcccgtacatttcgggcaagggcagctgctgaggaccgtcatacagcgccactactgccacagtgccattgggtctggcacactgccaggccatacgaaaggtttccgctccaccagcgacctcgagcactacatccgcgccgccgtggtcgctgtttcgccgtacatagtccagtgctttttccggtgtggtcgccagcacctgaggatagtaacggtggagaaactggaggcgctgttcttcccgctcacatacaatcacacgttttggactttttaacaaaacacactgtaaggtacatatacctgtcgggccggccccgatgataagcacagtgtcatcagggctgatatctgatatctgggccgcccaataacctgtagacagaatgtcacctacaaaaagggcctgacggtcagtcacggaatcagggatcttatccaagctctggtccgcatagggaactctcacatattctgcctgcccgccatcgatgcggcagcccaaggcccagccaccatttgggtctatgcagttattcacccagccatgctggcagaaaaaacagtgcccacagaaagtctctacatttacggtgaccctgtcaccaggcttcactgataatacagcaggaccagccttctctactacgcccaccatctcatggccgaccgtaatacctggcactgctcttggtacagagccatgcttgatgtggaggtcactggtacaaatgctggctaaggtgacccgcacgatcgcgtctcggtcatccaaaatcactggtctctctttctccaacaatttgaatgttccttgttccaaaaaagtataggctaacatattcattatccgctccattgtagtttcttgattccagcatagcattttccaaaacaaaattcaagggaatcaaaacaaaggcagaggccctgtccccagacaaggcccctgcccttcatttgatcatagatttagattcaaaatcccaggccctgaatatagccctggatgcgctcaaagcccctcttaatattttcgtcagaggtggcgtaggtaattcggatgaatccttccccactgtcaccgaatccggatccagggacagtaacgaccccggtcttcttcagtagatccatacacaagtcacgggaattcatcccggtgaactctgtcagttccttggcattgacaaaggcatagaaggcgccctttggctttttaatagacagaccaggtgtctggtcaatcagtgaacagatcaggtcacggcggcgaagatagctctgccgcatattctcaatctcagactggcactgacgtagcccacaggcggccgcaatctggctgggggccggcagacaggaagctccgttctcgtgcagtttagtcatgttacggataatatcaggctgggagatcgcataaccaaggcgccagccagtcatggcaaacattttggagaagccgctaatgtacacagtcttttccatgattccatcaaaggaggtaatgctggtatagcccgcatcatcataaactaaccggctgtatatctcatcggcaatgataaagatatcccgctcgcggagcaggtcagccagggctttgcaagtatccttgtcaatcaccgcaccggtaggattagagggtgagttgagaatgatagcttttgttttaggtgtgatcgcggccttgatgtcatcaggatctgggataaatccgttttcctcacgtgctgggacacagatcattctggcgcccaccataccaatctgtccaaaataattaggccaggccggtgtgattacgatgacttcatcaccgggatttaccaaggtgaacaaagccatctggatcgcctcagtggcaccgcaggacaccataatctggtttgtgggatcaggcttcagatcattggcatggtactccgcaatcgcttggcgcagttccaacacgccactgttcggggtatagtgagtcataccggactcccagcatcggcatgcctcttcaatgatggggcgcggagtgataaagtccggctcgccaactgtaaagctgatagtatcctccattttcaaggcctcattgaacatctcccgaatgactgatccacccagattttgggccaaatttgacaactgcatcgttcattcactcctacaaatcagtttgttgtatatgcttaggcacccagataggctgccttcacacgctcatcagctagcaaatcctgagaggcaccttgcatggtaattttccccgtctccagcacataagcgtgggaggccgtattcagagctaaaaaggcgttctgttcgatgagcaagatgctagtgccagtttcattaatctgcctgatgacgcgaaaaatatcttctacaacaataggagccagccccatggaaggctcgtctagcattaacaggcttccgttggtcatcaaggcccggcctaacgccagcatctgctgctcacctccagaaagtgtcccagcctgctgcttttcacgctccttcagtcgtggaaagatagtaaatacccgttccagaccatcttttatgaaagctctatcttttatcagattggctcccatagtcaggttttcagtgacggacatcttcgaaaatacccggcggccttctggcacatgggcaatgccctgttctacaatcttatggggcttcatcttggtcaattctgttccctgaaacagaattgacccgctttttgcgtgctccagaccagagatggtgcgcagaatggtggactttccagcgccattggacccaatcaacgccacaatctcccctttttccatcgagaaggaaacgccttgtaccgcattaatggctccataggacacatgaagatcccgaatctcaagtagcgacattctgatagcctcctcctaagtatgcctcgataaccttcggattggcctgcacttcggcgggcaccccttcagctatggtcttaccaaagtctaagactttgatgcggtccgcaataggcattacaaagttcatgtggtgctcaatcaaaatgatagtcacaccaaagtccttgcgaatctgtgctaccaggttcgccatatcctccagttcagtggtaatcataccagctactggctcatccaacaacaggatcttgggatccgtcatcagggcacgtgcaatttccagacggcgctgatcgccatagggcagattttttgctagtaaatttgctttgtcggccagtcccagacggtctaacagacccatgaccttctcatccagctccctttcgctcttcaccatgcccggtgtacgcaaaaaacatttggctagattctggtcgttatgcatagtatgggccatctttacattgtccgccacactggcattagagaacaggcggatgttctggaaagttcgggtaatcccctgtcgcgcaaactgatagggtttaagccctaccatatccaccccatctagcttaatggtaccggtggtgggtttgtaaataccggtcagcatattaaatacggttgtctttcccgcgccgtttggcccaataatggcaattaattcgcccttttcaacttccaaattaaaattatccacggcgcaaagcccaccgaacatgatagagaggtttttgacctcaagaagactcatatcaccacttctcccttctcaggacttagagacacccgcaggctctttatccttctttgagccaaacagcggagtctcgtacagggacgcacgagaaatacgcataaagggaacttccttgccaccacaaagcccctctgagcgatagagcatcacaatgaccagaatagccgcatacaccgccaggcgccagtcggccaaaaagcggagaacctcaggcaggatggtcaacagtgtggcgcccaaaatagaaccagtcagagatccggaacccccggcatacaagtagaccaagaaatcggagctctttgtaaagctaaaggagtccggctgaatgaaggctagcacatgagcatacaggccgcctgctacgccggcaataaaggcagcgatacagaacgatgtgatcttgtagcgggtagtattgatgcccatggcatctgcagcaatctcattgtcccgaattgcgataaaggcgcggccgtagggagaatagataaggttacgcaatagatataacgtcaacgccataaagaataagatccaggcaaaattggagtaatttggaatgccaatcatgcctctggctccgccaatcggctggatcagacgaaggatagcgcggacaatttcaccaaaggccagagtaacaatggccaaatagtccccctttagctttagggagggcatcccaatcagcactcctaccaaggcagccacacaccctcctaccagtaggcctaacaaaaagacagggacctgggcaactaccggaatattcttaccatcaaataccatggtggtaatgaccgcggccccataagcacctagggacataaagccagcgtggccaatgcagaactgtccagtaaagccattgaccaagttcagactggctgtcatcataatgttgatgccggcaaacatcatgacttgaatataatagccatttaggatacccacagagcgcaggaccgttacaactacatataaaaggacaacaattaaggcggggtaaatcgacttaatcaatttctttatattcataaagatcacccctccttaaactttctctatgaccagcttgcccatgataccggcaggcttgaccaaaaggataacaatcaaaataatgaatccgacagcatagccgaaggtagagttcaaagcggtagcaaatatttgggcgatcccaaggataaagccccccaacatggcccccctaatatcaccgataccacccagaacggctgcgacaaatgacatattgcccagccaggaacccatatacacatcaacctgaggataggcactggcatagcaaataccagacactgcggccagagcgccgcctacgaagaatgtgatggaaatgacgcggttgacattgatacccatcaaagaagctgcatccttgtccatactgacggccctcatctgtccaccaatctttgtgccattcaccatgaaatatagtgccatcatagtaacagcagccaatatgatcatgataatctgggtcgaagtgatagacgcccctaaaacattaaaggttttgggcgtaaatagtgtggggaacgagcgaggattcgggccaataaaaggtaaggcccttggaaagttctccaaaaacatggagacacctacagctgtgatcaacgcgatcattctaggtttattgcgcagaggtctgtaagcaatcgcctcagtcgctacagcgattccgccagtgcccagcatagcaatcaatatgataatccctacaataagcattgggaatgttccatcaatctgatagctggagaaaagttgagcaataaaataggtgcccaatgcaccaatcatcaaaaagtcaccatgagcaaaattgatcatgccaacaatcccatagaccatggtatagcccaatgcaagcaacgcatatacgctgcccaattgcaagccgtaaactaagtattgtaggatcgtagccacaggaacgcctcctatcatgtctaaaaaatggatttactaagaaaggaaatgtgccggctggtatcaaacgcagccggcacattcagttatgcctaagaaagaattgctgccctatgtcaccgatgaaaaatccaaaagaaatcagctaggattgatggaagaaacataatgggaaacaccatcagcatcatactgcataaccacgccacccttaatggggttacgatcctcacccatcgtcataggaccagagggcagttgaagattctcaatagaagccagagcgtcacggacaccatcgcgggtcagctcttctgcattctgcaacgcatagagaaccatcatagtagcttcataagccagttcagcattggaattgggttgctcatcgggatgcagggcagtgtacttctcaacaaactcaacagc

SEQ ID NO: 581 - DNA, 8846 bp, unidentified
  source 1..8846: mol_type = unassigned DNA
atggggaaaccatttaacaatactcagggaactttgtttggcatagatgtaacggatccccttttagagaaaccgcagaacattgatgagtatcggttttgtgcaaaaacgcttaaaagcatgatggaacttttggtagaaagatacggcacaaacagacttcaggcggtgatttccgaaaacatgaacggaccaataaaacttagttttgaagaatatggatttgaaatagatatgttttgtgatgaagtcacgagagaagatggagtttgcttagtcttggaagaagaaaaagatacctttttcctcattataaacggatgtaagataaatcctttttccagaaacgatcaaaagggcaattgtgattttttatatatggaggagggaagttttcaagatggagagtggaaaagagggcgccgtttgaatggagacgaaatcttttcaccagtttttaatcaatttacactgctaaaagtcaaattattcgcgtattaggttgtaatttgtcaggtagtaacattacctggaacatcgcactaccggcatcaatggaacgaaatttctgctgtgactattcctggcagatgcgcccagccgctgacaatactgccagacggctttatttctcaaacagagatgacatcctgcggattaaacggagtattcctattagtaaaaagtctgaaagaaaagttctcgtcaataccactgtttctattagccaaaaatgaaaaaatattgattttggctaatagaaacagtataataagtacatactgtttgtgaaaggatgatgcagatgaagctgatagagcgtagacagtatttagataagttaatcaatgtacttgggactccggatatcaaggtcattaccggtgtaagacgaagcggaaagtcaaagctgctagaagcatttagagcatatattgaatcggagaacccggattgcaatattatacagataaattttaacctgcctgattatgacgatttactgacttatcgcgcattatacgattatgtaaacgcacattatgttgcaggtaaagggaattttgtctttattgacgaagtgcaaatgtgcaaagattttgagaaagcagtcaatggacttcatgccagcgagaagtatgatatctatattaccggttcaaatgcctttttgctaagttcggatttggctacgttatttacagggcgtacttttgaaataaaagtatatccgttttcctttcgtgagtatatgaagtactttggcttgaaagaccgctacgacgctttggataagtatgtgctagagggtggaatgtctggttcctatctttataaagatcaggaagcaaagtatgattatatagctgatgtgtttgatacactgatagtgcgtgatatacgcaaaaaatacaagataagaaatacgcagcttatggacagaattgtggatttccttatggataatgtgtcgaatctttcgtctgcgcgtaacattaccaatactctgggaagcatgcaggagaagatacaccatacgacggttggcaattatatgcaatacctgtgcaatgcatttgcgttctacaaggttaggagatatgatattaaggggaaaaagtatttatcgagcaacgacaaatactatttgagtgaccatactttccgttatgcaaagcttgggacaaagaatatggattacgggcggatactagagaatatcgtggcgattgagttgttgcgtagaggatatgaggtatatgtgggcatattatataagaaggaaatagattttgtcgcagtgaagcggagtgagaaaatctatattcaggtatctgataatatcagtgaagagaagacctttgaaagagaggtagctccacttttgcagattaaagatgcataccctaagtatgtgatagccagaaccaggcatgatgaataccagtatgagggaatcaaggttattgacattgcggattggttgttggacaaataaatctattagccaaaaatgaaaaaaataagaaattggctaatagaacaaagcgaaccaaataaaggataacgtataaggcattggtcataatcggctgatgccttttttgtgcacaattttaagcagatataaagtggtttataaggaaataattgaaaataaatcatatttttttgacccttttttgcaatcagctatttttgactccaaataaatgatagaagccagtaaataaaggatggcaacagaaaggagaagctgatatgcaggaacagaagaagtataacttggcggatggtaatattcgtaaacatttcgtaacgtacaagcaggctgcagaattatatagcatgggaatgaatcgaattcaggagcatgctaaggcagctggtgcgacttacaaaatgggaaatgagcgtgtcaaaattcatgcagctggcaaaagatgcaaaagcttgttacaaggtaaatcagttggtactggtcaatttagaaataattgataagtatctggagacattccatatagttgaggattgtctaacgcttcttccttccaattctctttgtttccacgaataagttttgccgcctcgttgataaaaggattaggttcagacatatgctgctgaaacatggacgtatgcaaagctaacctcacatatcaataaaactgctgaagcagctggatacacaagactatccaccattcataaaatcattacttttcattcctgtcaatctgtaaattattgtaatattgcattggagtaacaccatattctttcttaaatgctctaaaaaaatgattataccctccaaatccaccaagcgcatatacctcacgaatacttttcccctgctctatataatggcggcataaatcaagtctgctctttacaatgtatgaatgaggtgtctcacctgtcatttttttaaactctcttactatatgataacggcttacataaaattcattttccaagcgctccaacgagatatcttctgtcaaatgttctctgatataaataaaaatatcatccattacaacgtgttttttcttattcgtcttaatctgtacatcctcctgaacagatgagcgaagtgcaagtacaagaatcatagttaataggcttttctcgtataatgagcgggcaaatttaggcggctcattattcatcgaatagagctttttggatatattctttataagcatagccgattcactctcagaatgaacaatcttaacttgatacggaacaaaatcaaacgcttcatcaagtcttgtttcttcatctgacaatttccttaaaagttcttcacctatataaagaacataaacttcaagaggatacttatttttacgatattcaagctttactttattacctggcttaataaatatcaaatcctccatagtacatacaatattatcatcctcctggtgcatataccctatcccaccagctataaatacaattgtatagctcttcttttgcccaaagcttcgctgggtactatccaatattttcaaatattccattttgtagccttgctttttcatatgtctattttgcacactttcctattatattttttgttcattttgtcaaaatatacaatatatcaatttttcgtagtttgcaagcaatatttgtatatggatatcagcataaccacaatataataagattgtagctaccaaaacaatataaatttgggaggtaaattatcatgaaagaaacaagacctttttccatgaaggacaaaattggttacactcttggcgatttgggatgttgctgtactgagcagttccgtgccatgtatcttgctattttttatacactggtattaaaagttaatccagtacacgtaggaatccttatgcttattacaaagttttgggatgctataaatgaccctttaattggtgcacttgttgatagccacaaaaacaaaggaaaaggaaaatttattccttggattaaattctttgcttttccaactgcagtactctgtatattaggatttgttaacgtaagcaatttcgcttatggtgcacgtattgcttatatgttcattacatatattgtttacgaaattatgtacacatgtgtcagcgttccatttggtagtctttcaagtgtaatgactgatgatgttaaccaacgtactgacctttctcgtttcagaagtcttggcggtacaatttttatgacagttatcgttattgctggaccattattcttatataaagataaccagccagtacctagccatttccttattatgtcagcaatctgtgcagttattggattaatctgtcttatgtttacatctcattggtgtaaagagcgtattattacagagccagttgttgagaaaaaagaaaagcttaactacttccaggtaattaaagatattactaaaaacaaagcattactcggagttatgttatcaagctttatcggtattgttggagcaggtatggttaacggattaaatacttatttattccgcgattattttggaaatgttgccatcatggcagtttcaggtatgttaagtgtaatctggtcacttattgcatttgtaggcacaaaatttgttgctaagaaatttggaaagaaagaatggattatgtacagtgcaactttctcagttgttgtttatgctattttattcttcttcccacttgaaaatcctatgctctttattatcatcaacggaatctgctatcttggagtaagtggtttccaagtattagtttgggcacttgtaaatgatgcaattgattatcaggaacttcagacaggaaaacgtaatgaaggaattgtatactcagcatatacatttttccgtaaacttgctaatgctgtatcaggaagtatgagtagttttgcacttgcaattgctggattccaggttaatgaagctgtccagaatgaagcattctcaggacatctttggaaaacatatacaggtttatatgttgtaggatatttattagctgttctggtattaaaatttatctaccctcttacaaaagagaaaacagctgaaatgttacaggatttagctgacaagcgaaatgctgctactgcagaataaaattagaaacggaggtattttaaattgacaaaacaagtagaaatcacaaaccgtgatggacacatcttacgcggaatagttaacattccagaagatggcacaagatttcctgctattgtaaatgtacatggctttacagggaataaaagcggttacaaaagtatttatactcacacagccagattcttagctgaacatggatttgccagtgtccgttttgatttatacggaaatggtgaaagtgatggtgaattcgaggatatgacctttacaggtatcctacacgatatcgaggatattataaactggactaaaacacaagattttgccaatccagataagattatcttatctggtcagagtatgggaggatacgcagctgctactgcagctcctattgttaatccttatgctctcatgcttatgtgtccaggtgctggaatgtggtttggatgtaaggatcgtgctgaagccatggaagctcagggaatcaccaaagccgatattgaaggactcactttcccaacatcttttaatcatgatttatttaattatgagccattctcgtcagcagaaggatacaacggaccagtcctccttataagaggaactgcagatgatttggtagatgatgcaacatgccatagatatgagtcactttacaatggaaaatgcaattataaaacgattgaaggcgctaaccacaattttgccagtgcttttgcaagagcagaattagacaaattaatgttagagtttttaacaccacttaaatagtatactcactttgaaaggaagtatgaacaatgaaattattagagcctataaaagttggaaatattgagtttaaaaaccgtattatgttcccaccacttacaacaggatatgaggaaaaagatggttcaattggagaacaaagttttcgtttttacgagcgtctcgcaaaaggcggtgtcggatatatagtaattggagatgttgcaccacttccaacattctctcctacaccaaagctttattcacatgagcaggttcaaagcttcaaaaaacttgctgacgcatgtcatgaaaatggtgcaaagcttggaattcagttattccatcctgactacaatgtcaaagctttaaacgatatgttccatcagggcaaaatgcaggaagcaagagctaaacttcaccatgatatgcagcactttgtaaatgaagtaactgcagaagaacttgatgaaataataaagcatatggaaaactgtgctatcttagcacacgaagctggtgttgattgtattgaagtacatggagaccgtcttgttggttctctctgctctcctattttaaatcatagaactgatgaatatggcggtgacctggctaatcgtacacgttttgcattaacacttgtaaaaagattaaaaacaatcgtacctgacatggttatcgactacaagcttcctatagttactcctcttggagaaaatagttttagaggaaaaggtggtcttccatttgatgaggcttgcatttttgcaaaagaattagaagcttgcggtgttgacacattacatgttgcacaggctaaccatacaggaaatatgggtgatacaatccctgccatgggaacacagccatacggatttatggtttcttattctaaaaaaataaaagagcttgtatctattcctgtatctgtagtaggccgtatcgttacaccagaagctgccgaagcagttattgcaaatggttctgctgatatcattggattaggtcgttctcttctcacagaccctgactttgcaaacaaatgcgcagatggacattgctgtaatgtcagaacatgtatgatgtgcaataagggatgtacagataatattcagaatcgtgctttcttaagttgtgtacttaatgctgaaaacggttacgaagcaacacgacatataactcctgcagcatcatcaaagaaaatagctattattggtgctggtattgctggacttgaagctgcacgtgttgctgcattaagaggtcatagtgtaaccatttttgagaaatcacttcagattggtggtcagttacttattgctagtgtacctccaagaaaagaagaaatgatgagaagtattaattattatgcaaatgtacttcctgaattagatgttacattcaggctaggtgaagaattcacatcacaggattataattcattcgatgaagtaattgtggcaacaggtgcgaacaacgcaataatccctgttcctggcaaagatcttccaactgttacaagtgcatgggatgtgcttgccaagaaagaaatcgtattcggtaatgtttctgtaatcggtggtggtcttgtaggtgttgagacagctgaatatctggcttcacgtggatgtaaggttacaattattgaaatgatggaccagattgcaaaagaagaaagcaacactgttctacctactctaatgagtgaattagagcattataatgttcaaatagtaacatctgcaaaattatcagaaatcaaagatgattctgtagttgttgaaaaaacaatagacgacaatacatcaacagaagaaattgcttcagactttgttgtaatggctgttggtgcaagaaagaaccttccagagctttctgattgtcctctcccacttcactatattggtgattgtgctggagaacgtccaagtaatattgatcatgctattaaatcagcatatgatgtggcatgtgaaatataaattattaattaccccattaccacaaaatccatgttccaatttaaggaacatggatttttatttaagcattgctcgctactttatcaagaagtcttgcggaatctcgctttgcttttcttgttgagtgagcataaatattcattgtggtactgacatcggagtgtcctaacagttcctgtacatctttcggagcagccccattggaaagcaggttgctggtgtaagtgtgacataactggtggaaatgaaaaccatcaaatctaaacgttgatttgccgtctgtttcctaaccggagcaggcgtttttttattttagaaatgcacttgtccgcggaaactatacgaatctgcaaaaaggtattcacgaaacgacagggtatctggaagcatttcacagaaatctgcttttgaatgagaaaaatgagtttgtgcgactgtctgcataaacttaaaataactcaaaaaacttgacttttaacagcactaagttaaaatgaaagaaattaagttaaaaggggaataagaaatatccttacaagcgtatacggaatttctataaaatatgaagcagggaatcatcaggattctttgcctgtttatattgcagggagttatgattttcacacagcatatattggaaacagacgctgtataatgcttactccgacagaagaacttgccacacttccggcattgaaaaagcaaaagcatatttgacgactcctttcagaggataacagtgctgacgatagttccattattttatcttttggagatacaagcttgtttctcaccacctatagaggtgggagtcatctcccagctgatatatatagttaataaagagaggtgcatatgctatgccaggtatactcgtggttgaagatgatgaaaatttaaatcgtggaattacattttcactgaaaaaatccggatatgaggttttttcagcagaatcagtgaaaaaagcgaaaagaattgcaagtgataat

SEQ ID NO: 582 - DNA, 9870 bp, unidentified
  source 1..9870: mol_type = unassigned DNA
ctttttcatctgtaacgaagcaaacggcgaaacgacaaaagacgacaaatggacgaaaatcatcaatggcatgaccatctatacggatactgcactgaaagagtatctggaacaagcaggattttgtcagatccagagccacaaaagcaaaaagggctggctttgcgttacggcgcaaaagcggtgaaatagtgtaaggaggacggagcatggaacgaaaagaagcaatccgcagtgcctatcggctgacaggcggcaacaatttttatgacggtatgatcacctgctccaccctgagcgggaaagcagtgtgctgtctggtgtgggacatgaacaaggcggaaaatgacgcctatctggaaaaggcactgtccggaatcccggagcatttttccggcaagctgctggaggtgccggtgggcaccggcattctgaccatacgataaaaccaaagggagttctgcccggaccttcgtccgtgacggaactcccttttttagctttatagaaaaaccataagtcatctgccacgctcagcggagcaaaaaccacacacccagcaggatcgcaaggaagatcaggttggacagggtgaacagcccaaaatactgcgtcttcccctgtggcagctcccgtgcgatctgtcggtaggaaataagactggccatggatgcgatcaaagtgccaagacctcccagattggtgccgatgatgagggcttgtgtctctgccgtgaacccggacagcagcagggcggcgggaacattactggtgacctgcgaagcaagaaccgccacaagaacttcccggccggtcagaaactcctgcagccagccggaaaaggccggaatgcgccccagattgccaatgaagatgaaaaaagccacaaaggtcaaaagcagggaatagtccactgcccgtaaggtgtgcgggtctgcaaaaagggcgcagacgagtacagcggcaaaggcaatgccataaggcaacacccggatcacggacagcaggcaaacggcaaacagaaccagatacagcaggatgatcttctgatctccctgagatgcagaagaagaaacaagctcgtccacggagagggcggcagaggctttccggcagaccagcgctgcccaagccagcagcaggagcagagagaccagggtgtagggcagcataagaagaacaaatcccccggtgctcatgccgctttttccgtaaagatagaggttctgcgggttgccgatgggggtcagcatactgccaaggtttgccgcaatggtctgcatacagaccaccgggatcagaagggagcggcggacatccgctcccagacggctcaggaccacgaacgtaaagggaacgaaggtcagcagggaaacatcgttggtgatgaacatgcttccgaaaaagcacagcccgaccagtaccagcgtcagctgaaaggtgctgtgggtacgggacagcaatgcccggcccagtccatcaaaaaagccctgccgccgcagcccggccatgaccgtcatcagggaaaacaaaatcgccagcgtgcgcaggtcgatgtagccgagatactgcgcatccggcagaacaaagaaggcggagacaacggccagcacagcggctgcggtgagaaccgtttcctgctgaatgaattgtttgagtttcatagagacacatccttgtaattgtaaaggcagccctgctgcgatgccgggcggcctttcttcgtatttcagagcagcagctcaaacaacccgatcatcagcggcattcttcaatgtggaagatcgctactttcccgaagaacggattgcaagtgcgtgcagcttccggctcaaatcggccagacaccatgcgattgccataccgccggcaattccaagagcggccagaaaggtctgctctccgaaatgctctgcagcagacaaatcattggagacgactgcgttcatgcagtagtagagggtgcttccgggaatgaggggaatggcagcggtgatgaagaaaggcgtagagggtgcattgcagcatcgggcaagaatttcagcatacagagcggcacagaaaccggccaacagattggcaagaaagacgctgtgcagggtgttggcggcaagaagataagccagccatgccagaagtccgcctacaccggcggcgggtaagtagcgccggttcagattgaagatcagtccgaaaccgaccgaaccaagggcagcactgagcaactgcgaaaaaacctgtatcatgcggaaattcctcccatcaaccagatggcggccattatgccgagtgcaagggtggcggccatcagaatggcttccaccagccgaagagagccggaaataatgtccccaagtaagatgtcccggatggaatttgtcagcatgatgccgggaatcagcagcatgatgataccaatcagaactttatcggcatgaaactgcatcccaaagcggcagagcagcagagtggagacaccgctgagaaatgatgctataaactgaaattctacgccattcatacaaaaaggcgagagatagcgctccatccagcaaatcagaacggcaatgccgccggccagcaggccgtcccagagatttccaccaaagaagatggcaaaactggaagcagccaacacactgccggcaagatgcagtcttgggtccggatgctgtgccagaatggcattcagctggcgctgaaactcttctatggaaggaggcgctgtgcagatacggcggctgagcgcattgagcttttccaatgtcagcaggtcattgctggcagcgtgacgcaggcggcgggtctcggtctgcggcggcagcgagggcatggtaagcgtgaccacgatgctggatgtgatcacgaatacattcacatcttctgccccataggcgactgcaatccggttcaaagtgtcctcaacgcggaatacttctgcgccgctgttttgtaaagcttcgcccattcggaccagaatgtggagaaaatgactgatctcggtctcttccacaatatcacgctcttttcatctcggtttccacattattatagcgggtggatcggcagaacgcaagacgctgcaaggacagagaggctttttgataactgcattgtttacgcgggcaatggatcgcctggttctgaagaaacggtttgcatccgttctgtcacagcgaaagactacgattggaaaagaaaaaattgaatccagtgcaaacgattttgccgagaattgcatgaaatattataaaagtattattcttttatgaattttagcactctactattgacactgctaataaacggtgctataacagtggcgtgctcaggagaaaggggcatgagggaaccgcaaggctcccgggaagactccgctcctgatgcacgatcttgattttatgcccgacccgaacgccgggattggagggttgttttatgtttatgcctgctgttttccatgaaaatctgttcgatgatttctttgatccgttctggaacgacggtgcactggagcgtgcaatgaatcgtgaagagcgtgagaccttcggcaagcgcggcgcaaacatgatgaaaaccgatgtgaagcagaccgccgatggcaactatgatgtggctgttgacctgcccggctgcaagaaggaagacgttcagatggagctgagcgacggctacctgaccattcaggccgtccgcaaccactccaatgacgagaaggacaacaatggccgttatctgcgccgtgagaccttctccggtacctgtgcccgcagcttctatgtgggtgatgccgtgaagaaggaggacatccacgcaaagttcgaggatggcatcctgcacatcgtactgcccgcaccgcagcagcagaaggctctgcctgcgaatcccaatctcattgaaatcgaataatgtttgtgcatcggtgtgaggaacaccggcgcatagaaccaacccccggagaaccgcaaaaagctcttcggggttttttgtattctgacatcttttcggaagtgaaaaagcgtggtacctacaacaccgacacgcaagaggacgcagcagtcaatctttttgaaaccgccgtcaaacacgcgtaaaagcgaaaagaacccgctttcgacatcaaattgaagtgaaagcgggttctttattgaagtgacaccaagttgtcacaaaatcacagttttagaaggcctgtgcatcatatttatagcgatatttcgccgtaaattcgtttctacttgatgggatgaattatttccgacttgtcagccggttgagcagcatcacagccaggacaatgataccaatgacgagaagaatgccgaccatgccgatgagcatcatgggcagggtggtcatccacgaagaaagatgaagcataagtgtacctccgttaagccatcagggtcagaatcaggccgcctgcaatgacggatgcgatctgccccgaaacgttgacgctgatggagtacatcagcaggaaattctggttatcttcttccaatcccatcttgttgaccacacggccgctcatggggaaggcggagatgccggctgcaccgatcatcgggttcagttttttgccttcgggcaggaacaggttcagcagctttgcaaacagcacgccgcctgcggtatcaaaaacgaaggctaccagacccagtgcaaggatgagcagggtatcgggccggacaaacttgtcagcggtcatctgtccggccacggtcaggcccagcacgatggtgatgaggtttgccagcacattctgcgcggtttcgctgagggcgttcagtacgccgcactcccgcagcaggttgccgaacatcagaaaaccaactagagctacgctggcaggagctaccataccggcaatgatggttacaacaatggggaacagaatcttcgtcagctggctgacattgcccttttcatagggcatccggatgcggcggtccttctgagtggtcagcagtttaatgaccggcggctgcacgatgggcaccagagccatgtaactgtacgctgccaccatgatggcaccaaggtactgggagttgagggtgttagctacaaaaatggcggtgggaccgtccgctgcaccaatgacagcgatggaagcagcatccttcaaatcaaagaagaagcctgccagaaacagggtgaagaaaataccaaactgcgctgcggcaccaaagagcatgagccacggtttttccagcagggggccaaagtcgatcatagcaccaatgccgatgaaaagcagcaggggaaacagctcgttggacatgcctgcttcaaacagggcagaaatggggcctacggtatcgccctgcgtgatggcaccggacagcggcagattgaccagaatggcaccaaagcccatgggtaaaagcaggctcggctccatttttttggcgatggcaaggtagatgagcaatgcaccaatgccccacatcaccaccatctgccaagtcaggtttccaaaattggaaaacagacttgcgaatgtgttcagaaagttcatagttttcttgcctcctattgtgctccggtacggtgacaagaaaaagagactcctgccacagcaccttgtctgtgacaaaagtctcaagcgaacacatgacatcgggcatttctgccgtgatgacgctgccatgcagcagtctcccgaagaataagccggaacactgccctttactcccttttatcagatgtattaaaacagaatatgggaaaactgtcaagaaaaatacagaaatcttttctatatcttatgagggtccttccgctgtggttcacgcaagctgattacagcaaagcatttctggaagcccatcgagagaaaatcactctgcacaaggcggccccggagagctgcgataagccctccggggccatttttgttttccgacatctttccgacagtgggaaagcgtggtagaataggagcaaagctgatatatgatcaacaggaaggggaaaatcaagatggaaacggtctatatcgcaggcggatgcctttggggcgtacagcatttttttgacacagtgcctggtgtacagatgactgaagccggcagagccaacggaacaacgagctctctggatggcccatacgatggatatgcagaatgcgtaaaagtggtctatgatgagaaaaacacaaacatttcagaactgatggcacacctgtttgagatcatcgacccctacagcctgaacaaacagggcgtggacgttggaaaaaagtaccggacagggctgtacagtacagatcccagacatctggaagaagcaagagcttttataaacggccgggaggaccgggacaagatcatgctggaagtgctgccgctgacaaattatgtccggagcgctgaggagcatcagcaccatctggaacggcaccctgaagactgcagttactgccatatcccggatgctgtcctgaacagatacagaaatcagtaaatatgcgatcctaccattgcagtaacaccaatggaaagtatcaggagcaggagagtgccccgctggtgcgggaatttctggcggataccggcatgacggcggcgcagatcgaacgggtggcctatctggtggggcaccactgatggttctggatgtggcgcttggctgagagagcaaagcggcttctcaatggcaaaataacggaaaacacccctgtgagtttttttaaactcacaggggtgtttttaggcgttggggtcggtcagcacaaaggtcagctcggcggtggcggcgcacttgccgtccacccacgccgaggctttgcccacgcccaccgggccgtgctgctctaccagttcacagtgcagggtgagcacatcgccgggggtgacctgtttgcggaagcgggcattcttgatgccgccgaagagggccagtttgcccttgttctccggcaggctgagcgccgcagcggcaccggtctgggccagtgcttccagaatgagcactcccggcatcaccggctggccgggaaaatgtccgcagaaaaattcctcgttgcggctcacgcacttgcggccgatggcccactggcccggctcatagtccagaatgcggtccacaagggcaaagggatagcggtgcggcagaagcgccgcgatctcctcactgttcagggcgtttgcgtctgcacgcacggtgcggggttctgccatgggtcagccctcccatctgcgcagggcgatgcaggcgttgtgcccgccaaagcccagactgttgctcagtgcgtaggtcatggcctgcgcacggccagtgttcggcacatagtccagatcacattcgggatcgggctgctcatagtggatggtgggcggcgcaaactggtcatgcagggccagcgctgtaaatacggcttcaatgccgcccgcaccgcccagcagatggccggtcatgctcttggtgctcaccacagtcagctgctttgcgtgttcgccgaacaccgcatggatggcggcggtctcgcaggcatcgttcatgtgggtgccggtgccgtgggcgttgatgtggtccacctgctccggtgcgatgcctgcatccgccagcgtcagcgccatgcagtcgatggcacctgcgccgccgggggcaggtgcggtgaagtggtaggcatcgcagttggcaccgtagcccaccacctcggcgtagatgtgcgcaccgcgggcacgggcatgttccagctcttccagcaccagcacaccgctgccttcgcccatcacgaagccgccgcgccgcgcgtcaaagggcaggctggctgcatccggatcggtcgcggtggaaagcgctttcatgctggtaaagccgccgatgcccagagggctgatgcagctctctgcaccgccgcagaccatggcggtctcgtagccgtcacggatgcggtggaaggcatcgcctacggcattggtgccgccggcgcaggccgtcaccgggcaggtgcacatgcccttcagaccaaagcggatggccacctgtgccgctgccatgttggcaatggacatgggcacgaaataggggcttaccttttccatgcccttctcttcaccacgggtgtgctgctcctcaatggtgggcagaccgccgatgccgctggaaaggatgacaccgatctgtttggcttccgcttcggtgtccagaccgctgtctgcaactgcttcagcggcggcagcaagggccagaacggtaaagcgggccatcttgcgggcttcctttttgtccacgatggtttccgggtcaaagcccttcacctcgcctgccagcttgcatttaaaatcggtggtatcgaactgggtaatggggccgatgccgcatttgcccgctttggcagcggcccagctgtcggcggtgttgttgcccagcgggttcacggtgccaaggccggtgatcacgactctgcgtttttccatgagagttttctccttttacattgccatgccgccgtctgcacagagcacctgcccggtgagatagctgctttgttctgcggcaaaaaatgccactgcatttgccacatcctccggctttcctgcgcggcctgcggggatgccctttgccatttcggcacggacggcttccggcagggcggcggtcatgtcggtctcgataaagcccggcgcgaccgcattcacggtcacattgcggcttgccagctcgcgggcaaggcttttggtcaggccgatcaggcccgccttgctggcggcgtaattggtctggccggcgttgccccgcagggccaccacactggaaaggttcacgatgcggccccagcgctggcgcaccatgcggcgggcggcctccttgcagcagaggaacgcacccttgaggtttgcgttcagcactgcatcgaagtcctcttcgctcatgcgcaggatcagattatcgcgggtaatgcccgcgttgttcacaaggatatccacccggccaaaggcgttcaccgactgttcaaagagcgctttgcagccctcggcagtggaaacatcggcctgcacagccacggcatctgcgttttcggccttgcacagagccaccgtctcggcagctgcagcttcgccgtggcagtaattcaccacgacattgcagccctgctttgccagctggatgcacacagcccggccaatgccccggcttccgccagtaacaacggcggtgcggatgatcgtttcttcgctcatagctcttccttccatgctgtcagtgcggcgttcagctgctccggggtctccaccgaagcgcagaccacgccgggcagggtctttttcacaaagccagccagagcactgcccgggccgacttccagaatatggtctacgcccagctcgccgaggcggtggagcgtatcttccatgtaaacgctgctctgcacctgcttcacgagcagggcggggatgctgtcctgctcagctttttcatggccaaggcagttgaacagcaccggcacctgcatctcgccaaagggctcagacgcaaaacgctttgccagtgcatccccggcgggggccatgaggcgggtgtggaacgggccgctcaccttgagcgggatgcagcggcgggcaccggcttctttggccagtgcggcggctttgtccacagcggctttctcgccgccgatgaccagctggcccgggcagttgtagttgcagatctgcacacagccgagctgtgcagcctgctcacagcaggctgcaagtgcctgccggtcaaggttcagcacggcggtcatgccgcagtcgatgccctttgcagcttcggccatggctttgccgcggtaagcggccagctcgatggcctgctttgcggtgaacaccccggcagcttccagcgcggagtattcgcccagcgaaagcccgg

SEQ ID NO: 583 - DNA, 15903 bp, unidentified
  source 1..15903: mol_type = unassigned DNA
  misc_difference 10807: note = a, c, g, or t
  misc_difference 10808: note = a, c, g, or t
  misc_difference 10809: note = a, c, g, or t
  misc_difference 10810: note = a, c, g, or t
  misc_difference 10811: note = a, c, g, or t
  misc_difference 10812: note = a, c, g, or t
  misc_difference 10813: note = a, c, g, or t
  misc_difference 10814: note = a, c, g, or t
  misc_difference 10815: note = a, c, g, or t
  misc_difference 10816: note = a, c, g, or t
  misc_difference 10817: note = a, c, g, or t
  misc_difference 10818: note = a, c, g, or t
  misc_difference 10819: note = a, c, g, or t
  misc_difference 10820: note = a, c, g, or t
  misc_difference 10821: note = a, c, g, or t
  misc_difference 10822: note = a, c, g, or t
  misc_difference 10823: note = a, c, g, or t
  misc_difference 10824: note = a, c, g, or t
  misc_difference 10825: note = a, c, g, or t
  misc_difference 10826: note = a, c, g, or t
  misc_difference 10827: note = a, c, g, or t
  misc_difference 10828: note = a, c, g, or t
  misc_difference 10829: note = a, c, g, or t
  misc_difference 10830: note = a, c, g, or t
  misc_difference 10831: note = a, c, g, or t
  misc_difference 10832: note = a, c, g, or t
  misc_difference 10833: note = a, c, g, or t
  misc_difference 10834: note = a, c, g, or t
  misc_difference 10835: note = a, c, g, or t
  misc_difference 10836: note = a, c, g, or t
  misc_difference 10837: note = a, c, g, or t
  misc_difference 10838: note = a, c, g, or t
  misc_difference 10839: note = a, c, g, or t
  misc_difference 10840: note = a, c, g, or t
  misc_difference 10841: note = a, c, g, or t
  misc_difference 10842: note = a, c, g, or t
  misc_difference 10843: note = a, c, g, or t
  misc_difference 10844: note = a, c, g, or t
  misc_difference 10845: note = a, c, g, or t
  misc_difference 10846: note = a, c, g, or t
  misc_difference 10847: note = a, c, g, or t
  misc_difference 10848: note = a, c, g, or t
  misc_difference 10849: note = a, c, g, or t
  misc_difference 10850: note = a, c, g, or t
  misc_difference 10851: note = a, c, g, or t
  misc_difference 10852: note = a, c, g, or t
  misc_difference 10853: note = a, c, g, or t
  misc_difference 10854: note = a, c, g, or t
  misc_difference 10855: note = a, c, g, or t
  misc_difference 10856: note = a, c, g, or t
  misc_difference 10857: note = a, c, g, or t
  misc_difference 10858: note = a, c, g, or t
  misc_difference 10859: note = a, c, g, or t
  misc_difference 10860: note = a, c, g, or t
  misc_difference 10861: note = a, c, g, or t
  misc_difference 10862: note = a, c, g, or t
  misc_difference 10863: note = a, c, g, or t
  misc_difference 10864: note = a, c, g, or t
  misc_difference 10865: note = a, c, g, or t
  misc_difference 10866: note = a, c, g, or t
  misc_difference 10867: note = a, c, g, or t
  misc_difference 10868: note = a, c, g, or t
  misc_difference 10869: note = a, c, g, or t
  misc_difference 10870: note = a, c, g, or t
  misc_difference 10871: note = a, c, g, or t
  misc_difference 10872: note = a, c, g, or t
  misc_difference 10873: note = a, c, g, or t
  misc_difference 10874: note = a, c, g, or t
  misc_difference 10875: note = a, c, g, or t
  misc_difference 10876: note = a, c, g, or t
  misc_difference 10877: note = a, c, g, or t
  misc_difference 10878: note = a, c, g, or t
  misc_difference 10879: note = a, c, g, or t
  misc_difference 10880: note = a, c, g, or t
  misc_difference 10881: note = a, c, g, or t
  misc_difference 10882: note = a, c, g, or t
  misc_difference 10883: note = a, c, g, or t
  misc_difference 10884: note = a, c, g, or t
  misc_difference 10885: note = a, c, g, or t
  misc_difference 10886: note = a, c, g, or t
  misc_difference 10887: note = a, c, g, or t
  misc_difference 10888: note = a, c, g, or t
  misc_difference 10889: note = a, c, g, or t
  misc_difference 10890: note = a, c, g, or t
  misc_difference 10891: note = a, c, g, or t
  misc_difference 10892: note = a, c, g, or t
  misc_difference 10893: note = a, c, g, or t
  misc_difference 10894: note = a, c, g, or t
  misc_difference 10895: note = a, c, g, or t
  misc_difference 10896: note = a, c, g, or t
  misc_difference 10897: note = a, c, g, or t
  misc_difference 10898: note = a, c, g, or t
  misc_difference 10899: note = a, c, g, or t
  misc_difference 10900: note = a, c, g, or t
  misc_difference 10901: note = a, c, g, or t
  misc_difference 10902: note = a, c, g, or t
  misc_difference 10903: note = a, c, g, or t
  misc_difference 10904: note = a, c, g, or t
  misc_difference 10905: note = a, c, g, or t
  misc_difference 10906: note = a, c, g, or t
tcagatcgccacatcctgccactgtccgccgatcagttcgcgggtggatttgaacccggcctttttcagcagttcgaatgcttccgcacgtccgtcgttcaccaggtcgggatagtggcagtctgagtttaccatcaccggaatatccagctcacgtaagcggtgcagatagtcggtatgcgggtagacctcctgtttcttcacgaggtttttcgtgttgacttcgaccatcagtcccttttcggcgatcaggtgcagacagtcgttgaatggtttttgataccagtccgcttgcaggtcgaagccttcgcatttgtgcccgttcatgtatatcttgtccatgtgcccgacaatgtcgattccgcctgcctcgatcattcgccgtgtggaactgaaatagtgggcgaccagcttgcggatatctccgtcgtagtaggcgtcgacagacttctggtactcccggaaaggaccgtcgatacacaccatattctcttccgcaagcggctgtgcgatcggaagaaagtggatggaaccgatacggtaatcgagcggcagattgcggaagtaggggatggacgcgttgtagctctcgtctaagaaatcgatttccagtcctacgtatatttccaaccggtcactgtatttctttttcagtcgttctatttctgtcagatattcgggcatatcgtctttagacatgttccagaatgtttcgaacggcagtggtgaatgggatgaaaaaccgtaggcgcggaacccgtgcgcaacagcgaatttaatgaagtcttccggcgtgctccgaccgtcacagaatgtacaatggctatggtagttactgagttgcataaatttttacttgtaaaagggcaaagataatttttttatcccgaaagacaacctgtttgataaaaaaaggcttgattgctgcctaagggttagcggcagaatcaagccttgaaaaacacgtgaataatgaaaaatcgtatgttttattttattacgttcagttcttttccaactttgataaatgcagcgattgctttatccagatgttccgtttcgtggcctgcggacaactgtacgcggatgcgggcctggcctttcggcactaccgggtagtagaagccggtaacataaatgccttcttcctgcatcttggctgcgaaatcctgggataatttagcatcatacagcataacggcgcagattgcggactgagtcggcttgatgtcgaaaccggctgctaacatcttttcacggaagtagctgacgttgttcatcagtttcgtatgcaaagcatcgctttctttcagcatcttgaacatttccaggctggcgcctacgatagcgggagcgacagagttagagaacagataaggacgggagcgctgacgcagcatgtcgatgatttctttctttccggttgtgaatccgcccatggcgccaccgaatgctttacctaacgtacctgtgaagatatcgactcttccgtatacattatattgttcagccacaccgtgtcctgtcgggcctactacaccggcagagtgggattcgtcaaccattaccaatgcgtcgtatttttctgccagttcacagattttgtccatcggggccacgtttccgtccatagagaacacaccgtctgttgcgatgatgcgatgacgttgtgcctgggcttcttgcaggcaacgttccaggtcggccatgtctgcattggcataacggtagcgttttgccttgcaaagacgtacgccgtcaataatggaggcatggtttaaagcatcggagatgatcgcatcttcttcagtgaacaacggttcgaacagaccgccgttggcatcgaaacatgcagcgtacaggatcgtatcttcggttttgaaatagtcggagatagcggcttccagttgtttgtgcagatcctgtgtcccacagatgaaacgtacggatgacatgccgtatccgtgtgtgtccatagcttctttggcagccttgatcagacgttggttgtcagacaggcccagatagttgtttgcgcagaagttcaaaacgtcgcttcctgcgtttactttgatgtcggctctttgaggagtggtgatgatacgctcgttcttatacaatccggcagctttgatgtttgccaattcctgagtaaggaaatctttcagtttaccgtacataactttgttttttgttagtatttttaattaagttgacaattatatctctattatcgcagacaagtggcaaaatattattcttgaaaccatttttttctttgtctctgatttgtctgccgatgcggcaaaggtcatattttttttgaatatataggctaaaaaatacaagaaattcataccggaatgtttttattctctatacctttgccatcgaaaaaacttaaaagaacatcaaacgcaatgaagaatgtattagtaattggttctaccggtcagattggatcagagttaaccatgaagttgagaggtatctacggtggaaacattgtagcaggttacatccccggacaggagcctaaaggcgaactgctggaatcaggaccttctgcaattgtcgacattacaaacgaacagcagattgctgagactgtgtccaaatataaggtagatacgatttataacttggctgcactgctgtcagccgttgcagaagcaaaaccgcagcttgcctggaaaatcggtatgggcggtttgtttaacgtattggaagttgcacgtgaaatgcattgtgctgtattcactccgagttcaatcggtgtgtttggcaataacacgccgaaagacaagactccgcaggatacgatccgtaacccgcgtactatgtacggtgttacgaaagtttcaggcgagttgttgagtgactactacaacatccgtttcggcgtcgacacccgttccgtacgttttccgggacttatctcctatgtgacacctccgggtggtggtacgaccgactacgcagttgatatctattattcggctgccaaaggtgagaagtttgtatgtccgatcaagcagggtacattcatggatatgatgtatatgccggacggtctgcgtgcagctattgaaattatggaagccgattcgacgaagttcgttcatcgtaattctttcaacattgcatccatgagctttgatcctgaaattatctacaacaacatcaaaaagtatgttcctgacttccagatggaatatgatgtggatccgttacgtcaggctatcgcagaatcatggcctaactctttggatgacacgtgtgcccgtgaggaatggggctggaaaccggaatatgatctggattccatgactcaggatatgttggctaaattgaaagaacgtttcaataagtaagaattaattttccgatcattagcagatcggtaggaaagaggcgactgcccggtgagatcggaagagcggttcagcaggaatgccgggtgcgggcagtcgcctctttgtttggatcgtttttattcagtattgtaggctgtttcaatcataatgtgtctgttgcttgtgcagggaatgactaagtcaaaagtgtatgaaaaattatgttgtaaaacatgaaatggttaaatcaggttaagagaaagcttttttttgtggaaatattatgctgcataacataaactctctatatttgcactgtgtttttcatggtattagatttaaggttaacaatgaagattggctgtccgtgaggatagcctttttttatttatacccggttgatgttgtttcctccgagaagcgatcattttatccgaattgcccgttcttttggtattcttgattatatttgtatatctgaaaagattcattgtaataaaaatatctttatatggaaatgtacaaagcaaatgataaccggtatgccgatatggcttataggcgttgtgggcggagcggattgctattgccggtcatctctctgggattatggcataatttcggcagtgtagatgtgttcagtaactttattcagattgcgtatgccgctttcgacaatgggattacacattttgatcttgccaataattacggtcctgtgtatggatcggcagaggaaaatttcggccgtatcctgaagaaaggtctggggcaatatcgggatgaacttgttatttccacaaaagccggatatgacatgtggcctggtccgtatggcaactggggaagtcgcaagtatctgatggcaagccttgaccagagtttgaagcggatgggattagaatatgtggatattttctattcgcatcgtccggacccacagacgccgatcgaagaaacgatgggagcattggctgacatcgtccgccaaggaaaagccctgtatgtcgggatatcgaattacactgccggacagacggaaaaagcacttgccgtattgaaagaacatcgtgtgccttgcttgatccatcaagcgcgttattcgatgctggatcgcaggatcgaaccggacttgttgcctctgttgaagcaggaaggagtagggatgatcgccttctcgccattggcacagggcatgttgacggataagtatctgaacggtattcccgataattcgcgtgcggccaaatctacaggccatcttcaacgtgaacaggtgacggaagaaaaaataaataaagtaagacaactgaatgaccttgccaaacaacgcggacagacgttagcggaaatggcgattgcctggctgttgaaagacgaccgggtgacgagcgtcctggtgggagccagttcggttgcacagttgatagataacctgaaggcgttacaaaatacagccttttcagcggaagaaatacaaatgatagaaaatatattacagtaatatacactgataaatcatcatttattaatccaaacaattaatgaaaccattcttatatcaggttgcatcccttttttattctgaatacggggcggaagtgagccgtctggcctttgttttcccgaatcgccgtaccgggctgttcttccagaaatacttgtcggaagtatctgagaagcctcttttctcgccgacgatcctgacgatcaacgatctgtttgtacagttgagcggaaagcaggctgccgatcggatcagcatgctgtttaaactatatgatatttatttgagacatagcggttcttccgaaacgttcgacgagttcttgtattggggggaaatgctgctgaatgattttgacgatatcgataaatatatggcagatgcccgtatgctcttcaccaatgtgacggacctgcgtgagatagagaatgattttagttttctgagccctgaacaaattgcggctatccggactttttggtcttctttttacccgaaaggagatacgcccaaccaggaacaatttctggcggtctggcagattttatatgccctatataccgatttgcgggaagcgcttgccaccgaaggcaaaggatatgaaggtatgatttttcgggaagttgtcgaacagatggagaaagacgaatgttgcgacctgccctatacaaaggttgtatttgtcggactgaatgccctctcggtggctgaagaacgtttcctttccgggttgcaaaaacggggaatagctgatttttactgggattacgcctctccgaaagtgacggatccggataataaagcctcttacttcgtggagcgcaatttgcggcaattcccgtcgcaattaattgaaaatggacaattgactattgacaatgaagatgacgacaaaaagaagatcgaggtgatcggcatcccttccggaatcggacaggcaaagcaagtgtgcagcattctgaacgagctttgcaaggaagacgaaatgagtgcggaagaagcgttgcggacggctgtgattctgccggatgaacatttgttgattccggttctgaatgccattcccgaacagatcaaacggatcaatgtgacgatgggatatccgttggccggtacaccggtcgcatctttgatggaatatattctggctttgcaaaagaatattcgttatgtggaccggaggccggtgttctatttccgggatgtcttgccaatcctgaaccatcggtatatctcgactacttctccggagatggtttctaatctggtaaaagatatttcagaaaacaacaagatttacatatcgtatgacgatctgaataagacgccattgttgtccatcctctttactccggtgactgcggtggaaactttctccgattatttgattaacgtgttgcaggaactgaataaagcagttgaaggtggaaagttgaaagttgaaagtgtaaatagtgacacggagccactttcaactttcaactctcaactctcaactattaacgacatcgaacaggagtttatcttccattatttcgctacggttaaccggatgaaggaagtcatgcgggaggcgaatgtagaaatgaaaatcgacacctatttccgtttgctgaaacgtgtgacggacacaattacgattcctttccaaggtgaacctctttccggtttgcagatcatgggtgttttggagactcgtgcgcttgactttgaccggttgattatcctttcgatgaatgaaggaattttcccgttgaggaaagcggctaattcatttattccttataatcttcgtcgtggattcggtttgccgacatacgaacatcaggacagtgtttgggcgtatcatttctatcgtttgatttatcgtgccagccatgtcagcttgctttatgatactcggagtaacggattgcagacaggcgaggttagccgtttcgtgcatcagttgcattatcattatgaggagccgatacagaataagctggttgtttacaatgtctcttcttccaagactcctgccttgcaggtagctaagacggaggaagtcatgaaccgtctggctgatttccggagtggtgggacgcgggcgatatcggcgagtgcagtcaatacctatctggattgtccgcttaaattttatttctccgttgtcgagggaatacgtgaagaagaggaggtaagcgagacgatcgaaagtaatgtttttggaagtatcctgcataaggtgatggaagaattgtatcagccattctgcggaaagatggtgacggctgatctgctgaaagcgatccgaaaagatacgcctatgttgacgggagcagttgcccgtgcctttgccgaaattttctttaaaacggacattgttcgtccactcaccggacaaaacttcctgatcggcgagatgattcgcaaatatgtggagaaagtgctggaacgtgacgcaaaacagactcctttccgttatatcgaatcggaaaagaagataaaatgccttttcccattgacggataaaagcaatatccagttgaaaggatttatcgaccgtatagacgaagtacgcgatgtcgtccgcattattgactataagagtgggagcgggacgacgcagtttacctctgtagaagctcttttcgacaaagcagatacggatcgttccaaagcggttatgcaggtctttatgtatgcatggatgtttaacaggtcagttcagctttcaacagctattcagccgggtatctattatatgaggaccctcttttcttcctctttcgatcctggaatttaccatcgtacagaccggttcaaaacagaacaggttttggacttcgccaactattgcacggattttgaagacagcctgcgaaattgcttggatgaaatcttcgacacagaaaccccattcgtgcaaaccccgaacggcaaagcctgcatgtattgtccgtttaaggatatttgcggaaaatagtgtttttacagatttcccatatattcatccacaatttcattcaggaagcggttgaatggaagaagctttcgaaaacaatcgatggtttcttccatccagtccggctggctgaaaaaactgtcgggcttaatacctataacgctgaagtctttgtgccttaatatatgaccgtaaggagaatcggaggggaaacctgccgggatacgttttagcatgtccccttcgagtgacgggtacagagctttgaaggaaggctcttcgatgatggaaacaaattcatctatgttattgtatatttcacgtcgaaggactttcaatatttccggtttgggataccagataccaccggacagtacgcagtattccggttcaagatgaaagtagtaagctccccggatactatgacgtcctccttgagcaatacaggctgacatataagtcttgtaaggcgacttgtcgaggctgaagcggatgtcgcgattaatacggaacagacatttccgtgcatccaatccccgtatatcaggatcaaatacgctgattcgttcgattaactcttgtacttcgttgataaaagcacagcgaagtttgtcatatcgttctctattttcatggaaccaaacggtattattgttgcgtcgtaaatcgtctaagaatcggataatttctgcattcatattaggatattctttttttattgtattttgtatctccattgtttcggagtcatctgtttcatctttttgaaatagcgattgaagtagggaatgtcggtgaagccgcattgccaggctatttcgttaatgtccttatccggaaagttgcggagtaaagtgccaacggcctctatccggtattcgttgatgaagtttgtaaacgttttgcctgtttcacgtttgaaaaacgagcagaacgccgttgtgctcatgctgattacgtttgcggcgtccgaaagagttattttctccttgtaatgctcgatgacgtatttgaagatcagttgcatacgttgcatgtttttggtaatgccgttgaataccgtttcctgcaaaccgatagggattaaatcggttgtggttccgatttgttgcaggatgcggatcaacatcagcatcctttcgcttgcattcaggaggttcatttcttctaagcaggatttgatctttccggctgtttcgcctgtcagcaggatgccttgctggattgccgataaccggtgagcggcatattcccattcggtaaaaaaagacaggccggtttgtagcaagtcgggattgaattgcacaactatgcatctccgttttccatcaggctcgcagctttcggggttatacatccaacaatgtggttggttggtcgggaccagtacgacttctccctcctcgaacggctccagaaagtcgcctatcatccggtagcctgaacctttcacaacataacatatttctatttcgggatgaaaatgaagaggcatttcgtctttcgggtacaagctggaataatcgtagcgtaatgaggcacaactatcttttttgatttgttcgaattttagtttctcgtgcatgtcggatgaactttctgataaaacacagtaaaattagacaataattgcataatctgcgacaattacacttaataattttgttgtttctttgcggccggaaaaacagaaagattgaataggttatgaagaaaggtttgtatgcattgtcttttggcacatttgggttggggattgcagagtttattatgatgagtatcttgccggatgtggcggcaggatttgatatttccttatccgaagccgggcatcttatttcggcttatgcgttgggggtatgtgtgggagcaccgttggtagtggtggtggccaggagttggccgctacgtacgatcttgcttgctttggttgggctttttgttgtcgggaatctgcttatggctctgtcggccgattattggatggggttgtgtgcccggtttgtatcggggttgccgcatggggcttatttcggagtcggttcgattgttgccagccgtttggcggagaaagggaaaagcacttctgctgtagctattatgataatggggatgacgattgccaatttgttcggtgtcccggccgggaatttcctggggcactttctgtcctggcgtttggtttttgtgattgcagcgttgtggggtggcgtaacgatttggtttatccggaggtgggttcctgttttgcccgccctgccggcgacgaatctgaaagggcagtttcgttttttgagaaggccggaaccgtggatgctgattgctgctaccatgttaggaaacgggggagctttttgctggtatagctatgtcaatccgttaatgacggaggtgtccggtttcagtgtcgggacaatgcctgtattgatgttgctggcgggtgcgagcatgtgtgtcggtaactatttgggagggcatttgtctgatcgttttacacctggtatcgtagcgatgtccatgcagtttctgatgtttgcatcacttctgctgatttatttttttgcttcgtacggctttttgtccgctttgctgatgtgcgtttgtactggttgcctgtttgcagtttcttctccacagcaattgttgttgcttcaatattctcctggcggagagatgatgggcggggcgatggtccagcttgcttttaatttggggaatgccgtgggggcttattttggaggattgtcgatcgaacatggggcagggctggaaagtacggcattgatcggttcgttttttgccctgttaggaactacggtgtttctggtattcaactatatggtgtttaaacctcagaggaaattacttttaaaggggggaatataatttccgaggatcaagacggtgtttttggagataaaaaacagccgtccgaaatcgggacggtgtttttggagataaaaaacagccgtccgaaatcgggacggtgtttttggnnnnnnnnnnnnnnnnnnnnnnnnnnnnnnnnnnnnnnnnnnnnnnnnnnnnnnnnnnnnnnnnnnnnnnnnnnnnnnnnnnnnnnnnnnnnnnnnnnnnagataaaaaacagccgtccgaaatcgggacggctgtttggatttataatgtctcttgtttcagttgttcgacgaaacgatcgattcgctgtagttctttcggaatatcgattccctgcggacagtgtggattacattggttgcaactagtacaatgatccgcttggcggagtttcggtacactgcggtcgtacccgatcagataagcccggcgagcttcgcgatagttttcatcctgtccgctctgagggacattcccctcgttcacacatttattataatgaagcaaaattcccggaatatcgataccgtaaggacaaggcatacagtatttgcagtcgttacacgggatggtcggatactgcatcatcaagtcggcggtgtcgaacaagaaacggttttcctcttccgtcaacggttgcaacgggcagtaggtgcggagattgtcttgcaggtgctccatgtaagtcatgccgctcagcacggtgagtacgccgggaaacgagccggcaaaccggaaagcccaggaggcgacgctccgtcccggttcgcgttgcttcaggcgggcgacgatatggtcgtgcacgttcgaaagccgtcctccgaggagtggctccatgatgatggcgggaatcccccgtttctgcaattccccgtacagatattccgcgtcggtgtttcgcgggttgatctctttggcatgtttccagtccaggtaattcaactggatctggacgaaatcccattgatattcgtcgtgtttcgaaagcaaataatcgaacacctctatatctccgtgataggagaaacctaagtttcggatacgtcctgccttgcgttcttcgagcaggaagtcgagtatgccgttcttgacataccggttttcataggcttccataccacccatgccgatcccgtggagcagcatataatcgagataatcgacttgcagctccttgagcgaattgttatacatcgcgatagaggcttcgcggctccatgtgtcgggagagaagttcgaaagcttggtggcgatataatatttgtcgcgcggatagcggctgagggcgatccccatagcatgttccgaacgtcctttgcaataggcgggcgaggtgtcgaagtagttcacaccgtgctcgatggcatagtcagtcagccggttgaccatctcctggtcgatttcgtcatcgctgtctcttgcgctgtttttggcaatggtcggcaggcgcatgtatccataaccgaggatggaaactttgtcttttgtggacggcgtcgtgcggtatgtcatccggtccgtgggaataggggtggagcttcccggacctgaggccatcccgctgtccgaactgcacccggagagcaacggggcggtagttgccgtgctgattcctacaatcttcaggaaatcgcgacggtttatcgcttgatgattgtcttttttcatatatgatgattcttttatttcttgatcaaatattccggtgttgttcgtgtccttccacatatatggcgctgaacggacgcgacgggcacaggttttcacaggctccgcagccgatgcatttttcctcgtttacgaccggcagttgaggcgaatccgggtcgttcgggtcttttgccaccatcaagatcgcctgggtagggcaatggcgggcacagttgccacaagtgacgccgtcccggttgacgatgcaattttcctgaatcagtacggcatgtccgatctggatagccgtcttgtccgctttcgtgatcggacggatcgctccggtcgggcaaacttccgaacatttgacgcattcgggacgacagtatcctcgctcgtacgatacttctggctgcataaatgtttgaaggttccccgaaggacgcagcacatggttcgtacaaaccgatacacaaagctggcacgcggtgcaatgctgggagaaattggcagcgctcagcgagcccggaggagtgatcggggttgtccggtccggtttctttttatcttcgatgatggccagtccgccgtcgactttcttgtccgggagttgtactttttcctgggctttcagtgcggctgaagtggcaagtaatgccgatacggtaaagaatttgcgacgatcgggcttgtctacggccggttgggcggtctgtatttccgccttgtttgtttttctgcgtgtatatcggatggctccctgccggcatttgtcgatacaatccatgcaggcgacgcaacggctgtaatcgatctcgtgtgctttcgcattgatacaggctgctttacaattgcgggtacacaaaccgcaaccattgcatttggacgtatcgataaccggcttgaaaacggaaaaacgggagatcaatcccaaaaacgttcctaccgggcagatcgtgttgcaataggttcgcccattccgccaggcaagtatgatcagtataatgaaagtaactgtggcaatgataaaggttgggaggctccgtagccagacttccgtctcgtagaaagcataactgcccgcccgttccgccaagtaggccagaaagttgttcccccattgccagaggggtgcgaataagttagaggcgatacgcccgtaagcgctgtagggtgcgatcaaggccgcccatgcccctaacccactgatcatggcaaggataaagatcaccatcaccccgtatcttaaccaggacaaggcgggggaataccggaaacgatttttcttccgtttccccgccagccatgaaacgacatcctggaatataccgagagggcagattacagagcagtaaacccgaccgaaaatccaggtcaatgcaatgagcaacagcaccacgccgaggttgagtgccaataccgccggcaggaactgtattttcgccagccacccgaaccatgtatgcaacgtccccgtgaaatcgagaaacagcagggtgacaagcgtaaaacagataagtgcagttgtaagtctgatcgttcgcaacataataaactctttttagatagtctgttattttatgttgcaaacataataaaaggaaatggtttgcaacttacaggaattacggattgatgtaccaatattacggttttgtcaacttctgcaaaaagtctggctgacaaaccttagaacttcaggcaaggccgtccgccaataggtccagctatggccgccgtctcgtactcggaattcatgcctgatccctttctgcttcatgacctggtgcacctgcatgtttccgtccagcaggccgtcgtcatcaccgcaatcaatgtaataacgaattttgggcaagttgttttgattccagtcggaaaggatcttcaagacattgttttgcttccagtgttcgtctcccggcccgaacaggcggttgaataaatccttgtgcgatttgttttttcttgcctccatgactgtgtcgtcgaaaacggcggcactcaacggagcacatgcgcagaacatgtccggatgatgcaagctgtacaggaatgatccgtagccacccatcgacaatccggcaattgcccggctttctttgtcactgcgaatccggtatgttttttccatataggggataagttcttcaaaaaacatgtcttcataaggtacttttccatcatactggttgatataccaagtgtcccatgcgtccggcatgacgattatcatcggcacggcttcctcgtttgcgatggcacggtcggcaatcgttttcatttgtcccatctgtatccagttggtttcattgtccgtataaccatgcaagaggtagaggaccgggtaattccttttcgaggtgttgtagtcggaaggcaggtagatggagtaggaaactttcctacctaatttgttactttcgaaagagagcgattcgaaaactgtactttgcgaatatcctgcaacgttgaatagaaagcacaggatacaatagagataaaatttgtttttcatatactattaataattagatttgtttgtctggacagagtaagaataagagaagagagcttgccggaaaacccattaggtttcgacatactctctttcccttattgggaaattaatccgccaccggatagggaaattcggtcaaccctttgtacatgaattgataggtcggaacttcgattcccaattcttgggcagttcgtacgacatagcctgtcaatgtttccacttcggtgcgattgcctttttgaaaatcactgtgcatggaggttgtggagttgttaggcatgatcttctgggcgtcgatggcggagaatacttgaccgtccggcagacgaatccctttggcttctgccacgcttttgagttcataacctaatgtgatgaacagatcgatatggttatttaccacttcgccaatcgtttcattgaaataggaggtgatagtggcggcggtcgagatcatgaagaatttcttccagatttccaagtcaatgtcatccggtattgtggtaaggatacgggcgttggccaatatatcctgtaagtctttctgtcgtttcttgtttccttgtttacttccgaagaacatccggtcctttatggtgaacttttccactcttcccggtctgaccaagcgggaaccgatgtaaacgcatcctttccaaacctcattgttcggtaatagcttttgtatgcgttccgctatatccgctccgttcagcaggggaatgataaccgtattagggccgatgatcggagtcagctgaactatattctcctccaagtcgtagcttttggtacagcaaaacaggtaatcgactggtcctatttcagcaggattgtcggttgcgagggttggttttgctttgatcgtcaggaatgtatttttgacttcgatgccgttcttacgtatctcttccaggttttcaccccgggaaatgaaatagatgtcaatatcttcagagtctttgtaacgggcagctaatagtcctccgtagtagccgcctacagctcctataccggaaatcgctattttagttttattcat

SEQ ID NO: 584 - DNA, 10194 bp, unidentified
  source 1..10194: mol_type = unassigned DNA
ggtgatggaggcgcccatatccacacaagagttaatggcgttgaatggggcattggctcccagcgtgtagcaaccaatgtcgctgaacaccttataagtgggatattcttctttcaatacttgggtcagcaccgtgtacatgtcgcgatggccgcaaccctcgcacaaagcgggcgggcgcatctctaccagagaaggaacgctgaattcagccttgttctccttgcctacggcacgtgccacgctgtccgggttcagctctccgtcttgtgaaagagtgccgtccaaacggccttttactttgatgccgatgcccagatagcctttcagttgtttttctacgaacggttgtccgtcttccagtaccagaatctcgtcacatgcttctaccagctgcatcagctgtttcttgggcaacgggtattgtccgattttcagtaccggatattcgcaaccttcgggatagttttccattaggtagttgtagccgatgccgcatgccacgatacccagctttttgttggggccgtcggtatatttgttgtaagcggagttttcagaagctttgataaattcgtcctggcgttgcagcaatgctttgtagcgtttgcgtgcattacccggcaggaggatgaactgacgcgggtcttcgctgaaggaaatctcattctgcggttgttgctccttgcgctctacgccggaacgggagtgtgccaggcgcgtaaccatgcgcatcaggatgggttcgccggtctgttcggagaagttgaatccgttgtacaccatgtcgtatgcttcctgctggttgcttggttcgtacatcgggatgagggagaagtcgccatagaaacggctgtcctgctcgttctgagaggaatgcatgctggggtcgtcggcagcaatgattataagaccaccttttacgccggtaatggcagagttgatgaaacagtcggcagccacgttcatacccacgtgcttcatgcacaccagtgaacgcttgcctgcaaaggacatgcccagggcagcttccattgcagttttctcgttggagcaccagcggttatggatgttcttttcggcagtaatcggtgccatctgaatatattcggtgatttccgtagaaggagtgccgggataggcatatacacccgaaagtccggcgtctaatgcagcttgtgcaatggcttcatcgccaagtaagagttgcttgctcatatctgaatatttaagtgttagtcatggattaatatttgacgcaaatataggattttgcttttattttatcagcagattacttgaaaatctttctttcgtttaatgcattccaatattttcttgcatttttcatgtgctcggcataattggatgcaaagttatgggtgcccgagaagtcctctttggcacacatgtagaggtagttgtgtttcgtatggttcagcacagcatccagcccgatgggtgaggggatgcgtatgggaccgggaggtagtccggtgttgagataggtattgtagggggattctactgccagatgggcattcgtaattctccgcaagccgaagtcctgcaaggcaaatttgatggtagggtcggcttgcagaggcatgccggtgtgcaggcggttgatgtagagccctgccaccattggtttttcgggattgttgtttgtctcttcctcgacgatggcggcgagggtgcagacttccgtcggggtcattccgatggcggtggctttgtctaagcgttcctggttccagaacttctggtgctctttttgcattctttcgaagaactcttctgcactcatgtcccaatagacttggtaggtttcggggatgaagaggcagggcagggtctctttgttgtatcccagtttttgttggaatgcggagtcgttcatcaatccggctatttcggcggagtctatcatgagctgtttgcctacgctgcgtgccagccggtccagtgtgcgtacgctgccgacggtgaggttcgtaggttcttgatatccgcggtacagacggctgaatacgtgatatacgttttcccccggccggatggcgtagcgtccggtgtgtatattttcggaatatttcttgtattgggccatccagcggaagccggtgaagcttcgaggatggccttgttgttccaccttattatatatggagtcggcggtgtcgtcgcggtctatatagatatagactgtctttttcggatggaattgcggggcaaacagatagtagtatactgttcctgcacaagctgctccaataagaatcagtgcgacgaatgttccgataatgattttcttcttttccattttgttttactgcatctttagtcgggcaaagttagtaaaaaatggagtgaaaaccatcaagtcatatcagttaattcgatagctgacgaaggctatgcgtttgctgtccggtgcccatgagttgacattgatggtgccttgtccaccgaaaagctttaacaatgtcttgggttctccaccgtttgcgggcattaggcgcagctctacgttcttgtttgccaggtgctctcccggttccaggtcacctttgtagtaggtgatgaatacaacggattttccgtcaggggagatgtgggggaaccaggagttacgggtttcgtcaaaggtcatctgggtctgttcggagccgtctgccttcatgcgccagacttgcatgagtccggtgcgtacggaattgaaccagatgtattgtccgcagggggaatattccggtccgtcatccagaccttcggcagtggtcaggcgggtttcttcacctccttccgccgggatggtatagacgtcatagttgccgtttcgttcggcgcaataggcaagctctttgccgtcggggctccagccgtggaggtagctgggagccataggtgttattaaacggggagtgccgcccgtgatgggaagtgtataaatgcgcgatttatagtcttctttcgtcccgtggctgatggctatctgctgtccgtcggtcgagaggacgtggtcgttgttgcagttttgggcaaatccggtgtttatcagttccggttcggcaggcgaggtgggggaaaggcggtaaagctttccgtcgttgttgtatagcagccattgcccgtcgggcgtccaattgggagcttcaatccggtagggaaattcttttacgacagtccggttaccgttggttacatccagtatttcgaggacgctggtaatctcgtttttttgttgagcggttgcggtcagtgcaacagttgcaaagaaggggattagatagggtttcatgttcatatcgtatttaataaatctccgcaagatacattttttattggaaactacatagtcggagcatgcttttttcagagagaatctgtagtgatggtcgaatgcgtagtgcttatcatatgaatagtctccgggattcttgaaatagttgtccacatactgccagttgtcggtgtcgagcggcgtgtgcgaagtcatgtacgatagggagcttttatctctactatctcgctgtccagactaatcaggtctttgcccaagcggacaatgcgggcatcttcgggcatgtagtcggtgccgacttccccctttccgcctccaccgaatgacaaccatcctgtaccttcgtcatctatcacggcacccgggtcgaaaggagccctgcagtggcctaatccttgggtgaactggctcaccagcatacgtcttaccgtccgattccacccgcgatacgatggatggcgcccatgaggctataccccatggcgagagggcctttacgtcaatcagtccgtgataagtccaatttaccatgtcatcggtggacagcatgaccagtgaatgggatgtattggtatgtgtttttgccgtattttcccacactgtccagttgctgggtgtcattggttccatacacatagagccttccgttgtattccaccgatgtcgggtcggccacaaaaatgaaatccaacagcgggttggcgtttccactgaagaattggggtgattctaccggacgcgtgtctttctttcttgaatcggaaagcgcccacacatcatttcctgcggatatagctgccagcagcaaagccgctgtaaataacttgattctttccatttttttatagtatgttatagaaacctatggtagccttttgattttggcttgtgttcttcaatcacctcaatcctttatttaagattgaaaaatcgggttattgaaaagttgccgcaaatattgggaattactatgtataatataaggtgtattatgtttttaataatgtgcctatatgtttcaagttatcattgtaatcagatggtgctgttttaaactagctttacttgctttgggataattatgcggctatggattaaactgtttggaagggcattgtgttttatgcaaatatattcgtagaagagcgttttttattctaacaattcttgaaaagaaaaagcactgattattccagataatcagtgcttgaatatcgagccgctagccagacttgaactggcgacctacgcgttacgaatgcgttgctctaccaactgagctatagcggcaataagcttttgtttacggggtgcaaaggtacatctttatttgaaaaggcaaaaagaatctctgttttttttagaaatattttagtgggataattttctatttgaatgtcctgaactttattgccataaaaattggataataaaacgaaaagaagcatctttgtcgtaggtcctatagcaaataagtctgatactgattatgaatttaagaatctattataaatatctttcttcacgcatagcgtccaaatggacggtgttgttggtagatgtaattatcgttgtgatttccatgctttctgcatgttttttgcaatataggctttcgtccgtatcttatgaaatttctttgtatgtatggctgaccattttggctgtcttgtgtaatgtctgtttctttcatattctccgtacttatgtgggtgttatccgtttttcctcttttgtggatatttatcgtgtgctttggagtcttacgataagctatgctgtactgtttttagggaattactgttggtctgtttcggggcttggagaaactttgccgaacagcattctgtttatggcatatatgttcaccttctctctgatggcttgtatgcgcattgctgtgaagatgctttatgaagctattgcttttgatgcacgtcattgcgtgaatgtttttatttatggattccatgggactggagtcaatgttgcaaaatccttgagagttagtcgtaataatcattatcgcctgcgtggctttatttcggacgaacctgatatgataggtaaacatacgatgggatgcagggtatatcccaatgatgagcagctgtttgaccgtctaaagaaaaagaaagtggatacaatcattatctctccaagcaaggtgtcggatttggaaaattccggaatgctggataaactgttctctcatgatattcatgtaatgaccgttcctcccttaagcgattgtatggacgatggactgataaaggacattcaaatagaagattggctccgtagagaaccggtacaagttgacgtgcgtaaaattacggcccatatcgaggggcgtagagtaatggttacgggagcggcgggagctgtaggaagggaaatcgtccgccagttggctacactgaatccttatcagttgattctggtagatcaggcagaatccccattgtatgatgtacagttggaattgtctgatcattggaagaatctggaggtccgtgtattggttgcagatgttgctaaccgtacgcgtttggaggctatatttgaagaaacacgtcctcaacttgtttttcattctgctgcttataagcatgtacaactgatggatgattttgtgtcggaggcaattcaaacgaatatatcggggacagtgaatattgcagacctggcggtaaagtatagagtgtcccgtatggttatgatatctgctgctaatgcacgtcatccggaaaatgctatggaatatagtaagcgtgtggcggaaatatatgtgcagtcatctgattgcaggttgaaacgcgacaaaggggaaactgatatgttcatagtacgtttgggtgaggtgtatccgacgaatactcattgtttgattaccatgtctgaagcttgtatgctcaccctggaagtgggagtcatgggggatgggggagaagtgtacattgtgggagggcctggggatggacttttggattctgtaatcagtgaaaagataaagcgtgaaaagccatctgttgatgattatgaacatgtgcgggaagaagtgctggccttggtgcaatatagttatactgaaaaaaaggctattttgattggactaatgaaaaaaatagtgccaattttcccgctttcttctacccaatgaaaagacgtgaaagtgacagctttttaatgctttttctgaaacttagaggtggaataaatgtatattataaaaataatatattacctttgtgcccgatttatatttattacaagaactcaaaagattaatcagaatatcttatgcgtagattaataacactattctttttggtatttactttgtcaggggtagcttttgctcagcagatgtcagatgatcaggttgttcagtatgtaaaaagcgctcagcagatgggcaaaaatcaaaagcagattactactgaattaatgcggcggggagtgacaaaggaacaagttgaaagaattcagaaaaagtatgaaaactctaaatctggaagtccgcagagcaatacccaagatgagaagcgttctcgtcaacgtggtgaaatgagtggcgtagtcaaagggctgcgtacaacttcggaaacttattctgccagacaaacggatgttgcaggggattctttacaaatgatggataatcgttccttgtctcaagagaaggaaacagaggatccgacttcgcaaatttatggtcataatatttttactaacgataatttgactttcgaacccaatgtgaatgttgctactcccgagaattatcgtctggggcctggtgacgaggtgattattgatgtgtggggagcttctgaaacaacgattcgacaaacaatctctccggaaggaagtattcttgtgaataatttaggaccggtttatctgagtggcaaaactgtaaaggaagccaataattatttgaaacaagaatttgccagaatatattccggagtaaccggaaatgttccgtctacccaagttaaactgacattaggagaaatacgttctattcaagtaaacgttatgggtgaagttgtggtgcccggaacttataccctctcatcatttgcttccgtatttcatgctttatatcgtgcaggtggtgtgaacccgattggtagtttgcgcagtattaaagtgattcgcaatggaaatacaatagcggatttggatgtttacgatttacttatgaaaggaaaaatgaaggatgacatccgtctgcaggatggtgatgtaattcttgtggatccttaccagtcactggtacagatattaggtaaggtaaaacgtccgatgttttatgaaatgaaacccactgaaaccgtaggtacattattgaagtattcaggtggttttacgggtgatgcttataagaaagcattacgtataatccgtaaaagtggacgtgagcatcaaatttataatgtggatgagatggattattccgtattccgcgtagatgacggtgataagataacggttgattccgttttacagcgttttgagaatcgtgtggaaatccgcggtgctgtatatcgtgaaggtttgtatcagttggacggtacgatgaatacagtgaagcagctgattaagaaagcggaaggacttcgcggagatgcattcttaaaccgtgctataatcgatcgtgaacttgaagacttgtcgcatgaggttatacaagtagatgtgaaaggtttgctgaacgggacggctgcagatattcctttgcagaagaatgacattttatatattccaagtattcatgacttgaaggaagaagctacacttaccattcatggtgaagttgccaatccgggtacatatctctattctgataaaatgacagtagaggatttggtgttgcaggctggtggcttgttggaggcggcggctacaacaaaggttgaagttgcacggcgcatgaaagatccgaagagtacatctttcagtactacagtaggccagaatttctcttttgatttgaaagatggcttattggtgggagaaggaagccaggatttccatcttgaaccttttgatgaagtttatattcgtaagagtccgtcttattttaaacaacagaatgttatggtgggaggagaagttctttttagcggtaattatgcactatcgaaaaaaaatgaacgtttgagtgacttgatagctaaggctggtggagtgactcccgatgcttatataaaaggagcgcgtcttatacgtaggatgaccgaagaagaattccgccgtaaggaagatgctctgcgtatggcgcaagcgggaggcggagattccatatctgtaaaaagattggatttgtccgatacctattctgtaggtataaatctgggagaggccttgaaaaatcctggttcagatgctgatatggtgcttcgcgagggagatgtattatttgttccggagtacgtaagtacagtgaaaatcaacggtgctgtaatgtatccgaatacagttttatataaaaagggtgaaagcttgaaatattacatcaatcaagctggtggttttggtaatgatgccaagaaacgtaaggtctatgtaatatacatgaatggtacagtttctcgtttaaaagcagggaacaagaaagccattgaacctggttgtgaaataattgttccaagtaaagaacagaaaaagaagatgactactgctgaaattctgggaatgggaagtacgacagcttctattgcagcgatgattgcgactatggttaatctctttaagtaatttgaattatgagcgaagaaagaatacaaaacataacctctccacaacctgaggaacaagaaatagatttgatagaactggcccagaaagtatgggctagtcgcaaattggtttttaaggcgtgtggtatcgctgctcttgtaggactggttgttgcatttagtattcctaaggagtactctacaagtgtgacattggctccggagagtggtggcaaatctggtggtggaagtatgggagcccttgcagccatggcgggtatcaatttgggcacttcttctggtgaggatgctttgtcacccgaactttatcctgatattgtaagttctactccttttctgattgaactgttcgatgttaaagtcaaggatcagaaagcaaaagtagacacgactttatatgcttatttgaaagaagaacagcgttctccttggtggagtgcaattttctccgctccttttaaggtgttaggatggacattgtctttgtttaaggatgaaccggaagagggggacgcaaagctggatccttttcgtcttactagagatgagtctgccattgcagatgctttaagtaaacgtatctctgtttccgtagacaaaaagacaggtgtgacaaccttgtctgttactatgcaggatcctttgatatctgcttcgctgacggataccgtgatgcattgcctgcagaactacatcacagattatcggactaataaggctcgtcatgatttggcatttaccgaaaaactttatggagaagcaaaggccagttatgaggatgcccagaagaaatacgcaaattttgtagatgcaaaccagaatataatattactgagttatcgcgcagagcaagagcgtttacagaatgaaatgaatttagcctatcaagtatatacacaagtgtctcaacaattgcagatggcaagagctaaggtgcaggagattacaccggtatatacggttgtccagccggctacggtacctttgaagcctgcaaagcccaataaattgatgattttgatcggcttcatgttcttggcaggtgtcggcagtgtgggatggatattatttgtaaaagatttattaaagggatggaaaaagcaaacaatatga

SEQ ID NO: 585 - DNA, 21490 bp, unidentified
  source 1..21490: mol_type = unassigned DNA
ttacagggattcaagttgttcccttgtgacggtgtagaaacgaccgactctttttatcggctcatatcggcactcccgattgtaattgaattggtaagtggtatatgtaagcccgttagaggcaggagtaagtttccaacattcctgcaatacctttctgacttggtgcttctccacctttacctgcgaatgtaccagcaaaagaagaatgtcgttgtggcagaacgagaatgtgtccgtgccgacactttccataatgtcaaggataagttcgcacatctctatctccaatcggttgcggttgctgcggataatcttctgcaaggcttcggtatgcagcaaagagggcgcaaaccacatacggctttccttttcggtggaaagttgtctgtattgcaggtaatacagaaaggcaggtatctcagctttcagcttttgcaggaagtctgtgtcatcggattgcagacggtctatcttgcgcacccaatagcgtgtttcacctgcatcaatgataacaggcagatactcgttgttggagcatagcacgaacttggcaaagaacgctatctcgtcacggtctttgcctttggcttccaccttgtaggaaagtgtggtgctgaggttcttcaaccgctcgctgtcctccctgcggttgagcaatacctcgtccaccacgatgagcagttttcctgcccagtcggaattgaactggctgcggaagtcctcgttggtattgaaagtgacattgttttgaaacacagctttcaggaagttcaggaatgtactcttgcccgtgttgcgttcttctgataccaacagcaggataggcagtttctgcacgggttgcaggtagagcaattgaagatagtccatgcccaattcatactgttcaccgaagatatggcgcaccaatgaccggatacagggaaactcgccttgttgcggacggtgtcctatcggctcgtagaggttcaggaacttgtccaccacgggacggtagtccacatggtcggggacggtgcagaagccgtcgtacttcggcacggtggcgagatagtccttgccgtagtcctgccgcagtgtttcgttgttccacacgatgcgcttcttcacatagcctccgttcagacggggctggttcactaacttgtagagggtagtacccacacggataaactcctcattttcaaagttgccttgtttcattagcacttcatttttttgtttaatcagtgcaaaactcggcaattagcgcagaacggattaacaactcacgcatacctcacgtaagattttcttggatttggctttatgacatacaacaaaagcccgaagaaatgccattctaatggatttttcttcgggtttgtcgtaatcgtacgtatgaatggcaatacacctattcacatactcgtataaatacattgttggcaatgggaatacgcataggtctcactacttcatgtcgtcatatcattagaacttatgcctgataattagacatatcccaaccatttatacccagcgaaaagaagatatttgttttctcttttcgcaagtacagccttttaaatatggcattgcgcacctgttccgcaccgaagctgtcaatgcggaaagcaagtgcgactatcatcggaaagctgaacacatcggcatgatacccgttctcctgccgaacatacttctgtacctcgtattcttttaatgctccactgttatagatgtttctgatggcagaacgaagtgtcggagcaattactccgaacagttccaccaattccggctcgctcatccaaatgtttgagacattctccggcatgatgatattgccggattcattcactgttatgctgtttcttctcatactcatgacatcgttattccgttaaacgtcttactcagtttgtcgccgaacatggtcaggtcgttgtcgagcttctgcgtggttatctttgcgtagagttgggtcgtgactatattcgtatgtcccaacacacggcttacgctttcaatgggcatccccttgctcaaagctaatgttgcgaagccatgacgactgcaatgaaatgatattgacttggttatgccacattcccttatcatccgtttcaacggtttgcagatagaccaatagttcaagccggggaatatacgattgtctttctgcatcggtcggtagcgttcgactatctgcaagggtatatccagcagcttcacttggaaggcgacttttgtcttgtggcgtttggacaatatccacttctcgccgttcacctccacgatgttgtcattcgtcagttcctgaatgtccacgaatgacaaggcggtgaaactggcaaagatgaaaatgtcacggatgtatgcgagcttgctgtctgcaaactcatgtgtcatgaccgctttcagttcatcctccgtcagatattcccgttctttcacattggggctgatatgaaactggatgaaaggattgcgcggtatcaacccgttataatgcgctttcatgaccacgcctttcagccacatacagtttgcccatatcgaaccgttccgcaatccggcttcagtcgagaggtatgcggcgaactccttgatgaaatcgggagtaagttccaacatggacatatcgctgcgtctgtaaaacgacttgataaaggcggctacatggtttcttgcccgtacacgtgcccgataggtagccattaccctgtctttgcctacccgtttcttgaacacttcgttctcacggtcgaatgcttttagcagcgtctcatactcgctgccgattccctgataggcgttgcgcaccatctcagccgtaacaaatgcctcgcggtctgaaatgcgctggtaatgtttgatgatttgcgccttgatgttgtcaagggcaaggttgatgtctcgtgcctcgcggctcttgcctttcgccttgtttcctttcacgtcccaaagcgttttcgggatgttctgcttacaactgaactgcgccacagtcccgttgattgtcactcgtcccatgatggggacaataccgtttttctccttgctgccgttcacgtagaacagaaccttgaatgtgcttcttgccatactcgttttttgtttgcaaagttattactcaacgagttagaccttgatatgccaacctgtgccacaagctgccaaatacaacacggtgtgttaaaaatcaccattcggcgggtaatgatttggagaccgttcttcttcataaatccgctttcctttacgttacctcgatttttcgcctgtcctcatttgtcttcgcaaacgccttattgacaggcattacgaagacatttgtccctttttattcgtcttttccagagatttattgtaaatttgtgcgcttaataagagaacacagatttatcaaacttatctaagtaagcaaaatgaaaagagacgatttaattttcgatatcatcgaaaaagaacatcaacgtcagctcaaaggtattgaactgattgcatcagagaattttgtaagtgaccaagtaatggaggcaatgggctcctgtctcactaacaagtatgcagaaggttatcccggtaaacgttactacggaggttgcgaagtagtagaccagagcgaacaaattgctatcgaccgcataaaggaaatctttggtgcagaatgggctaacgtgcaaccccactcaggcgcacaagctaatgcagctgtattcctcgctgtattgaatccgggtgacaaattcatgggattgaatctggctcacggcggtcacctctcacacggttctttagtaaatacttccggtatcatctatactccttgtgaatataatctgaataaagaaaccggtcgcgtagactatgaccagatggaagaagttgctttgcgcgaaaaaccaaagatgattatcggtggtggttcagcatattcccgcgaatgggactacaagcgtatgcgcgaaatcgcagacaaagtaggtgctatcctgatgatcgatatggctcaccctgccggactgattgcagccggattgctggaaaaccctgtgaagtatgctcatatcgttacttctaccacacataagactttgcgtggtcctcgcggaggtatcatcctgattggcaaagatttccctaatccttggggcaaaacgacaccgaagggtgaaatcaagatgatgtctcagttgatcgactcagctgtattcccgggtatccaaggtggtccgttggaacacgtcattgcatcaaaagctgttgcattcggtgaaatcctgcaacccgaattcaaagaatatgctgcccaagtgaagaaaaatgcggccgtactggcacaagcattaatcgaccgtggctttacaatcgtttccggtggtacggataatcactctatgctggtcgacctgcgtagcaaatatcctgatctcacaggtaaagtggctgaaaaggcattggtatctgccgatatcactgtaaacaagaatatggttccgttcgatagccgttctgcattccagacttccggtatccgtttgggtactcctgccatcactactcgtggcgccaaagaagatctgatgctggaaattgcagaaatgattgaaacggttctgtccaatgtagaaaacgaagcggttattgccgaagttcgcgcacgcgtaaataagacaatggaaaaatatccgctgttcgcatattaagaaatttgtttttacgagtcagccggttttgttttttccggccgacaggtatatacatttttgagaaaaaatgtatgtatataaatgattaaatatatagttaaattgtaaaatggtccgtagcctttgtgataaaggctacggacctcttttttttacgcattgacactatttttgttgtattgaaaggatactcctgcttgcatttccctatttttggaaactacatttattattcactttaaaactttaattactatgtcagaaaacattggagtagctacaggtaagattatgctgaaaattgttatcgctctttttaaaggtgtatggaatgtactgaccttcgggtttaaagcttacaaaggtcaccgggacaaaaaagacgccgaaatgcgtgaacagttaagacaggtacaagcaaacaacaattcccaaactatttaattctgcaatactatgagctcagcaaacaagaaacacatgcagggtggtatgaacaccacatacagcaatgtaaatactgaagacgaaagaaacaaaaaagcggaagaactattgttccaggcatgggaaacagccggatatcatggacagccggatgaagattattatcctcgaacagcccaggaaacaagggatatggaagatctgctgacacaagcggaagcagccattgatgacccgtcggataccgaactaatggaggtaatggctgacacacgcgaagtgctggaatggtccaaacagcggcattggacattcgcatggtggatcatcatctgtgtagccattatgggatgttattatttctatcaggccggaagcgaacaggattatgtagcaaagagacaggcgctgactgatgagcaagtgcagactgaacttagcgaagccatcacccggcaacaaagttacattgatacttatagccaaaagttggcagtagataccatttctgaagaaacacgtagcctttatgaaaaatatatggaaaatgccactgaagaaataaaagaactgaaagcatataatgtggaaacttataaaaagcacctggtagatcgtgccgatgccggagtatggcgtgaaagatgggaagcgatctggtgttttatctggatcgtgctttatattttcgcctgccgtccacgtggatatatgattactaaacgtcgccgtgaagacaaaatggctaccggtctcaaaaagatattattcggcattgcaggagctttagtgggtgctgccggcgctttatatgtgaccaccaccataactaaatggagcgatggaagtaaaacccgtgatgatgatagcatgattatctatgccatgaagttcggtcttattgcactggctgttatcatcgttctttgggcagcacgtattgttatcgttattgctacacttctgggactattgagaaactacgactggaaacagttggccaaagacccgaaagccatgttgaatgatttgaaataaatggaaaggggatgcaagtatataccggcatcccctatttctatatttatttccgatggttagctcaatccttctatatttccatctacaatgtcgatgtgcatagcttgtggctctttgggaagccccggcatgcgcagaatttctccggcgatggcaacaatcatttccgcaccgttattgattacaatatccttgatatgaaattcaaagttgttcaccgcaccgtatattttcggatcggcagagaaagaatattgtgttttggcaatgcaaacgggataatgaccaatgcccatcttctctatcaatttgatgattttacgtgaatggatactgtaagtcaccacactggcaccgtaaagattgcaagctatcttctctatcttttgttctacactgtcattttcactataactgaagttcaagggttcagaaggtttcttctcaatagtatccactaccagattagcgagctccacagccccctctcctccttctgcaaaggcattattgacagcgaaccctacacctaacttctcttcgcaatgccggcggattgcttctacctcctcgtccgtatcactggcaaaacgattgaaggcaaccagtaccgtctgaccgaatgaacgtagattgcgtatatgtttatcgagattaccgaagccttgttgcaatccttccatattgggttctttaatacgatccagactgacacctccatgcatcttcaagccttgtgcagtagccacaatcactgtcagtttaggttgcaatccacttttgcgacatttgatattataaaatttctccgcaccaagatcggcaccgaaaccagcttccgttacaacataatctccaaaagtcattgccattttcgttgcaagaatagagttacaaccatgcgcaatatttgcgaagggaccgccatgaacaaaagctgccgatccttcggttgtctgaaccaagttcggattgatagcatctttcagcaagacagtgatggctcctgctactcctaactccttcactgtgaacgggcaaccatcaaaacggaaaccaaggatgatattctcgatccgtcgtttcaggtcgtctatgtcctttgccagacagagaatagccataatttcggatgcaggggtaatatcgaagccggattcttcggtaataccgttcgtactggggcctaaaccggtgacaatgctacgcaaagagcggtcgttcacatcgagcacgcgctgccagatgatttctttcagcccgaatccgtccgcctgatgctgataaagataattgtcgagcaatgcggatatcatattgtgcgccgaagtgatggcatgaaaatctcctgtaaagtgcagatttatcttttccataggaagcacttgggcataaccgccacctgccgctccacccttcatgccgaaacaaggtcctaacgaaggttcacgcaaagcaacgatggctttcttgccgatcttattcaaccccaatgccagaccgatggaaaccgtagtcttaccaatacctgctttggtagcagtaatggcagttaccaaaatcaggttacttttcttcactttttcttcatcaatcagatgtgtagggatcttagcaatataccgtccgtagttttctacttcttcacgtggaatacctacattctcggctacctgcttaatcttcttcagctctatgctgcgggctatttcaatgtctgatttcatacagagaacttctttaaataaaactttctttttgaaagctacaaaagtacgaaaaagagtgcagatagcaagattttagggaaagaaagcctctgttatcttattcaagtgtcaaagcgataccttctacacgatccgggtttgaaccttccggctcaaccatatcgaaagaacgtgttccggcaggcagtggagcgaaataaagagtataatcggcctctccactttccggcatatagaatttctcccctaaaggaataccttccgaacgaagaaccggacatacagttccattgtccgctactaactggatattcttcataatttgtatccaatatttgggtatataataggcacgaatccgcaagaccgtagcagtatccgtcaatactacctggcggatttcaggaatatcgttattgcttttcttcaccgtcgggaaattcaccactttatgtccattctcttcccctaagctcatcacatattcgtctgcattcagcaggcggcggagttttcgtttcaggctctgtttcccgtatccgaaccatttttccacaatgcgcccttcaggtgaaataaggacataatttggaattccacgtactccgtatttggcatataatccattgcttcctttcaagtcacttagattctgccaagtcatttcatgcgttttagaggcagtttcccaacctttcttggtatcgatgctcagacttactatcgtcaagcgatctttgtacatctcagccacttccttcatttcgggtagagccataaggcacggaccgcaaccacgactccagaaatccaacatgatatatttacctttaaaatcagccaggcggtgtacatttccttccaggtcgtacaaatcagcatctgccatttcatcacccacttctactacttggggaggaaatagatatgtatatgtgttcattgcccaattggtctgtttttctccatcagtcagtccttcataaagagcaatcacttcttctttataaggataattttcagtatactttgctgacattgccaacttctccaactgctccagccaaatatcgtcaacaggaatctgcttcatacgttttatagtgttggcatcaatacggatactaatttcatcctctaccttccgcaaactgtcaacttgtgcacgtatcatctgtctttcttcgtccaccgcactccccgcatacttccggcgatatgcacgctgcaacaaagaattgcgctgatattcattccacaattcgcgtgagtcgtttataaaagcctgattagccacttgttccggaacagtgcttttcacatcccaagttcgtatcaatgtattttcaccgcttatccgtatattatctcccggacgcacccaaagccttaaactcatggaaggaaacttgtcacttcttcccatcatatccactatttctgtttcgttccccaatgtttctgcctgaaaacgaaaatgtccgttacgaatcgtatcaacaccgatactgctacccacatttccatctaaacgaaacaaagtgattaaagctccgtcttctacattctttacttgcccttctattgtaaaagtcccttgagcttgtgccgcccaaacacttgtcattaagaacagcgttgcaatctcttttttcatatacgtgctgtttggttataaaattatatatctacgcacaaaactatatgatttctccgagatcagcaaataaaattacgattatttcgtaataacctgttttctttaatattaagcatctcttaccggatatttttactttatccgtccatcactcccactatttcgctgacagatatacacctctctcttcccaacattccgttgcgcttgattgcagataaagagcaagtagaacaagtacttatcaacctgatacggaatgcccgcgaaatcatgcaccagcatcatggcaacattacagtacaatcaaaagtgggagaaggaagcacgtatatacttctgttcccgatagtttaataagtgattaggggttagtgataagtgattaatgctgcgctataatgcagcaaggagacttatcactaacccctaatcacttattacaacgcttttttgtataaatccagaataatctccttcgtcacctcgcgaggattacccggtgtacaaacatcggcaatagcagccgtagccagcttatcgagatcgctttccttgatacccaattcagaaaggtgttgcggaatacctactcttactgacagtgctctcaccgcatccacggcagcacgtgcagcctcttcctggctcattccttctttatatactgtcatcgccttagcaatttccacatacttatcaagcgcagcaggagcattgaattccataatgataggcagcaacaacgcattagccacaccatgaggtatatcgaaaatagcacccaacggatgtgccatgccatgaacaacgcccaaacctacattagagaaagccatacctgcaatatattgtgctaccgccataccattacgcgcttctgcatttgtcggctcaaacacagccgtttccagataacgggtaatcatctcgatagctttaatttcaaacatatcgctcatttcccaagctcccttagtaatcaggccttcaatagcatgtgtcaatgcatccagtcccgtagaagcagtcagccctttaggcaaagtgtacatcagttcggcatctacaatggcgatggcaggaatatcattcggatctacacataccatcttcttttcattcacttcgtcggtaatcacgtagttgatagtcacttcggcagccgttcccgctgtagtaggcagagcaatgataggcacggatttcttctgagtcggcgccactccttccagagaaaccacatcactgaattccgggttattagtgataatgccgatagcttttgatgtatcgatggaagaaccaccaccaatagccagaataaaatcggcaccggattctgcaaacgctttcacacctgcatttacattactaacggtaggatttggtttaatatcgctgaatacaacatagggtatgcccaccttatccagtacggaaagcaccttgtcggctacaccaaatttaatcagatctttgtcggtagatacaaaggcttttttcaagccgagacgtttaatttcctgtgggagcacttcgcgggcacccggtccgaagtaggatacttcgttcaagacgaatctgttaatcataatacgataatttaggttccgcagtgtcattttgagattgagtgtgcggaaggttgatacttcattttgtttccgacaaaattaagaaatatagaggaggaagggacaaaagattctgatttttttaatgtgtattatgctggtgggggtacttttcttttgtcttgagacaaaagaaaagataccaaaagaaaaactcaaggctgcacttccggggctactccggtagcatttccagctaaagggcaggaactcgcttcgctcaaacagcctgcccttctttacgctgaaaatactacctacgcttgacgcccctacagtgaggccgggggaccatgcggcatatggcgagagagaattgattgttttttctgatggggttgaggtaaatacggatttttgaaacgctatccaataaaatgataatagaatggttatatttgcatcttgattataagaaacagattacaaaccattaatcagtaaacaatgagattcagcaacgtaagattattagtaaaagacttcgccaaatgcttcaagttctacaccgaacaactcggtttagaaccagcttggggagatgaaaatagcggatacgccagttttaaagtagccgacggaatagaaggcttcgccctctttgtatccgactggatggcaccttcagtaggcaatgcagataagcagcagcccgttgcaatgcgtgaaaaattaatggtttcattcagtgtagataatgtagacgaaacctttaccgccctaaaagcaaaaggcgtaacgtttatcagcgaacctacagatatgcccgattggggaatgcgtaccctgtacctgcgtgatcccgaagaaaatcttatagaactctttacccctcttgctgtagaacaatttagccaagaactcctcgaagaagataaaaaattttagcgcagcgcccctaccgcgcagctctccggcataggtgtaggtgcgtaagcgtaggcactgtcaggcgcaggtaaggggcgatctgtctgagcgaagcgagttcgagccccgtctgcgaatgacagtgtcggagtagcaccggagacgtagccggggtccctttctttttggtatctttttctttcgggacaagccgaaagaaaaagtacacacgcgttacttaaacctcgacgtatccacctcctccctcttcttctccctgtatcctccgaacttatacgtaaacgacaccccgatttccctgaaacaagcataatcattcgtcacgttctgcgtaccaaagcggatacgtggttttatctgtcccgtctcaaagatgtcattgcaataaagattcagaatagcctttcctttggcaaagccataccgcaaagcagcatttacataccctgaagacggcaaatcataaattccctgagtcgctttactacgagccattcctgtcaatgtcagcttcagatcaggctttttagagagagtgaaagtatttgtcagtacggcaataccataacaaatattccggttaaaaggaatatcccagaaatcatcatccttctcatgatgccacacaccaatcaaagttaaacgagagtttaaccattgctttatatcaaatggtatagaagcttgtactcctgcttgttgctggtaattaaaattcaaatgcttatagatttccaccagacgttcggaagattgataaagagtctgggtagaataatctttcgtatgggcaaaccatgcgctaaagatgtatttactcttcaaaatatgtgtcaactgaagttgatattcctgagccggtttcaggaacgggttcccatgtatttcagaatatccaccgcccagataagagatagcgtcctgcaccgcccaataatcaggatagtccttatcactgctcaaagccaattgccaaacatagccgggggcaggcatataactcaggttaatggtaggataccaatcccactgattccatactggcgtcttgtaatgttccacagcaagcgaagcgtccagggaaagtttatcaccgaaacttttattgaaacccgcatagaagttcaaagtttgttcgcgacggcgggattgcatattatcgggaatacctgtgctcacacctgtctttgttcccgcatccttctccgtatcataataatattgataactgtggtcgatactggtcgtataaacggcaccataattcaatccccatccacgacccagattatgctcttgggcaaggaaaaatttccagcgattgatgcgctgacagtcttcggtataaaaggcaagctcttcatcttgcatgctgctatgcaataactgatcggacggagaacggtaataagtcagttcagcaccggctttcaatccgaaaggtgtacggtaatccagacgcccgttgtgcagccaatcggtactgttgctacgggtattggactgctgagtaccgtaaatatccatcagactatgatgagtcgaataacttccattataaacaaagctcagctgatggtccttggcaatattataatccgttcctacccggaaactatgagtatgtgaacggcttcggcccatctcatcggttgtgatgtgatgaaccgaaccgtccgccaaagagtgcatagcttctttatcggttaaagaatatccccgtccgtggttgtgtgagtaaagaaaatctgctgagaatttatttccgttatagatcaggctggcacgttcgttgaagccctcgtaatgtttctgattatatttgccataaagctctccctgccaggaagacgggcctccggtgctttgtttcagtgtgatattgatgagtgcaccccgcacctgatagcgtgccggagcattgtacatcacttccgccttctcaatgcgactggacgggatgcttttcaataaagaataaagctgttcggcactcatggtggtaactttgccatccaatattacagttaccccctgccctgccaacatcaacccgccattcatctcggttacgcccggcaattccttcacagcgtcataagcattatctacgggtagattaccgataagacgcggaagatcgtacaccagtttaccttgctccgctttcacgatgggacgttgtccggtaatcattacttcaggaagagattggtaaagactgtccagctgcttgtcttgtgttataatactgtccgcactgagcgtccgttcgctctctacatccgtactctttgttatttcctgagcggaaactcctgcactcaatgcacatagcatcagggaaagatagtaataagacttcatgttcatttgttttagatacgacataaatgtgttcagacttagagatgattgggtgtcaaccttggttgacaggtcgattaagcttggttgacagatccgttaaccttagttgacaggccagttgaccaaggttgacacccaattatgcaagggactgcacaagattctctctataccttttgcaaaagatgccttgtgcaaaaccgaatcatcccttaagctcttgcactgcaaagtacggtgaaatcttccggactttgtgttatccggaacttacgtagtcttatctagtgttatctgaagtgttatttagtcttaccgtccatacatgtaccggttatctttcctatctttgtccatataaatacaagagctacatgaaactgccattcaaacctattgccatattagtcataatctctctgctgggtatctttatttaccaggcatattggatcacggggctatacaaaacgatgaagcacgagctggaacaaagcatcgtagaagccatgcgcatgagcgattataatgagatgatgcttcgtgtaaaggcaatgcaaaaagaaaataaagcccacggttccgtagaggtttcagcagggtacaattccgattccggaaaatcatttgtccgcagcagtacaactgttaaccaaacagacagtgccggaagtcgttcacttttaaaagaaggtatccccatgaagtatgacagtgtatcagtaagttacccgaatgactcgacaagagatatccttttcacacgaggacaggaaggcacaaatatttcagtctgggcagaaagagattcagtaaaagaggtcctggaaaatacagtgattaatgaggatgaacctcaggcttctttaagagccgaaggtggaatagacatgatgctgcgcgatcaaagcagtatggtggaacttgccactttcatccagcgtggaatgcactcgggactggatatttttatagaacctgatatagccgtttatgacagtctgctgaatacctatctgcaagaacgggggcttaaacttccctaccgattggagcgtcttcattccggtgccgatccggactcaacgctggtttacactgatacgcttgccattgtcgggactcccggatacatacccagtgaaaaagcaaaacaatataattatgctttcgacattcactccaatcaaagttaccgcctcacaatagaacctatttataagattgtattgcgacagatgagcggtattcttaccacatcattcgttattcttattatattaggtttctccttctggtttcttatccgcaccattttgcggcagaaaacactggaagagatgaagagcgactttaccaacaacatcacccacgagttgaaaacacctattgccgtggcgtatgccgccaacgatgctttgcttaatttcaatctggcagaagacaagcaacaacgggataagtatctgggtatctgccaagaacagttacagcgattaagcggactggtggaacaaattctctctatgagtatggaacgccgtaaaaccttccgtctgcatccggagacgctcagtttgcacgatctgttcccgacactcatcgaacagcataaactgaaagcgggcaagcctgtagaaatcaatctcgacattgcaccggaagacctgacaatcattgccgaccgtacacacttcagtaatatcctgagtaacctgatagataatgccatcaaatactctccggataaagccgacataatgatctgttgccggaaaaaggaaacggaacaagtggaaatctcagttacagaccacggtattggtatccctacggataaacagcctcacattttcgataaattctaccgggttccgacaggaaatatccacaataccaaaggctacggactggggcttttctatgtaaagacaatggtagaaaagcacggtggcatggtaaccgtacgaagtgaagcgggaaaaggaagtacttttacaataagaatctgaataacattgcttattatgaaaatgaatcaagatatggacaaaatcaaggtactgctggttgaggatgaacaaaccctcgccatgattatcaaagatacactggaaggccagaacttcatcatccatactgctgccgatggcgaagaaggtctgcgtatgttcttcgacttacgccctgatgtactggtagccgatgttatgatgcctcgtatggatggttttgaaatggtacgccacatccgtcaaaccgacaaacgaactccggtactttttctcactgctcgttcttccatcaatgatgtggtagaaggctttgaactcggggccaacgactatctgaaaaagcctttcggcatgcaggaacttatcgtacgcattaaagcgctggtgggcaaagcatttacattcagagaggaaccgaagaaggaagagacctgtttcgaaataggcgattaccatttcaactctgtcacacagatattgtcccataccggaatagagcaggaactctcccaccgcgaggccgaaattctgaaacgcttgtgcgaaaaccgtaatcaggtagtgaatacccagaatatcctactcgatctttggggtgacgacagcttcttcaattcgcgcagcctgcacgtgttcatcactaaattacgacataaactttccaaggacgaacgtatccgcattgtcaatgtccgaggtatcggatacaaacttatcatcaactgaaacttccgttaacacataacgacttatgaaaaaactattcatcattctgttccttctcactgtttcctttcgcgttgctgcacaaaacgagcaaacaaaggacagcacattattgaatcgttttcccacggaaatgggaaaagagccgttgtctcctccacccggaacagctgccgctcctaatcgggatatgtcggtaaagacttctctcagcacggatagcacggacttatacatcactcttccgacttattatcccaacttttcgtggatggatacttactccggtgattcatctcaatagaaaaaagaaatagaaaacgggctgcatttccacacgagatacagcccgttcatttaccggttagagaggaacaaatagattgcttataaaaccaattcaattatttacgctccaaagataacaacaatactcaaatatcagcatataatatacaagttttattttaataaatgctatatatttccataattcatacttatttcttatattcgccattaaataaagaccattaagtgatgaaatatataggactaatcatacttttctgtcttctttctttcagggtaaatgcccagaatgaagtacccgctgacagtgttcgcagtatgaatatgccggcaacaaagaattttgatggattccttttggatatgaacctgatgaaaatggcagctcctcaaatgcccaaaatgactttagacattcccgatgccagcaaagattatagttttctgtttcgcttggacccgaatgtgacctactcacaaggctactcacacttattcagtttaggtagctccaccatatacagtatgaaccctttcggactgacaggtttcggatcatctccccaaaacctgcaaatgggaagtttccggctgaagaatggaatgcgcatcaatacttatggagagtatgacaaggacggacggaaagtccctaatccttctgccctgccgtgggaacggaataacttcaaaggcgctttcgaactgaagtcggcaaacggatcatttggaattagaatcgaagtacaacaaggaagaaatggaccttactaaaaaagactacagtcaagggattatatactgaaataatatgaatatgaagaaaaaagtattggtaataggtgccaatggcttcacaggacgccggatcttgaatgatttgtcacgcaatgacgagtacatagtaacaggttgttctctgcatgacgacattgctcccgattccgggaattatcgtttcatcagtgcagacatctgccagatgggggaacaaagcgcactgttccgggaagtacgcccgaatatagtgatcaacacatccgcattatccgttcctgattattgcgaagcacaccgtgaggaggcagacagtatcaatgtcaatgctgtgggacaattggcattccgatgcgaagcatccgctgcacgctttatacatctatctactgactttgtatttaatggagatacagggcagctttatacagaagaagacactcctgaccccgtcaactattatggggcaactaaactgaaaggtgaaaaacgggtagctgagctctgtagcaattatgccatcgcacgtgtggtagtggtctatggtgccgccttgccggggcaacacgggaatattttgcaattggtagccaatcgtttaagaaataatgaagaaatacgggtggtttccgaccagtggcgcacgccaacctatgtaggtgatgtttctcaaggaatagagaaactgataaatcatcccaataatagcatttatcacatctgtggctcggaatgtctgactatagccgatattgcttatcgcgtagcagatactttgaatctggattattcattaattctgccagtcactaccaagcaaatgggagaaacaactccccgtccccgtttcagcggattaagcattgaaaaagcacgcagagaactgggataccaaccacatactctggaagaaggaataaaactaatgttcaatctttaaataagtgattagtggtgagtgccactaatcactaaataacgtttctgcaatcccactctccttcttatacacccgcaccatctccaacaactcatccccatacttttccactccttttttaccaaaataagggattcggagaagagcggatttatcttccggtaataaattggtgatacctaaaatagctttctgttggattacggtatataccggtaatcctaattgagacgcttccgcattacgccatgctaccagacgcctgtataattcgggatgcagaatatccgaaggaacttccactgctgccgtttttttccgtgcaggggtatttccactttcttcggttccgcctttccgttttcttctttcggtagaattaccggaacgcttttcccctttgcctttagtcgatgccgtatcgtcaatggaaagtaccgccttttgtttcagatattctcctacatgaaagcctttactgataacaaattccaacaagtcaacttttaacagaagtagatcatccaattcctcactggcagtcttcaactgtttctttagttctttattatctgtttccacaatggtactactcctgatagcatccaaaggttctaattgttctttaaaatattccgcccccaaatgaatacgttcctgcaagcttttatccgttgcataattttcggcaccatcaaccaggcgtgtgtattgaaggctgaacttctgggcaactttcgttaccttctcatgaaaacgttccgtttctgatttatattcagtcaatagtttggggtagagcttatacaagtgttcatccaccaatctcacaaaacgcttcaatgtcaactctaacggtaagaaatcaaacaatcccgatagcaattccagaaagtatgcttgttgcaatctcctataacgcgtttcatcaggttcgtttctacgcgcatcttccgtaaaagtatctacagcactgtcactgataaccgctcttgccgacagtggagcgctcaataccaacccttccaatgttttacaacgacttaatgccacataagtctgtccgtgtgcaaaagaagcactggcatcaattattgcacgttcaaatgtcagtccctgacttttatggatagtaatagcccatgccagcttcagagggaattgtttgaagactccttctatatcttcggtgatttccttagtctcttcatccaacacgtattttgcattcgtccattcttcctcttgcagcataaaagcatcctcacttcctttactgcgtacttctatacccaaagctgagacattgaccacttcaccaatcataccattgtaataacggtgctcaccggatgaatcattcttcacaaacatgacttgggcaccacgtttcagttcaagcacttcatctgtgggataagaatattcaggaaactttccatctatctgggcacgaaaggtgaaggaacgaccgggtaattgtgccagttcatgttcattgatgcgttgcgcctgatagttatgggtagtcaactggatatatccttcctctttcgaagggttgaaattcggaatgtacctacggttcaattcatccagcaaagttttatcacaacggttctcccgaatacggttcagcatatccagaaagtgagtatcactctgacgatacaccgttttcaattcaagcgtacaatattcagactgtctcagtgcacgactggaaaagaaataaggagtatcatagtagctgttcagcatctgccactcttcatcttttatcactggggcaagctgctgcaaatcgccaatcatcagcaattgcacgccaccgaaggatttactgcgatcacgaaaacgtctcagtacatcgtctatcgcatccagaagatcagcacgcaccatactgatttcatcaatcaccagcaggtctatactacgcataatgttgagtttatcttttccgaaacggaaacgatattgtgctttgccatccgcactgaatgaggtatcaggtacgtaaggggcaaaaggtaactgaaagaaagagtgaatggttacgccgcctgcattgatagctgcaatacctgttggggcaagaacaaccatacgctttggactttcggacttcagccgccgcaggaatgtagtttttccggtccctgccttaccggtcagaaagagatgtgtgcctgtattttctataaattgccacgctaatgccaattcaggattctgttccat

SEQ ID NO: 586 - DNA, 9035 bp, unidentified
  source 1..9035: mol_type = unassigned DNA
atggaaaaattcagtgtcaaaaagccgttcaccatccttgttgcggtcatcatggtcctgctgctgggcttcgtgtccatcacgaacctgcagacgaaccttctgcccgacatcagcacgccatacctcatggtggtcaccgtctaccccggtgccagcccggagcgtgtggagtcagaagtctccgatgtgatggagaacgcgctgggtacagtgtccggcgtcgagagcatcacggcgacctcggcagaaaactacagccttctgctcatgaaattcgccgaaggcaccgacatgaacagcgcgatggtcaagacctccaacaaggtggatcagaccgcgaccagtctgcccagcacctgtctgaccccctccatcatcgagtacagcctgaacatgaacgcctttatgacggtggctgtcagccgggagggcagcgatgtctacgatctgtcggattttgtggagagcaccctcgtgccttatgtgggccgcaccagcggcgtttccagcgtgtcggccaacggcctcatcgaaaagatggtgcaggtgcagctgaatcaggataagatagacgaagtgaatgcccgcctgctggaactcatcgacacccagctggccgacgcccgcgcccagctcgatgacgccgaggcccagatcgccgcaggtcgtgccgagtacgaaaaacagctgaaaaactttggcgacacggtctctgacaccgtcatggcccagatgggtacggaggtggccgacgccgtcaccgtcgtgcgcgaccaggcgcaggctttgctgagcagcatcaaccagctcatcggcgtggtcaatgagccggagatccagcaggccctcatcgacgtccgcgacggcctgcagcgcgtcgtggaccagttcaaccagaccggtatgcgggacatcgactccctcatcgagatcgtcggcgagctgcgcgacatcaccgataagcttaccaacgctctgcaggagctgcagggccgtctgggtaccagcgacggcaccgtctccgaccttgccgacgagctggaagtctccaacagcctgagcaccatttataagactctggacgaggtcatcaaagccatggacaatgtccccggcctgatgaaccagttctccgtcgctctgggcagctattccagccagcagctcagcgcctatatgcagttcaccgaggcccgggagaagctgaaggactacgaaaaccagctggaagacgccaagcagctctacgaggagaccaaggaaaaggcccttgccagcgccgatgtggccaagcagctggacatcaagaccctcgcccagctcatctacgcccagaacttctcgatgcctgccggctatgtcgccgataagagcggcgagtcctggctgctgaaggtcggcgaagagtacgacagcgtttcggacatcgagggcgcacttctgctccacgtcgatggcttcggcgatgtccgcctctccgatgtggccgacgtggccgtcatcgacaacgccgaggccagctacacccgcctgaatggggagcgggccgtggtgctgaaaattttccgcaacgccaattccagcgccagcagcgtctcggacggctgcctgaacgccttcaaggagctgcaggctcagtattctgaccttcacgtcgtcgtcctgtccaaccagggcaactacatcaccatcatcgtcaacagcatcatcagcagtatgctggtgggcgctgcgctggccatcatcgtgctggccatcttcctgaaggacatcaagcccaccctcgtggtcggcgtcagcatcccgctgtccgtcctgttcgccgtcgttctgatgtacttcaccggcctcgacatgaacatcatgacgctggcgggcctgtcgctgggtgtcggtatgctggtggataactcggtcgtcgtcatcgagaacatctaccgtctgcggggccggggcgtaccggcggcccgcgccgccgtgcagggcgctcgtcaggtaggcatgtcggtcgtggcctctacccttacttcggtctgcgtcttcctgccggtggtgttcgcctccggcacggtgcgcagcctgctgcagcccatgtccatgtgcatcggctactgcctgatggcctctctcatcgtagccatcaccgtcgtgcctgccgctgcttccactgtcctgaaaaaggctgagccgaagcggctggtctggttcgaaaagattcaggataagtatgcccacagcctcgagtggtgcctgcagcaccgtgctctgccgctgctggccgctgtcgtgctgctggccttctgcggctggaaggtcttctccatgggcgtcgtccttctgcccgaaatttccagcaatgaggccaccatcgccctctccaccgacgacggcctgaccaaagaggaatcctacggtgtggccggacaggtcgtcgaggccgtcatggccgtggacggcgtggaagaggtgggcgtcaccaccgataccactgtggccggcatcgacatcggccagctgggcctgcccagcgctattaccgacctgctgagcgccgccaacagctacggcagctaccagttcaacgtcatgctggacgagtcactgtcctctacccggatcgccgccgtggagcaggccctgaatgatgccgtttccggcgtcgagaactgcaccggcaccgtcgagatcagcggtatgcaggacctgaccagccagctgagcagcggcctctctgtcaagatctacggccccgacgccgataccattaccgcactgggcgataaggtcgtccagatggtcaacgacaccgagggcttcgccaatgccgccaccggcctcggtcagggcgatgcgaccatcaatctggacatcgaccgcgacaaggtccgcgcctatggcctgacggttgcgcaggtctaccagcagatcgccgccaagctcaccaccaccacgacggcggagacgcccgtcacggtagacggctccaccatgaaagtccagatcagcgataatcttgaccctgtgaccaaggaaaacatgatggacatgaccttcaccaccagtgtcatggacgccaccggcaccaccaccaccggcacctgcacgctgggcgatattgcttcctggacgacgggtactgcccctgactccatcaccagcgagaaccagacccgctacatcacggtgacggcagacacgctggacggctacaacaccacggtccagtcccgcgtgctgcagaagacgctggacgccttcgccctcaccgatgagatgcccgagggctgctccttctcgctgggcggcgagtcctccaccgtcaacctgatggtcgacgagatggtgcagtggatggctctggccctgcccttcgtctatctggtcatggtggctcagttccagagcctgctgtcccccttcatcgtcctgttcaccgtgccgctggccttcactggcggcctgctgggtatgctggtcaccggccagcagctgaccatgatctccctgatgggcttcatcgtcctgatgggtaccgtcgtcaacaacggcatcgtcttcgtggactacgccaaccagctgcgtctgggaggtctggagcgccgtgcggcccttgtcgccaccggcaagacccgtatgcgtcctatcctcatgaccaccctgaccaccgttctggccatgctgcagatggtgttcagcaacgatatggcgagccagctcatgagcggcatggccatcgtcatcatctgcggcctgagctatgccaccctgatgaccctgtacatcgtccccatcctctacgacatcctcttcaagaagccgccgctggtggtcgatgtaggtgacgacggaatggacgacatccccgatgatgccgccgagtatatcgcgcagtcgaacgccgccgaggctcagccagaagcataattttatacagattcaaaagggagctgttgcattttgcagcagctcccttttctgtttcgcaatatgtccaaaaaactctcgaaattttggaagataaatctaaaagcattctcacacaagtctggaaaactgtgctataatcataattatggacgaggtcggggctgcgctgccctgaccgaaaataatgaagaaggaggcgagccttatggcacagttccgctccaagccctttggtgtgaccaaaaacggcgataaggtggatgaatacatcatctccaatcccggtggacttgagatcagcgtgctgaactatggctgtgtgatcaaaaatctcttcgtccctacaaaaacgggtctggtggacgtggtcgtcggacacgacaccctcgccgactatgaggcggatttcaactcatccggcagcacctgctgcggtgcgttcgtgggccggtacgccaaccgcattgaaaatgcggaattttctctcagcggcaagacctacaagctggaagccaacaatggcaaaaatcacctgcacggcaccttcccccgcaaaatttacgatgtgaaaatgttcggcgacacccttttgatggagaccgaaagcccggcgggcgaagacggtttccccggaaatctgaaggtcagtgtgcggtatatcctcacgccggacaacaccctgcggatggactaccgtgtgtccaccgacgaggacaccatcatcaacctgaccaaccacacctacttcaacctcgacggcggcggcaatgtgctgggccagaagctccgcatttacgcttccaactacctcgagggcaacaacgagacctgccccacgggtaagatcctgtctgtggacggtacgccgatggacttccgcaccggaaagcctctgggacgcgacctcgacaccggcttctaccagaccaccatggcgggcggcggcttcgaccactgctatgtcctcgaccggccccggggtgccagccagagcctctgcgcctgggcgtccagcgacaagaccggcatcagcatgaagatgtacaccacccagccgggcatccagctctacaccggcaacttcctgcagaactgcccctcccccggcaagggcggcgtcccgctggaaaagtacggcggctttgcccttgagacccagcatttcccctgcagcccctctcacccggagttcccgacgacggtgctgcgggcaggcaaagtcttccgcgccaacactacgctccgcttcttcaccggccgtcagtgcggccgtttgtaagcaaatatcagccgcagcaaagggcagctctcttgcgggagttgccctttgctgttttttgcgtgtcctctccatgctttgcggactaaaaatctttgcagttcatcagactggctgaaaagatgcaacaaaaatacattttcataaaaaagccggtacttgattctctgtgcaaaaagcggtatcctttaggcagacagagcacaagggttttgtgcgaagcaacatttggaacaagagaggtactggacatggctattttggtttccggcggcgcaggctacatcggcagccacacctgcatcgagctcctgaatgccggctacgacgtcgtcgtggcggacaattactataatgcatcccctgtggtcctcgaccgcgtcaagcagatcaccggcaaggacttccgcttctatcaggccgatatgaccaaacacgaggatgtggagaagatcttcgccgagtgtcccgacatcacggcggtcatccagttcgcagcctataaggccgttggcgagagcgtgtccaagcccatcgaatactactacaataacctcaactgcacgctggtcatcctggatgtgatgcgcaagcacaactgccacaacttcgtgttcagctcttccgccaccgtctacggcgaccccgccagtgtgccgatcaccgaggacttccccgtgggtgccaccaccaacccctacggcaccaccaaggccatgaccgagcgcatcctcaccgatgtctgcaaggctgaccccaccctgaacgtggctctgctgcgctacttcaaccccatcggcgcccacaagtccggcctcatcggcgaggaccccaacggcatccccaacaacctcatgccctacatcgccaaggtggctgtgggcaagctggaaaaggtccatgtcttcggcaatgactaccccactcccgacggcaccggcgtccgtgactatatccatgtcgtggacctggcccgcggccatgtctgcgccatcaagaagctggaaacgaactgcggcctcttcatctgcaacctcggcaccggcaagggttacagcgtgctggatgtcatccatgccttcgagaaggcctgcggcaagcccatcccctacgtcatcgaggcccgccgccccggcgacatcgccgagtgctatgccgaccccaccaaggccaggaatgagcttggctgggtggctgagtacggcatcgaggagatgtgcgccgacagctggaactggcagaagaagaaccctgacggctaccacaccgcgaactgaataaaaaacgataagagcctgtacggcggggacttcccgggtacaggctcttattttttgcattttttctgatattcgaggaaggcgacatgattttttttcagagagcagttcagaacagccccgtttctcttgacaacgccggaaagttagcctatattactgttgttaatgcaaactaacaaacacgctcgagaggaacattccatatgacgttgaaagatttgaacatcggcgagaccgccgtggtcgggaccgtgggcggcgaaggcgctctgcggcagcattttctggatatggggctgatccccggtgaggaggtcacgctggtcaaatttgccccgatgggcgacccgatggagctgagcatccacggctacgagctgaccctccggctggacgatgccgcccgcatcggggtcactctggccaaagccccggcggtgaaaaaggcagcggcagaaagtgacaagccggtggagcatccgggcctcggcgaaggcggacgctaccacaccaaaaaaggcgagaaccctctgcccgacggcacgacccttacctttgcgctggcgggcaaccagaactgcggcaagacgaccctcttcaaccagctcaccggctccaaccagcacgtcggcaatttcccgggtgtgacggtggaccgcaagagcggtgcgatccggaataacccgaatacggaggtcacagacctgcccggtatctactccatgtcgccctataccagcgaggagatcgtgacccggcagttcatcatcggtgagaagcccacgggcatcatcaatatcgtggacgccaccaacatcgagaggaatctgtacctcaccatgcagctcatggagctggatacgccgatggtgctggcgctgaacatgatggacgagatgcgcggcaacggcggcactgtccgcatcaataagatggaggccatgctgggcatcccggtcgtgccgatctctgcggcaaagaacgagggcgtggacgagctggtggatcatgcgctccatgtcgcaaagtatcaggagcggccgggccggatggatttctgcagcgaggaggatcacggcggcgcagtccaccgctgcatccacggcatcatccacctgatcgaggatcatgccgtggccgcaggcatcccggtgcgctttgcggccacaaagctcgtggagggcgaccagcgcatcgaggcggccctgaagctcgaccagaacgaaaaagagatgatcgagcacatcatcgtccagatggagcaggagcggggtctggaccgcgccgccgccatcgcggatatgcggttccacttcatccaccagctggtggaacagaccgtcgtgaagccccgccagagcaaggagcagctccgctcggcccagatcgaccggttcctcacgggccgctataccgccatcccggcctttgtgggcattatggcgctggtgttctacctcaccttcggcgtcatcggtctggcgctccagaacctgctggaagtgggcattgatgccctgaccgccgcggtggactccaccctcacggcgtggaacgtcaacgaagccgtccactcgctggtcatcgacggcatcttcaccggtgtgggcagtgtgttgagcttcctgcccatcatcgtgactctgttcttcttcctctctctgctggaggataccggatacatggcccgcgtggcattcgtgatggataagcttctccgccgcatcggcctctcggggcgcagcatcgtgccaatgctcatcggcttcggctgcaccgtccccggcgtcatggccagccgcaccctgccctcggagcgcgaccgcaaaatgaccatcctgctcaccccctttatgagctgctcggccaagctgcccatctacagcctgtttgcggcggccttcttcccggagcacgcggctctggtgatggtcagcctctatttcctcggcattgcggtgggcattctgatggccatcctgctgaagagcagtgtctttaagggcgaggccgtcccctttgtgatggagctgcccaactaccgcctgcccggcctcaagaatgtggtccagctgctctgggaaaaggcccgcgatttcctccagcgcgcctttacggtcatctttgtggcgaccatcatcatctggttcctgcagagcttcgacctgcggctcagcctcaccgctgacccgcagcagagcatccttgcatggctggccagcggtatcgcgccgctgtttgcgccactgggctttgccgactggcgggtgtctacggccctgatcaccggctttatggccaaggagagcgtcgtttcgaccctcaccatcctctatggctcctctgcggcctttgccgccgcgctgtccccggcggcggctgcacccctgctggtgttctgcctgctctatacgccctgcatcgcggcggtggcctcggtcaagcgggaactgggcggcaagtgggcgtttatcatggtggcaaatcagtgcatcgtagcatggctggcggccttcggcacgcggctcatcatgatgctgtaa

SEQ ID NO: 587 - DNA, 6866 bp, unidentified
  source 1..6866: mol_type = unassigned DNA
gtggtggcattcagcggcggactggacacatcgttcaccgtcatgtacctcgctaaagaaaaaggttacgaagtatatgcagcttgtgccaatacgggcggtttcagcgaagaacagctgaagacaaacgaagaaaacgcctacaaactgggagcagtgaaatatgtaacattggacgttactcaggaatactacgaaaagagtctgaaatatatggttttcggaaatgtgctgcgtaatggtacttacccgatctccgtcagctcggaacgtatcttccaggcgttggccatcgcacgttatgccaacgaaatcggtgcggatgccattgcccacggttctaccggagcaggtaacgaccagattcgttttgacatgactttccttgtactggctccgaatgtagaaatcatcacgctgacccgtgatatggcattgagccgtcaggaagaaatcgactatctgaacaaacatggtttcagtgcagactttaccaagctgaaatactcttataacgtaggtttgtggggtacatccatctgtggtggcgaaatcctcgactccgcacagggattaccggaaacagcctatctgaaacatgtggaaaaagaaggcagcgaacaactccgtctcactttcgaaaagggagaactgaaagctgtcaacgacgaaacattcgacgatccgatcaaagcgatacaaaaagtagaagaaatcggtgcggcatacggtatcggacgcgatatgcacgtaggcgatacgattatcggtatcaaaggccgtgtaggtttcgaagcagcagctccgatgttgattatcggtgcccaccgcttcctcgagaaatacacattgagcaaatggcagcaatactggaaagatcaggtagccaactggtacggaatgttcctccacgaaagccagtatctcgaaccggtaatgcgtgatatcgaagctatgcttcaggaaagccaacgtaacgttaacggtacggcaatcctcgaactccgtccgctttctttctctaccgttggcgtagaatcggaagatgacctcgtgaaaacgaagtttggcgaatatggcgagatgcagaaaggctggacagccgaagatgcgaaaggctttattaaggtgacttctactccgctacgtgtttactacaataaccataaagacgaagagatatgattaaagcaggaatcattggtggcgcaggatatacagcaggcgaattaatccgtctgctgctcaaccatccggaaactgaaatcgtatttatcaacagcagcagtaatgccggaaacaaaattaccgacgtacacgaaggactatacggagaaacagacctgagatttaccgaccagttacccctggacgctatcgacgtgcttttcttctgtactgcccacggcgacacgaagaaatttatggaaagccacaacgtgccggaagatttgaagatcatcgacctctcgatggattatcgtatcaagagtgacgatcatgatttcatctatggtctgccggaactgaaccgccgtgctacctgtacggcgaagcatgtagccaatcccggttgttttgccacctgcatccagctaggtttgcttccgctggccaagaatctgatgttgacagacgatgtttcagttaatgctatcaccggaagtaccggtgccggcgtgaaacccggtgctaccagtcatttcagctggcgtaacaataacatcagcatctacaaggcattcgatcatcagcatgtgccggaaatcaagcaatcactgaaacagctgcaaaacagcttcgattcagagatcgactttatcccttatcggggcgatttcccacgcggcatctttgccactcttgtcgtgaaaaccaaagtagcactcgaagagatcattcgcatgtacgaagaatattatgccaaagactccttcgttcatatcgtagataagaatatagacttgaaacaagtcgtaaatacaaataaatgtctgatacacctggagaaacatggtgacaaactattgattatctcctgcatcgacaacttgctgaagggcgccagcggacaggcagttcataacatgaacctgatgttcaacctggaagaaaccgtaggattacggctgaaaccttccgctttctaaaaacagaagaattatgaaattattcgacgtatatcctttatataacatcaatatagtcaaaggacaaggctgtaaggtatgggatgagaatggtacggaatatctggacctttacggaggtcatgccgtcatttccatcggacatgcgcatccccactatgtggagatgatcagcaatcaggtagcaacccttggtttctattcaaactcggtgatcaataagctgcaacaacaggtagcggaacgactgggaaaaatctccggttacgaagactattccctgtttctgatcaacagcggagccgaagccaatgagaatgcgctgaagctggcttctttctataacggacgtaccaaagtagtgtccttcagcaaggctttccacggacgtacttcgttggcagtagaggctacgaacaatccttccatcattgctccgatcaataacaacggacatgtgacctatcttcccttgaatgatatcgaggcgatgaaacaggaactggcaaaaggagacgtatgcgctgttatcatcgaaggaatacaaggagtgggcggtatcaaaataccgactaccgaattcatgcaggaacttcgcaacgcttgtaccgaaaccggaacgatcctgattctggacgaaatacagagcggatacggtcgcagcggtaaattctttgctcaccaatacaatcatatccagccggatattatcactgtagccaaaggtatcggtaacggattcccgatggcaggtgtactgatcagtccgatgttcaaacccgtctacggacaattgggaactacattcggaggaaatcacctggcatgctcggcagctcttgccgtaatggatgtgattgaacaggaccatctggtggaaaatgccgctaaagtcggtaattacctgctggaagaactcaagaaatttccgcaaatcaaagaagtacgcggacgcgggttgatgatcggactcgaatttgaagaaccgatcaaagaactgcgcagccgactcatctatgatgagcatgtatttacgggagcaagcggtacaaacgtacttcgtctgttaccccctctctgcctcagcatggaggaagcggacgaattccttgcccgtttcaagagagtactctgatcgctcatttgattaataaacagccgacaaaaaagcagcctcatacagaaatatttttcttatccgggctgctttttgttttttcgcaatttaccgttacctttgtctgtaagaatccataaaaaataagcgcatatgaaaatagctattatcggtgcaggaaacatgggtggttctatagcccgcggcctggcaaaaggaagtctgatagcagactcagatatcattgtatccaatcccagcgcaggcaaactggaaaagctgaaagaagaatttccgggcatctccacaactcagaataacgcagaagctgctgcaggagcagatattgtcattttggcggtcaagccatggttcatggaaccggtgatgcgtgagctgaagctaaagagcagacaaactctcgtctctgtagcagccggcattagctttgaagagcttgcacactttgtgatagcccccgaaatgccgatgttccgcctcatccccaacactgccatcagcgaactggaaagcatgacacttatcgcagcacgcaacacaaacgatgagcaaaaccagttcatgctccggctgttcaatgaaatgggaatgtctatgctcatccccgaagaaaagatagcagctaccacggcactgacttcctgcggcatcgcttatgtattgaaatacatccaggctgccatgcaagccggtatcgaaatgggcatccgtcctaaagatgccatggagatggtagcccagtctgtcaaaggagccgccgcattaattctgaataatgatactcatcccagcgtggaaatagacaaggtgaccactccgggcggaatcaccatcaaaggaatcaacgaactggaacacaacggatttacttccgccgttatcaaggcgatgaaggcatccaaataataccgcaaaattattaattataaaaaaataaccacttgtatgaatgatcaaattaaacaaatcgcagagcgtcttcgcggattgcgtgacgtactggaactaacgtctgaagacatcgcccgcgactgtgacatatctgccgaggaataccggctcgcagagacaggagattacgacatttccgtcagcatgttacaaaagatagcccgcacctataacattgcactggatgcactgatgtttggcgaagaaccgaaaatgagcagttactttgtcacccgtgccggcaaaggcacgagcatcgaacgcaccagagcctacaaataccaatcactggcagccggttttatgaatcgcacagccgatccgttcatcgttactgtcgaacccaaaggagacgacgagcctattcattacaaccaccacaacggacaagagtttaatcttgtgctcgaagggcgtatgcttatcaacattgaaggtaaggaaatcatcctgaaccaaggtgacagtatctatttcaactcaaaacttccacatggcatgaaagcgctcgatggcaaaacggtacgttttctggcagtaattatgtaataacattatggtagaaagatttttagcaaagactaactttgcctcacaagaggattttatcaagaacctgaaaataaatgttccggagaacttcaacttcggttacgatgtagtagatgcctgggcagccgaacaacccgacaagaatgccttactctggaccaatgaccggggcgaaagccgccagttctctttcgccgacatgaaacgctatacggacatgacggcttcttacttccagagcctcggcatcggtcgcggagatatggtgatgctgattctgaaacgccgctacgagttctggtacagcaccatcgccttgcataagctgggagccacagttattcctgcaacccacctgctgacaaagaaagatatcatctaccgctgcaacgccgccgacatcaaaatgattgtagctgccggtgaaggaatcgtattgcaacacatcaaagatgctcttcctgagtgtccgagcgtagaaaagttagtcagtgtaggtccggaagttccggaaggattcgaagatttccatcagggcatcgagaacgctgctccgttcgtccgtccgagacatgccaatacgaatgatgacatctcactgatgtacttcacctccggtactaccggtgaacctaaaatggtagcgcatgactttacctatccgttaggtcatatcgttaccggtagcttctggcacaatctggacgagaacagtctccatctcaccattgccgataccggttggggaaaagcagtatggggcaaactctacggacagtggattgccggagcaaacatcttcgtttacgaccatgagaagttcacccccgcagctattctggaaaagatacaagagtatcaggtgacttcactctgtgcacctcctactatcttccgtttccttattcatgaagatctgaccaaatatgatctgtcctcattgcggtattgcaccatcgccggagaagctctgaaccctgccgtattcgagactttcaagaaactgacaggcatcaagctgatggaaggcttcggacagactgagacgacattgacagtagctaccatgccttggatggaaccgaaaccgggaagtatgggattgcccaatccacaatatgacgtggacctgatagacaacgaaggccgctctgtagaagcgggagaacaaggtcagatcgtaatccgcaccagcaaaggcaaacctctcggactcttcaaagaatactatcgcgacgcggaacgtacacacgaagcctggcatgacggcatttactacacaggtgacgttgcatggaaagacgaagacggctatttgtggtttgtaggacgcgcagacgatgtaatcaagagttccggttaccgcatcggtcctttcgaagtagaaagtgctttgatgacacaccctgccgtgatagaatgtgctattaccggagtgcccgacgagattcgcggacaggtagtgaaagcaaccatcgtattgtctaaagactataaggcacgcgccggagaagaattgatcaaagaattgcagaaccatgttaagaaagtcactgcaccttataaatatccgcgtgtgattgagttcgttgacgaactgccaaagacgatcagcggtaagattcgccgtgtggagattcgcaagaacgacgagaaataagcaaaaaacagccgactcatcgataaaatcctccttatctgttcctcaaacagcatagggaggatttcttttggtaccaatgctacaaactgatcaatttatgctaaaatcagaccaatgcatcatttctatacttttatgactcaaaattgctctcatatataatttccccttcttatatttgccggcagtaaaaaccaaaacacaaaagaatatgattacaagtagaaagatttctcaggtcaatgtttttgctggtagtccctgggaggtggccagcgtgaagagtcttctgaaagcagcgtatatcgaggcttcaatgaaagacaacggattgaacggtatactcgtttcagttccatgcgaatactataccgcagcaatgcgtgtgattaatagcagaaaggttttatag

SEQ ID NO: 588 - DNA, 19302 bp, unidentified
  source 1..19302: mol_type = unassigned DNA
tattgtattactggttattatcgctctgacagcggttttctccattatgagtaaggagttcagacagtatacaactctcttaagtatgttggatttctcttactatgatcttctgatggcaatcggtgttacattcccacttatcactggtggtgtagacctgtcaatcggaaccggaatggtttgttatgcacttatcgccggaacaatggtaagaagccatggatggccggtagcagcagctatggtgctctgcctggtacttggactcatcattggagccctgaatggtgtgctcatcggtgttatgaacctgccaccgttccttgcaactctttgtacatgtatgatcacccgtggtgctggttctctttgcagtgcaacaccatggccggggcttacacaggatggtggatggttccactcaatcttcaagatcacagttggttcaggaagaagtgcttcccgttacccaatcggattcctgtggatggttcttctggttctgctgatggaattcgttctgaatcacacaaaattcggacgttacactatcgcaatcggatctaacaaagaagcagcagctctttctggaatcaatgttaaattctaccatgttatggtatacgtagtatgtggcctgttcgtaggacttgcagctatcgcttatgcagcagtaacacctactgtacagcctggtactggtgccggacttgaaatggacgcgatcggcggtgtattcgttggtggtgttgcagcaaccggtggttacggttccgtaattggaacatttgttggtatcttcgttatcatgctcctgaagacaggtcttccatatgtcggcctgcaggctaactggcagcagatcatcacaggtcttgtacttatcgttgcagtcctgatcgatatcatcaaagaaaagaaaaaagctgctatgtaagcagtataaatgaatgatttaaacagcacagtggattatagatatccgctctgctgtaaaagaaattgaatatttattaaaacttcataaggatgtggggcgtcagagtttcctactgacgtatcatcataaaaactatataatttatatttataaggaggaagtaaattatgaatttcaaaaaggtagtagcattaagcatctgtgcagcaatggtagcaggaatgtccgcatcaacagttatggcagctgatcttccggatcagttcaaagatctcaaagcaaatgaagcttatgagttcccgatgatggttaaatctttccagtccacatactgggatgcagcacaggaaggtatgaagaaagcggctgaagaacttggtgttacttacacagcacagggaccgaacagtgaatctgatatcgctgaccaggttaacatgatcaacacagcaatcgcttccaacccgaaaggattaggacttgcagcttgtgatacatcttccgttcttgacgctctgaacgattgtgtatctaaaggaatcccggttgttacattcgatacaggtattgcagatgctccagaaggatctatcgcttgcgaagtttgtacagacaacgctcaggctggttctgtagcagctgaaaatatgtacaacgcaatcaaagatgttgtagctaacgctgatggacaggttgtcatcggtgaagttaaccaggatgctacagctcagaacatccagcagcgtggtggcggattcatcgacaaaatgatcgaactgcttcaggctgacggaaaaacagtagcagttgctggaaacgaattctatgtaaacgcagctaaaaacgctgatgcaaaagaagctgacgcagacgttgttattcaggttgctgtaccggcacagacaactgtagagctttgctctaacgaagctcaggctatcctttccaaagaaaactgcatcgctatcttcggttccaaccagacagcagcagaaggtgttcttgcagctaacgctaacctgaacgttcttggatctgacgcagctaacggcgacgttatcggtgttggtttcgatgctggttctatcatcaaagcagctgttcaggatggaacattccttggtgcagttacacagtctcctctgatgatgggctactatgcaatctacgctctgacagcagcagctaacggacaggagcttgaagatgttcctacagatggttactggtatgattctacaaacatggacgatgaagaaatcgctccaaacctttatgactaatctttagtttagggtgaaaacccccagggcatttgccctgggggttttttaagtaacacattcacaatttacttcaataaagcaactgaggacacttttttttacaaacgaggttcttaacatttatcgctttttaggatattatgttattatcaaatatgaaagaacctttttgacatagcattttgcacaacaataaatgctatacacatcttacatatttaggaggatttaacaatggcaacatattatgcagcagtagatatgggcgcatccagtggacgtctgattcttggacacatggaaaacggaaagatggaacttgaagaaatccatcgtttcgaaaatggtatggttaagaaagacggagaactctgttgggaattcgaccgaatttttacagaaatcgttgctggtcttaaaaaatgtaaagaaatcggcaagattccggtaagtatgggtgttgatacctggggcgttgacttcgttcttcttgacaaagaagacaaagtacttggaaacactgtaggatatcgtgatcaccgtacagaaggcatggatgaagaagtttacaaattcattccagtagaagaactgtatgcaagaactggtatccagaaagctatttacaatactatttatcagcttatggcagttaagacaaaacatccggaatatctggaaaaagcagaaactctgcttcatgtaccggattatttccatttccttctgacaggacagaagacttgtgaatatacagaagctacaacaggacagatggttaacgctgaaacaaaagactgggattatgagatcattgacaaacttggatatccaagaagaattttccagaaactgatcatgcctggaacagtagttggacatctgacagaagaacttcagaaagaagttggatttgacctggaagtagttgcacctgcaactcatgatacaggatccgctgttcttgcagtaccggcaaacgatgatgacttcatctacatcagctccggaacatggtcactgatgggtatcgaaagaaaaactccggactgctccgcaaagagctgtgaactgaacttcacaaacgaaggtggatacgaaggacgtttccgttacatcaaaaacatcatgggtctgtggatgatccagtctgtacgtcatgaagtaaatgacaaatacagctttgcagaaatctgcgcaatggcagaagaagcaaaagacttcccgtccagagtaaatgcaaatgatgaatgtttcctttctccagaaaatatgacagaagaagtaaaagactactgccgtagaacaggacagaaagttccggaaacaatgggcgagatcgcaacagttatctacaccagtcttgctgaatgctatgcaaaaacagcaaaagaactggaagagatcacaggaagaacttacagccgtattcatgtagttggcggaggctctaacgctggataccttaatgaactgacagcaaaagctacaggaaaagaagttcatgctggccctggcgaagcaacagcaattggtaatattacagcacagatgctgaaagccggagattttaaatccgtagaagaggctcgtacaacgatccacgagtccttcgggatcaaaatttataaataacaaataggaggttttactatgttagtaaacacaaaggcaaaagttggtgtattttctatcgcattaggagcatatcttcctcagttcccatcactggtacctgagtttgaagctcagtatgaggcattcaagaagacaattcctgatacagtagagatcattgacggaggaatggtaacaacaaaagaacagtctatggtagctggagataaattccgtgcagctgatgtagacatcgttttccttcagatgctgacttatgctacatcttacaatatgcttcctgcaatccgtgatctggatgtgccagttgttctggttaacgttcagaaactgaaagcactggattacgatcacacagatatcgctgcatggcttggtgaaggatatgcctgcggtgctgttggtgaagctgttgctgaccttgaaagagcaggcaagagacatgctgttatcacaggtgtcgtagaaggtggagatccggctgtacaggctgagatcgaagactggtgtaaagctgctcaggtcagaagaagattccgtgatactaacatagctcagatcggaagaccatatccgggtatgatggacctttacatcgatgagacaaacctgtacaacagaatgttcctgtacacaaaacagtttgactgggaaaaaatgtgggctatcgctgatgatatcacagatgaagaagcaatccgcgcaaaagctcaggatattcttgatacattcgatatcgaagatggcggcacaatcgaaaaagtatgggatatggcaaaatacgttgtagcatttgaaaaatgggtaaaagatgagcacctcagcatggttgcttctcattacgacggatttgctcagggtaaagctggtgtccttgacagtatgctgatcccggcattctctatgctgatcaaacagggtacagcatgtgcagttgaaggtgatatgaaagtcgctatggcaatgagtatccttaagacaatttccggtacaggccagctttctgaaatgtactccatcgacttcaacgatgacatctgcatcattggacattccggaagtggagatgctgatatttccgataagaagcctaccatgaagatcgtgccggtattccacggtaaaacaggcggcggatacctgacacagttctatccatacacaggtccggttacctatcttgcaatcacacaggataaagacggacacttcaaatttgttgtagcagaaggtgtaaacgaagaaggacctatcctttctttcggtgatacaaacatgagaacacgctttacatgtggagcaagagagtttgttaaccgctggagcgaagctggcccgacacatcatatggcagcagctacaggaagacatatcgatacaatcctgaaggtagcaaaaatcttcaatattccggttgatatcgttacaagataattttaccatctactttatacacatattcatattcaaaaaaagagatcgcataaagcggtctctttttttattttctgtataatggaggaatagaatcaagggttgcagaatgctttcgggcaggtatacgaatttcaacttctgttccatggccgggattgctggtgtagctgagtccataatcagggccatacaggatctgaagacgtcgatgtgtattgtacactgctatatttgtgccaccggaggaacttgcaccttcaccggacaggatcgttgcaagttgctccgcagcaattccgattccgtcatcagatatcagaagaacaatgtctgaatcttccatccatccggtaagaacaatagttcctgttttatcagcggtttccagaatgccgtgcagtacagaattctcaatgattggctgcagagtcagctttggaatctgatattccatgagttcatcaggaatgtcggatacaaaggtaatgctgtcatgataacgcatattctgtatctgcaggtagatggaaacgtgttctgcttctctgtaaatcgtgctgatgctctgtttgcggcttaaagtcagcttataaaagcgggagagactctgaacggcgcgggaaacttcatctgttcgtccctgctgcgccagccagttgatcatatccatggtattataaagaaaatgtggattgatctgggcctgaagagaacgaaattcagcgattcgaagttcttctgcagctttagcctgatcagtcataagctgatccatcttacgcgtcatatagttgtaagtatcaataagatcaccgatctcatcatggtattccggactgtccataggacttaaggttcctttacgtaccttactcatctgatgtatgacagaggagattcggttcgtgatcgagtgtgacataaaatgtgcaagaaccagggcgaataccagaaaaccaagatacatcaggatatactgaaccatgatggcattactctgatgaatcagtggaccagaaggcaggacagtaaccataaaccattcgggctgtttgatgttatagaagccggcatacacggtagtatccaaaatattccgttcaatgaagttgttggaggacataaaagattcctcaattgtatcgtaatccaacagatagatacccgaaagggatacatcggaggatgcgaccacggcatttcgatcattgatgatgtaagaaacacttccgtcaatcgtcagattatctttcaacatatctgagagataatctgaagaactgtaaagggcgatgtaagcctgacgggcttttccctgataataaaaggtcgtggaagtaatatatgcaagatcgccgtatttttttttctcgcgttcaccaagatagaaagcaggacagaacagggaggactgctgtgtaccctgaaagataccgtaccagtaggtaccacgagctttgctcataggtgaaaaataatctttcgtaagatcatcactgaaaagtcgtacagattgcggtggaaaatccatatagatctgtaaaccggagatcatatcagaatcaatcagattttctacatattcatgaaaatactgtgcatcgtttgtatccagaaacatctgaaatggtgagttaacaggctggtggaacagaatctgaaaaaattcctgatcagtgattccgtcatgggcatcaatgatctgctgtacaagatcttctatgtaaggagctgtctgggcggaagtatcctgttcctgacgaatcgtgtaggagacaaccatatcgtacagctttccgtagaaaaagcatgccatcataatgacaggaacggttgcagtgagcagcagtacaagtgtaaatttgtaactcaacttcatgtcaccataagactgccggcatttttttataatattattcatttcaaattctgctccctgtattcagaaggagaaagcccactgtattttttgaagctctttccaaaatagttaccgtcactgtagccaaccctggaagatatgtctgtgattttaaaacgtgcatctttcagaagctgtttggctttttccatacgatattctgttatatactgattcagcgtctgcccggtctcgcttttaaagaatgtgcatacatacgaagtagaaagaaacacatgggaactgatatcctttacagaaagagtttcgttcatataattcttactgatgtagtctttgatcagaaaaatagtcggattttcctgagaagttgtttcggctttcgtgaaatattcttttgttttggtgatcagggtctgatgaagctccggaaatgtgaaacagtcatcaattgtttcggcgatactttcaacatttccggaaccggcaatcttctgttggtggcgggcatcttccaggcataaaaaaagtttgtaataaagatctttgaccggattctgcagaaaacgatgatttttataaaaagtagtatacagtttctgaagaatagtttcagcggagatctgatccagcctggataatgcatctgcaaaagccgccgccggcgagtctgaaaaaatattactctgtacatccggactttcgtctggctgggcagaagtcagtagcgtattttctggaaaaaaataactgctctgtaacagaataacagcagaagtataggtctgataggcttttgaaaggccgtatactgtatcaccacatgccatagaataatgtccgatctctgcaaaatgactgcaaaggtaagtattcactgactgcaactgtctgctggctggctcattctgtgaaaacagaaaataaacaagatactgcattttcttttcgagataaatgcatttcatatgaaatggttccagaaaatcctggaattcctgataaaaatcagtcatggatggaatggatgcatccagaaacagatccgtttttacgataaaagaagtaaagtaagtggatgcattcatagtaagcccaagttcagatgagagctgctctatgatctggctgttgcctccgtagggaagagtcagctgcagtgccagacgggaagcagtttccattgaatgcagtgtctcgcctctgcgggaatggactttttgggtgtaaagttcacgggcttcgcggatggcagtttcgatttctgaaatagaaaaaggcttttcaatatagttgactgcttttaatttgatagccgccttcagatattctttatctgagtatccgctcatgaagatcggaacagtatcaggaagaaacttttccagacgttccagcatggaaataccatccatgcggggcatacgcacatcacacagaatgatttccggcttgcagagccgtgctgtttcaagaccgtgcacaccatcatctgcctgcaggacttcatctatgccaagagaagcccagtccagcgaagtgatcacaccagtgcgggtaagctcttcatcatctacgatcagtaatttcatatgattctccttagtattggtgcagtaaagattaaagttaccaaatcattttcagaaccttgttacagatatcagcagcacagggatgctgaatttcattaaaaagacggtttacccgtgtccgttcagatttccagaaatcctcttttggagagagggcatccagaaagtcattgaatgtctcaggcttcggaccaggggttacgtcatcataatcaaaattcatgccgcgtccgtcaaggtactgctgacggtcgtacggaagaaatatcattggtttgtcagtgagaagataatcaatgtaaatactggaataatcggtgatcaggcagtcaaagatattcagaataccggtgacatcttcagcctgttcatttccaagaaaacgaattctttttccaagatatggagcagcagaaccctgttcggcaacatgagtccgtataaaaagcaacatgttcttttcatcaagaaatgcctccagctgtttctgatcaaaatctttaaacggaaacagctgaacctgtccataatcgcggaaagttggggcataaagcacagtctttgtatattccggaagatccggaaacagttggcctaaaatttcacggcagtcatttttttggaacagtccatcgtttcgcggctgtccccagaccttgattttgtcttcagaaacagcaaaacttctggccataaggggaatcagttcatgagaggttgtcaggatacaggtatagttttcagagaaaatctttttgaaataaatacgtgctgcttttttgagattaggatccagaagagcaatttttttcagtggaacaccatgccagagattaatgatcagtctctttttgtgaagaccggtcccataggcaggaagcccggcagatgtaaaccatacaccggctgacagtgcctgacgaataccctgtatactttctgtttcgataaaatactgttttccatatttagaggaaagactatttcgaagctccggatcattgatcacgaaaagaggggtgatctccggaagattttcttttacgtattcaaaaagataacgggaattataattgtaatgactgttatctgtagaagaaaacagccagatatgagaatctggacgaatctgtccaaaatgctccaggcatgctgtgaacagcagatttttggcttttcccatggttgctatgtcctttccagttaaaatgatacagtatcagcggtatttccagaatccatgtatggcataggaaataaaatacagaatacagcgcatgtggctgtagcccatataacgatatactttataagtcataatggcagatttctttttgtctccggatttgctggttttgctcatacgatatttaagaagcgggcggtcaataccggcagcgggaccgtatttgcgcaaaatcttaagccatgtaaggtagtcttcgtggctgtcatcgtgttccatcgggaattcagcagcgacatctctcaacaggagaacagaagaacagttgatactgttatgtttcagaagatccctgtaagagactgtttccttcaccgggatatatttgccggtaggagttccatcgtagttcataagttctcttccggtagaacagagtacacgacctgtttcgtgaagagtatccagctgaatctgcagtttgccgttttcccaccagtcatctgcgtcaaggaatgcgacatactgtccgtgagcttcctgaaccccccggttacgggaggctgcagctccaatattatgtggatttttcagataatggaaatctggacgattccggtaaacggacagtacttctgaagtctggtccgtggaaccgtcgtcaatgaccagcagttccagaggaatattctggcagaaaacagattccactgcctgtcggatggtaaagccaccattatagacgggcatgataactgaaatcagaggtttatttgttgtcataaaaagttcctttcagtttttggacgagatatcaccggcaattaaagcctctacctgggcggctgaggtacggttaatgcattcggcattgatatgcagtgggagaacttttccttctgcgaataactgcatgccgtgcaggagtccggcttctgaatcttcgagcaaaagcccgccgtattttttcagaaaactgtgacatccgcttacgtcgcaggccattacagggataccgagtgttgccgcttccataagaacgattccctgtccttcataataggaagaaagaaggaacagatcacagcgtttcagaatgggcataggattggtgactgcacggatcaggataatatgatcggatgcgcgcagagccctggtatgagccagtgtttcatcgtagagattaccaacaccgccgatgatgatcagccaggtgtcagggtgctccttccagtattgttcaaaagcatccagaagtcgtttgtgtcccttctcaggtgaaaaacgaccgatgctgataaattttggagcgtcagaatcaagtacagactgtagtgtttccagagaaacattggatagtgtatcttcattgaatgcaacgggagcaaggcttcgctccagcacactctgataatcgtgacagttgtgtatgaccgtgattctggaacggtcagcaccgaattcactgacaacaggctggataagatcttcactcaccggtacaatgtgatcataggtatgatatgcctctttcagaagataagggttcatattgcctttcaagtggacttcccttgccatatcattgtgaatccagatacttcgtgggcatggagcctcttcaagaagtgaagttgtataggcttcgtagccgttataatgaattacacaggcaaattcagtacttccgaaatgttttttccattcgcgtctgtaagcggtatgcagtctgtgttcggcccaggaaccggtatggcctttcagtttcagaagctggacagccattgtcagcagatccatattcatttcactggccagtggatagatcccgacgccttccgggaggcgttccatcctttccgggtgatcttttacgtacagtgaacggaaagaaataaaataattataacgggtaagatccagttcatgaagctgagaatacaggacagttgtgataccgttgagatccaggtctcctgcataaatcagaatattttttttaccattgccatgatattggtacttacggcagcagtcctcatgaaggaagacctgacgacagatcttttcggcaccgtgtccgtcttcatagctggcatatttttgcataaaagcattgtccggtgtgccaccggagcagtgtgcaaatggaatgacctcctctgctttttcagtataatcaaaaggataggaatcgattgtttcatacataccacgggaactttcatattccttgcggtcataggcaaaaagtatgatttttttgccggagttggcataatcataaaacacgctggaataatccgtgatcagcgtatcacagatactcaatccctcataagtatcccaggatgccggaaatggcagaatatgatgataaccggaaaaatcttccagaccatgaaggaacggatgcaatttaataagaagaatctcatcctcattcagctgggaatcccacagagaaagattttgagagagcgtttgcatatatccctgatcgtccagagcattaaaattaccacggaaagtcggaaggtaggcaagcagttttttgccctgcagaccgacctgctcttttaagtggagatttgccggctgacgaaagatatcgttacgtgggtaaccctcgcgaagaacggttccgcggtacagactgtccagcatataggctccggacattttttcttccataaactggtttggaaataccagatagtcagaatccagcagattccgctgtacatttcccatggttaccatctcaggacgattgtcacgtcccatcttcttaagaggtgtgccatgccaggtattcaggtaaatctgaccttccttttttataaagcgtcccgggaacgaggtatcattcacaagatagccggcacggctgagggcgtggtaataagcaacagaaccggtacgcacaaaatgaaccccctgaatggagttcttctggagtttctcttttatttcattttcagagtcacgatggacagacagtacaagtgtgaaactgcgatagggttcctgacagagctcttttaataaggaaagaatattactctccagagctttgccacttctggattccagcaggatcatatggggatccagattatttttctcatagaatgtattgtaaaaaggataccagctgccgtttcgcagtttcttttttactttgccaagaaagctcatttttgcacgaattcccttcagtaataaatatatagtaactataacaaatgcaaaaactcatgtcaatgttatggaacgcttgctgtgaacagttactaatgacagtgcctgttttgggaagataactggaaaatattacccattaacaggaaaatattttaccccgattcgaaatattttcctgttttggatagaaagttttattgttataataataacagatttaagaaaagggaggaaagagccgtgtctgaatatgttcttgaacttaaaggcataacaaagattttcccgggcgttaaggcactgaacaatgtacagttccagttaaaacctggcgaagttcacgcacttatgggtgaaaacggtgctggtaaatctacatttattaaagtaattaccggtgtacataaggcagaagaaggcgagatgttcttaaatggacagaaggtggatttcaaaggaccgaaagatgcacaggccgcaggtatcgcagccgtatatcagcatccgacatcttatccgcatctgaccgttgcagaaaatattttcatgggacatgagattatcaaaaacagaatgatccagtggaaagccatgaacacagaagcaaacaaacttctgaaacagctggatgcagattttgatgcaacagcagaaatgggtaccttaagtgttgctcagcagcagatggtagagattgcaaaagcaatgtccaccaatgcaagaatcatcattcttgatgagcctactgcagcactgacaagatccgaatccgaaaaactttacacactggttgataaattaaaagctgacggagtttccattatctttatttctcaccgttttgaggatatgtatcgtctggcaagcagagttactgtattccgtgattcccagtacattggaacttacgatgtagatggaattacaaatgcagatctgatcaaagcaatggttggtcgtgagatcaaagacctgttcccgaaaccggaagtgaaactgggagatgagatgctcagggttgaaaatctttccagaacaggttattttaaagatgtatcttttacagttcgtgcaggtgaaatccttggacttaccggtctggtaggtgcaggacgtaccgaaaccgttgaagctgtctgcggtatcacacagccggattccggtaaggtttacctcgaaggtaaagaagttcacatcaaaaaaccgtccgatgcaatggaaaaaggtatcattcttcttccggaagaccgtcagaaagaaggtctgatcatgagctggggactgggaagaaacgtaacacttcctaccatcagcaaatatgcgaagagtggtatcaatgatgaaaagacagaacgtgatcttgccaaaaaacttcttgaagaagttgatacaaaggcagttgatatcttccagccggcaagctctctttccggtggtaaccagcagaaagttgttgttgccaaggcgttaagccaggaaatgaaagttgttatcatggacgagcctaccaaaggtgtagacgtaggtgcaaaagctgaaatctatgcgatcatgggcgaccttgcaaagaaaggttatgcgatcatcctgatttcttctgaaatgccagaaatccttggtatggcagaccgtatcgttgttatgtgcaacggacgtaagactggtgagctgaaccgtggcgaagctacacaggaaagaatccttgagctcgcaatggaaaaaggacatacagggggtgctgaataatggaaaagaaatcagtcatgaagaagatcacaggctcccgtgaagcactgctcgcaattgtcctgatcgttctcttcgtaatcattacagcaatcaacccatcattcctgactcctaagtcactgatggatatgctgaaaaataatgcagtaacaatggtaatgtcacttggtatgctgtgtgtaatgcttgttggcggaatcgatatttctatcatgtcaacacttgcactttccggtatgagcattggtatgcttctgaaatatgaacatatctccagcacattcctcgcattcgtgatcgcaatcgcaatcggtatcgtatgtggagtagttgttggtctgatcatttccagagcagatgttcctccgatcattgcaaccatgggctttatgtatatctaccgtgcacttggttatcaggtatctcacggtggtgaatgggcaagtgcagcagcacttggtaactttaagaattttgcaacaacaaaattccttggactgaatgcagtcatctgggtaatcattgtatgctatgtattcttcttctggtttatgaaatggaccagaacaggtcgtatgatctatgcagtaggtagtaacccgagtgcagcagaagtatccggtatcaacgtaaagaatatcaaacttcttgtttatacgatcatgggtcttctggcaggtcttggcggagctcttcaggtttctgtatatgcatccgcaatgccggatatgcagtatggcggtgagatggatgttatcgcagcctgcgttatcggtggtgtaagcatgagcggtggacgtggtaccgtaatcggtgctttacttggatccctgatccttgcaacaattgcaaaagcacttccgctgattccattcttcaaccagttatggctgaataccatcaagggtattatcatcctcgtcgtagtagtaatgaatgtaatcctgcagcgtatcgctgataagaatgcactgaaaggaagggagatgtaatcatggctggaaaatctggaagaagtattaataatgtgccggagagcccagtgaagaaaatgatcttctcctgggaaggaatattggtcctgctgtttattgcagtcaatattttctgtgcaatgttttctgaatattataacctgagcagtctgcttcgtcagatgccggtttatctggcagaagtattcatgatgctgccgatggcatacatcctggtacttggtgagatcgatatctccgtaggtgcgatcgtttgcctttctgcaacaatgagctgtatcgtgtgcaacacaaatgcaccatttatcgtagttgtgattacagcgcttggcgttggtaccatctgcggagcagttaacggatttatccttaccaaattccaggaactgcctccaatgatcgttacactggcaacacagatcatcttccgtggtatttccgagatcgttcttggaagcggtggaagtatttctgcaagtaacactgatggcttccgtgcaatcggtggaaagatcggaaatgttccatacattctgtttctcgtagtaatcctttctgtgatctttgctgtgatcttaggcaagagcacattcggacgtcgtgtatatgcaatcggtacaaaccgtctgacagcatattactcaggtgttcatgtacagaagattcgtttcatcatttacaccatcatgggtacagtttccggactgtgtgcactgttcttagtttcttcttcatacggtgcaaatacaacaaccggtaacggatttgaaatggatgccatcgcaatggcagtattcggaggtatttcctctacaggtggtaaaggtaatatcgcaggtggatttatttccgcatttatcattgtatgccttcgtgtaggtcttggtcagagaaacgtcaatgcacaggttatcctgctgatcatcggtgtacttctgatcgctgcagtagctcttccgaacatcatcggaaatgttaaaaaagcagtaagtatgaagaaaaactaaatatttttaataacgtaagtggctgctctcttgtagcaggggagcagttgcaaataaaaaactatatttccaagggaggaaaacaaaatgaacaaaaaaattatcagcgcacttctttgcggagcaatggtacttagctgtgcagcacctgtaatggcagctgacaaagctggggacggacagaaaatcgcactggttggaaaatcagcaggtaacgcattcttcgaaatcgctgcaaaagcatttaaagaaacagcagaagctgaaggtgcaactgtagatgttgtttacccggaagctgcaacagcagatgctcagatcaaagttcttgacaacctgatctctcagcagccagatgcaatctgcatctccgcaaatgacgttaacgctcttcaggctaaactggaagaagctatggacgctggaatcaaagtatcttctttcgactccgctccgaataaagacagccgtcaggtattcgtaaaccaggctggtacacaggcagttggacaggctcttatggatgctgttcttgacatctccggtggagaaggacagttcgctatcctttctgcaacatctcagtctgcaaaccagaacgcttggatcgacgctatgaaatccatcatggaaggcgatgagaaatacagcaaactggaacttgtagaagtagcttatggtgatgacgaacctcagaaatctacagaccagacagcagctcttcttcagaactacccagatctgaaagttatctgtgcacctacaacagttggtatcgctgcagctgctaaataccttcaggacaacgaatctgcttgcaaactgacaggtcttggacttccttctgaaatgcaggagtatacaggtgatgacgatgcacattcctgcccatacttctatctgtgggatatggaaggtcttggaaaactttccgcatatgcaacaatggcacttgtaaaaggtgacatcactggtgcagaagatgaaacattcacagctggcgatatgggtgaattcacaatcacaaaagctgatgatgacggaacagaaattgttcttggtgagccacttcagttcacaccagacaacgtagctgactacgctaaactgtactaatcagcacgtttggagaagctaaagtttttctgaatatgataaatccttaaaaacagggcggagccgaaaggcttcgctctgtttttgtgtacttttttgtcatattgctttatactgtctgagcatggtagaataaaagaaataagttaccggagcaaaagtatagcagtgaagaaagcgggagtaacagatgcagcaggctttattggatcatttaagagttgtaacagaagaagaacagagaatcctggatggggttgcagaggtagataaggacctttatacatctgggaaggatttcacggtggacagtgcgaaaatgctcagtgagggcaaattgatcgctgtacgtacccatacacgatttgtgcattttccatcgcacaggcataattatattgaggtgctttatgtctgccagggacagcttacaaatattataggtggtaaagaagtcgtgatccatgcaggcgaactgttgtttttgaaccagtatacgagacatgagattctgccggcgggggaagaagatattgcgatcaactttatgatccttccggaattttttgatgtggcctatacgatggcggggaataataatgtccttgcagatttcctggttaatgtgctgcgccaagatgaagagcgtggagaatatctgcattttaaggtcgcagaagtgctgcagatccagaatcttctggaaaatatgatctactctcttgtgaccggtaaaggcgatcagaatcggatcaaccagacaacgatgggactgattttcctctatcttctggaatctgtacagtatgcggagatgcgcctgccgaatcagtatgaaaacatgatcacaatgacaacgctggattatatcgaacagcagtataaaacggcgacacttacagaactctgcgaaaaattgcatttgccgatgcatatgctgagtaagatgatccggaaaaatacgggatttaatttcaaagaactgcttcagcgcaaacgtctgaacaaatctgtggaactgatgtgcgagacagatcttccgatcagtgacatcattgcagcggttggctatgagaatggcagttattttcaccgtgtatttaaagaacgctaccatacgacgccgagagcgttccgtgtggcaaatggaaaagaagaacgggtgagattataaaaagggggcattgcagatgtaataataacatggtgtgcgccccgtcaagtagacaattaaaaaaatataggttttttgctaccc

SEQ ID NO: 589 - DNA, 24660 bp, unidentified
  source 1..24660: mol_type = unassigned DNA
caaagacagagactcctgttgtttccaacaacagtgcacatcgctggacaccggatgtgccgatggtagtgccggaaatcaacccggaacattttgatgtgatccagtatcagaagaaacgccttggtactactaagggattcatcgctgttaaaccaaactgctccattcagagctatgcaccggtacttactgcctggaaagaatttgaaccatatgaagtagttgctactacatatcaggcaatttccggagcaggaaagacatttaaagactggccggaaatggaacacaatatcattccatatatcggtggagaagaagaaaagagcgagaaagagccgttgagactgtggggtaagattgaagacggagtgatcgtaccggcaacagaaccagtcatcacatgccagtgcctgcgtgttccggtactgaacggacatacagcagcagtatttgttaaattccgtaaaaaacctacaaaagaacagttgatcgaagctctgagaaacttcaaaggtcttcctcaggaactggaacttccgagtgcaccgaaacagttcatccagtatctggaagaagacaaccgtccgcaggtaagcgaggatgtcaactacgaacacggaatgggcgtatctgttggacgtctccgtgaagacactgtttatgattataagtttgtaggactttctcataataccgtaagaggagctgccggtggtgctgtactctgcgcagaaactctgaaagcaaaaggatatattacaaaaaaataatatgatctgaacagaaactgtccgggcagagagtgaagtctgccagggcagtttttttgcgcttttctgtcaaaaaaagacatggagaaaacggaagatttatgttatcatagatggacaaggttaagacagaaaggaaattgagcaaaatggagaaggtatatcttacaaagctcgcccccaactgtggatgtgcagcgaaagtaggtccgggaacgctggcaggtgtactttgtggactgccgaaatttcaggatccgaatcttcttgttggaacagaaacatctgatgatgcagctgtttacagaatttcggacgaactggcaatgattcagacccttgatttttttacgccggttgcagacgatccatatgattttgggcagatagcagcggcgaatgcattgagtgacgtctatgctatgggtggtgagccgaaaaccgcattgaatattgttgctttcccgaaggatatggatacagcaatccttggtgagattctgaagggcggagcggacaaagtaatggaagcgggagctgtacttgccggtgggcatacgatccaggatgatacaccgaagtatggcctgagcgtaacaggctttgtacatccagagaagttctggaagaattacggagctcagacaggtgacaggctgatccttacaaaaccgcttggaacgggtattgtgaatacggctatcaaagccgatatggtatctgaagaggcgcgggaagcagctttgaaatctatgaagacgctaaacagatatgcccgtgatgtattaaaaagacatactgttcatgcctgtacagatgtgacagggtttggtcttggcggacatggaacggaaatggcagacggtagtaagaagacacttgtgatcgatgcaaaagcacttccgattcttccggatgtagaagaatatgcctctatgggactgattccgggaggtgcatatcacaaccgggaatttgcagcaaaatccggttacataagcacagcagaactctggcgggaggatctggtctttgatccacagacgtctggcggacttcttgcggcggttccggcagatgaagcagaagagatacttctggaattgagtgaatctgctctttcctgtgcgatgatcggtgaagtgactgaccgggaaaatcatgcactggagattcgataactgacagttatcgaaaataaatgaaaatttgttataaaaatatcaaactttgcggtatatatattgagaatttatatcaaaaatgctataatgcaagaatacaatatgtggagggaacaaaagagtttataagatactctgttccttggaaagggaggtattttttatgaatcaagaggatgtacagaaactatcaaatgcagcaaacgcgaagattaccctgctgaaaaatgactttttcaagtatttcatgcgggcgatcatggcagggttctttattgtagttgcaatgatcttttccaatgttgtgggaaatgtgttctcaggggccgaagaaccggcatgggggaaattcctgggggcactcgtgttctcgattgcggtattgctgatttcgctggtaggcggcgagctttttaccggaaataatctggtgatggcatttggagcatttgacaagaagatcagctggggcgatgcggctaaagtatgggtagtcagctatatcggtaactttgttggctgtctgattctttctctgatttttgtatgggcgggagcatccggaacagcagattattttgccggatttatcggaaataaacttgcaattccggcaggtcagatgtttttccgtgcagttttgtgtaacttctttgtatgtcttggggttctttgtggcattaagcttaagagcgaagttgcaaagtttttgatgatcgttatgtgtatttctggatttgttgtcagcggatttgagcactgtgtggcaaatatgggtatctttgtaacagcaggatgtctggtaccgggagtttccattggagcaatggttaagagcatgataatcgtcactttgggaaatatggcaggcggtgcacttcttcttgcatggcctctcagaaagatgagtgcagataaataatatgggtaaatccttatacatagctgagaaaccaagtgttgctcaggaatttgcgaaagcattaaaaattaacggacagagaaaggatggctatctggaatcagaagattctgtagtgacctggtgtgttgggcacctggtcactatgagctatcctgaaaaatatgatatcaagtataaaaggtggagtttggataccctgccttttttaccgcgtgaatttaagtatgaagtgattccgggggtgcagaaacagtttaacattgttaaggggcttctgaaccgtccggatgtagagacgatttatgtgtgtaccgactccgggcgtgagggagaatatatctatcgtctggtggcacagatggcgggtgtgaaagataaagagcagcgtagagtatggatcgattcccagacagaggaagaaatccttagaggaatccgcgaggcaaaagaactgtcagtctatgacaatctggcagattctgcctatttgcgggcaaaggaagattatctgatgggaatcaatttttccagagtcctgactttgcgttatggcaacaatgtttctaattacctgaacagtaaatatcaggcaatctccgtaggcagagtcatgacatgtgtgcttggaatggttgtgcgtcgcgaacgggagatccgatcttttgtgaaaaccccgttttaccgtgtcatttccagtattgcactggaaggagaacactttgatggagaatggagagcagtagaaggaagcagatatttccagtcgccgtacctttataaggagaatggcttcaaagaaaagaaacatgccgaggaactgattcggatgttggagtcggaacaacccttgtcctgccgcgtagaaaaggtggaacgcaaaaaagaaaacaaaaatccgccacttttatttaacttggcagagcttcagaatgtctgctccaaactgttcaagatcagtccggacgagacacttcgtattacacaggaattgtatgagaaaaaactggtgacttatcccagaactgatgccagagtgctgtcgagtgcggttgcaaaagaaatttataaaaatatttcaggactgcgtcgatatctgatgatcgacaatgcagcagatgagattttacagatgggttcttacaaaacaatcgcaaaaaccagatatgtcaatgataaacagattacagatcattatgcgatcatcccgacaggtcagggattaaatgttctgaaaagtctttctcagacatcacagagagtttatgagacgatcgtacgacgtttcctctgtattttctgtccgccggcagtttatcagaaagtcagtctggtgacagagatgcagaaagaaaagttcttttccggtttcaaggtgctgcaggaagaaggatacctgaaatatgcgacgaattcttttgccagaaaatcagcagcagacagatcacaggagcccggcaaagaagacagtgaggaggcatcctgtgacgtgcagcttttgaatgcgttgcagcgactgaaaaagaatgatatactgaccgtagatgctctgaacattaaagagggagaaacgtctccgccgaaacggtataattcaggttctatgattctggcaatggaaaatgcagggcagctgatcgaagatgaggaactgagagcacagatcaagggaagcggaatcggaaccagtgcaacaagagcagagattcttaagaaacttgtttctatcaaatacttgtcattaaataaaaagacacaggtaatcacaccaacgcttcttggagagatgatatttgatgttgtaaactgttcgattcgtcagcttctgaatcctgaactgacagcaagctgggaaaagggccttacatatgtggcagagggaagtattacttcacaggagtacatggacaaactggaacattttgtgcgtgtgcgtaccgctcaggtggaacagagtaattatcagtatgcactgcggcagttttttgacgcagccgctgcgaattataaatcgaagccaatggcttccaaacgaggaggaaaatcataatcatgttaaaagattttacagttgcaaatcttctggatttgaatgaaacaatagctgcagagttgtttgaaggaaagacatatccgtgggaagttctcccggaaatcagtgattttattatgaaacttggtccgacactcaatccgtctgagtatgagtgtaaggatggcaatgtatggatcgcaaaatctgccaaaatagctccaactgcttatatcaatgggccggctattatcggtaaggatgcggaagtccgccattgtgcatttatccgtggaaatgtaattgtgggagaaggagcagttgtcggaaattccacagaactcaaaaatgcagtcctttttaataaagtacaggttccgcattataactatgtaggagatgctgttcttggatacaaatcccacatgggcgcaggttctatctgctccaacgttaagtcagacaagaaactggtcgttgtcaaagatggtgatgagaagatagagacaggactgaagaaatttggtgccatgcttggtgaccatgtagaagttggatgtggctctgtgctgaaccctggaactgtgatcggcagaaatacgaatatatatccgctttcaccggtaagaggctgcattccggcagacagtatctacaaaaacgcagccgagatcatcaaaaagaattaaggcaggccaaaacagtctttaaagaaaaaagagattccggatgatcacaaggactgtgatatgtacgggatagaataaataaaagaaatacttcgcggcttttcctcggataaagccgcgttttccattgtacatattaatggaaataaaggcaaaacaggctttccattcataactcagccagcagcttccaacgatcgcctgggatactttctcatttcggagaagatacatcagaacgagaaagatgaaaccacgccatccgtaatctgcatgcagcaggatagagataccgaggagagcaagcagagagaaaagctgcatccacggtgtttcccagaagtattcaagagcacagaaggcaagatatccaagaaagagagtaaaaaaaacattctgtttatcagcataatgccaggtgtttgcaaacataaaattccacggagtttcggaaattagcgcaaacagcagcagattccggccatattttctgcggtcatgcgtatgaaggaatccttcgacgatcaggaaacagaaaataggaaaagcacatcgtccgatatcgcggacaatacgatagaaagtaattccttttccattgatataaaagagctccgtgagcgccggcggatagtggctgagtatgattgcacctgtatgatcgatcagcatggcaatacaggcaagcagtttcagcatgctgccacttagaatctgaaagcgtgccggaaaaatgcttggagggagtttgtcagacatagaattttctccttgttttttaatgaattttatcacatttatacaagaacggcaattatatgatatctatatacaaaagttcgtattttttgacataagtttgactggactaacggtagtgatttgtgagaaaatacattcaggttgttagtctatcttttaacaacatcataagtaaatctatacttgaaaggagttttaacatgatttattcacgcgaagtagaagaaatgtgcccagttgcacagggtgtccatcacggcgccgctccaatcccggaagaagcaaaatgggttcaggctaaggaagtgaaggacatttccggtttcacacatggtgtaggctggtgtgctcctcagcagggtgcctgtaagctgtccctgaacgtaaaagaaggtatcatccaggaagcactggttgagacaatcggatgctcaggtatgactcattccgcagctatggcatctgagattcttccaggactgactgttatggaagctctgaatacagaccttgtttgtgatgctatcaacacagctatgagagaacttttccttcagatcgtatacggacgttcccagtctgcattctctgaagacggacttgcagtaggtgctggtctggaagaccttggtaaaggacttcgttctcaggttggtacaatgtacggaacacttaaaaaaggtcctcgttacctggaaatggcagaaggctatgttacaggtatcgctcttgacgaagataatgaaattatcggttatcagttcgtaagccttggcaaaatgactgacttcatcaaaaaaggtgatgacccgaacacagcatgggaaaaagcaaaaggtcagtacggccgtgttgcagatgctgttaagatcatcgacccacgtaaagaataattataccgattataatttcaggaggataagtaaatggctttatttgaatcatatgagagacgaattgacaaaatcaattcagttttaaacagctatggaatcgcttctatcgaagaagcagagaaaatcactaaagatgcaggccttgacgtatacaatcagatcaaaggcattcagccaatctgcttcgagaacgcttgctgggcatacatcgtaggtgcagctatcgcaatcaaaaaagactgcagaagagcagctgacgcagcagcagctatcggtgaaggacttcaggctttctgtattcctggctccgttgctgatacacgtaaagtaggtcttggacatggtaaccttggtaaaatgcttctggaagaagaaacagactgcttctgcttcctggctggacatgagtccttcgcagcagctgagggtgctatcggtatcgcagaaaaagcaaacaaagttcgtaaaaaacctcttcgtgttatcctgaacggtcttggaaaagacgctgctcagatcatctcccgtatcaacggatttacatatgtagagacagagtatgatccatacaagaacgaagttaaagaagtattccgtaaatcttattctgaaggacttcgtgcaaaagttaactgctacggcgctaacagcgttccggaaggtgttgctatcatgtggaaagaaggcgttgacgtttctatcacaggtaactccacaaacccgactcgtttccagcatccggttgcaggtacttacaagaaagaatgcaacgaaaaaggaaagaaatacttctccgttgcatccggtggtggtacaggacgtacacttcatccagacaacatggcagcaggtcctgcttcctacggtatgaccgatacacttggacgtatgcattctgacgctcagttcgcaggatcttcttctgtaccggctcacgtagaaatgatgggtctgatcggcgctggtaacaacccgatggttggtatgacagttgctgtagcagtagccgtacaggaagctgctgacgctggaaagttctaatatttgtatagaatattaaacgtttatagcaaaaaatcccctccacgtaagtggaagggatttttttatctctaatctctctggaaaagatctcgggtatatactttatcttttacatcatccaggatctgactgtaacggtttgcgatgatacagtcgctcagatttttaaatttatcaagatcattgacaactttgcttccaaagaaggtagatccgtccttcagggttggttcatagatgatcacggaagcacccttggctttgattcgcttcatgactccctgaatagaagactgacggaagttgtcagagttggatttcatagtcagacgataaacacctacagtgactgatttttccatggaagaattgtaagtattttcttcatcataaccgtaataaccggctttctgtaatacacggtctgcaatgaaatctttacgcgtacgattactttcaacgatcgcactcatcatattctgtggaacatcgttatagttggcgagaagctgcttggtatcttttggaagacagtatccaccgtaaccgaaggaaggattgttgtaatgtgttccaatgcgaggatccaggcagacaccctgaataatgttctgcgtattcagacctttcatttcagcgtaagtatccagctcgttaaagtaggaaacacgaagtgcaaggtaggtgtttgcaaacagttttacagcctctgcttcagtaaatcccataaataatgtatcaatgttttctttcagagcaccttcctggagaagagctgcaaaattgtgggacgcctgtaccagtttcggatcatccggatctgtagcaacgataatgcggcttggatacaggttatcgtacagtgctttggattcacgaagaaattccggactgaagatgatatttgctgtattgtatttctttctgacagattctgtatagccgaccggaatcgtggatttgatgaccatgatcgcatgtggatttactttgaggacaagttcgatcacagcttcaacggcagatgtatcaaaataatttttctgactgtcgtagtttgtcggtgccgcaatgactacatagtcagcatttgtgtaagcagcttcgccatccagtgtagctgtcaggtcaagctctttttctgcaagatatttttcgatatatttgtcctgaatcggagatttgcgtttgttgatcagatcaactttctcaggaatgatatcaacagcagtaacatgattgtgctgtgcaagtaatgttgcaatggaaagaccgacataacctgtgcctgcgacagcaatgttcaaaggagaaggagatggcaaccgggaagcagactgttcagtaaatacttcatccggatcaaatccaaggcattctccaagactttccagttgtggaattgatggaataaaatcttttttctccagacgggataacagagaacgattgatgccggtagcatcagccagctcctgttgagtcatggatttttcttttcgcttgccggaaacaagttcggcaagtcgtgtcatagataattttttcattgagaatctttttacctttcataaaatgttattttaaataacaacatatagcatataaattaattctgtttaattgaatgctaccatattggcaaaaagattgcaatacaaagaaaacaggaaaataagaaaaatattttgaacgttattttaaataacaaatcttccgaatccttcgaagcacagaatgtgtatgatttttcagttttgatacaggagtggcttcttcaaatgtaagcatctgcgaagaaagtgtagcataataggattttttgttcagaagaagcttttgctgtccatatgcaagaggaaattccgacatacggtgtaaactgtgataacagatcgtatgcccatcgcaatcccagcaaaattcgatatgtgtaataccagaaaacatttcgtatggaatgactgctgtaaatttcaggaatacagcaagtttctgtccattaaaacgaaaaacgtgttccggatcttcgcggaaacagcattttaccatatgtgtagtatgaccggttgtgattcgaagaaacagattggctggatatggaaaacgcagatagatcttagctgcaccctccagcaggatatcatgtttcataagttccatggaagtcagacgaagctgataagatgaagcgtgaccggtactcagatcgggatattgaaaccaggcatcttcgctcttgtcgtcaaactgcaaagttccggaatccggtgctttttttatgctcatgatatagtccttcagttccatggatagatttttctgctcaagaatgatgtggtcgtcaatctgaaaaacagcatcgaacagcattttcaaaaaaatagttttttcatgaggcgtcaatacggtttctggaatttcatcaactttgaagcgtccctgcagatcgtacatgacattgtactgtacataatccggaatggctccgaaacgggatttcgcctcatccaatgcccagaatatgtagttcttgaggcagtcaatgtaccattctctgtgcgatttggaaccgttcagggcagaattcatggatgtacgggcacgatacaggtagcgcccctgtgggacaatgccatattggggattctctaaaagtagttccatgatcgccttggaatcttctgcataacgaagagaggtatcgaatgtatgatcgttcagaacttcttttttgaaaaaagcagatgctgatgacatctgtacataagaataatgcgtggtcagatcaatgacctgcgctttgttggaagcatatttgtaattcaggcgatgtggttcgtttttttgttcgaagtaaaaaataggaacagaaacaagatccacctctttatcatgctcaataaaaaagtcatagacggaagaaagtgtatcaggagtcagtttatcgtcagaatccatgaaattaacgtatcttccacgggccacagcgatacctgcatttcgtgcgctggcaacgccaccgttgggtttgtgtattacgacgatgttttccggatatttatgctgatattcatcacagatagctccggaagtatcggtggatccgtcatcgacaagaataagctccacggattcgagaaaacctatatcctgtgaaaggatactgtcaattgcctcggaaaggtaaggcgctacattatagacagctgttacaatggaaaatttaaaaaggtaattggtatttgtcggtttcaacacaatcttctccttcatttcataataaaattatcctatcacaaaattgctgtccggtgtaaaaattatgggtttgtgacagaaaattaatatttggggcagctattcgacagaggattgaaaaaatatcatggaaaatgattgcaattaaatagtaaacaaagtatgctataaatattgaaaaaacgaaatggtgtatgagattaggattatgaaaaaaattacggtaattatttctgcaggtgatacagataaatatatggaagaaacgctggattcactttcagcgcagtcaatcgtaaatgatatcgagataatcgatcagacaaagcccggccagataacacgtggggatgaagtattaaataaagcagaggggaaatatctgtattttatgaatagtggggatttgctcacttcatttgctttggaagagttgtggaatatatgtgagacgaaacatctggatattctgctgttttccggggcagttttttatgaaaatacaaaactcgcgaaacgatataaaaatctttcagatgaattttacagatgcggctcttacgcgcaggtaataacagggaaagaaatgcgaaatcagctgaaaaagaataaggatatattaccgcccgtatccatgcagattttgaaaaaagatttacttatcggggaaaaaacggactttcataatagaatagatacagatagatgctttacaaaacgtattctgttgaaggctgaaagagttttttgcgtaaatgatatttatctttataagagaataacagaaccatccggtgtgggcaaaatgctgcaggtattaacgacaccggggtatttggtgaaaaagatattcaggtatatgagaaaaaacggaataaaatgtacaggcatagcaatcattcgaaagcttcgtgcaagataatgacagatcaggaggaatggaagatggcaaaagtatccatactaatgccggcatgcaatgttgaaaaatttttaaaagaatgcatggacagtgtagtaaatcagactttaaaggacatagagattatttgtatagatgatggatccagagattcaacagggaatattctggatgaatatgcgcagaaagacaatcgtatcaaagtgatccataaagcgaattcggggtacggacatagtatgaatgttggacttcaaaatgcgacaggagaatatataggcattattgaaacggatgattttgcagatcttaatatgtttgatgaattatataaagcagcaaaagaaaatcatgcagatgttgtgaaatcaaactattattcttatgtatcgcagccggaacctcagagcacatattatgaagtgctaaaagaatatgatctgtatgatcgggtgttcagaccggtggaacatccggaaatctttcgtgtgagaccatgtatctggagcgggatttatcggagagaatggctgttggaaaatcatgtatcttttgcggaaacaccgggtgcttcctatcaggatacagggtttgcgtttaaagtatgggcaagtgcggaaagagcattgctggttcgtgatgcctaccttcattatcgcacagataatgcaaattcatcggtaaaagcggctgccaaaatatattgtatctgtgatgaatttaaatctattgaagaatttcttgaaaaacgaccggagctaaaagaagaactggagaaaccggttatatctttgaaatatatatcttatcggtggaatctgttcagacttacaatggaattcaaatatgcttttttggagaggatgcataaagaactttcagaggcgaagaacaggggactttttgacaaaaaatattttacggaaaaagaatggacagatatcaatcgattagtagatgatatggatgctttttttgatgaaacatttcgaaaagaactactcaggtttggaaacgaagcagaactggcgaaggcattgaaaaaaagcgaaaacaaggtgacaaagcttcagaaaaaaatagatgacatggaaaattcttcatctttaaaaattggaagagcaattacctttgttccgcgaaagctgaaaaaaatgttgcattaatcaaaggggaatagatatgagtaatgatatacctgcggtttcggtgataattccggtatacaatgcggcagaattcttaaaagacggattaaacagcctgctgaagcagactctgagagagattgaaattatctgtgtggatgatgggtcaacagatggatcactggtaattctgaaagaattcgaaaaagcagatgccaggatcagagtcattcatcaggaaaatcagggagcaggagcagccagaaataatggaatggatgttgcaagaggaaaatacctggcttttctggatgcagatgatttctttgagaaaaatatgctgaaagccgcatatgacagagcggaagaaacagaggcagaagtatgtgtgtttaatgcagacctctatgatcatacagagaaagtatacaaaaaatgcacatgggcatttcggaagcagtattttccggaaaaagagccgtttgcagcaactgatgaaaatgtaagaaataatatttttagaatgtttaatggctggccatgggataaattataccagagggagtatgtcaggagattgggaatcaagtatcagaatcttcgaacaacaaatgatatgctctttgtttttattgcgcttgcctgtgcttccagaatttctacagtagatgaggtcttgatccatcagagagtcaatgtcagaacatctctgtcgcgtacaagagagaaatcatgggattgtttctatattgcgcttttggctatgcaaaaggagctaaaagacagaggtttatacgataccttagaaagggcatttgttaattgggcgcttaatttttcactgtggcagttaaatacaatgacaggaagtgcatatgaaaagacatacagactgctcaaaagaaagggttttgactgccttgatatcagccgtcataacagaagatatttttacagtaacaaagaatatgataaattcctgaaaatctatacaacaccttatgagaagagttctggttattaaaaggtaaaataatttatttccagagataaacagaaatctcagattacagaagtccatttttctttgtaatataataagaatcagaatatgtgcataaattgacaatacagcagataagaggaaagagattatggcagacaaatttaagctcagcagaaaagtaaagaaaatcatattgggcgcatgtatcggaggtgtggttgttcttacggcggggctttttacttacatacatattgcagataccaatacacttggaagaaaaatatctatttacgggatggatgtttccacgctgacggcagataaggcagaacagaagcttctggatgcttttcgcagccgtaaggtacagttcaaagaaggtggctcggatgtctatcagacaacggtgagtgaacttggatatgatctggatgagtcagcacttaaaagtgagcttacagaattgcagacaacgcgggaagcaaacagaaagatctttgccacgcaggaagattacaagatcgcatatcagatccagaaggatgaagaacaggaaaagaaagctcttgcgtcttctaattttggaggtaaagagcgtacggcatccgtggatgcagcggttcagtatgacgaacagcagaagcagtttgttctggtcaatgatgtgcagggaaataaaattgatgagaccagacttcaaagctatgtagatcagatgctggatgataattttcggctgaagcttcttggtggggatattcagatcacattggatacaaatgtttatcagcagccttctgtaacggtttctgatgaaatgcagaataaagttacaggactgaatgatcagttgaataaatatcgcagtactacagttacatatacattgggaagtacgacggaagtaattgatgcaggaacaatcgagacatggctgcagattacagatgacagtctgaatattgatcaggaagcagtgaagtcttatgtacagaatcttgcagcgaagtataataccatctatgttccacgtacattccacacatcctatggaaatgatgtcacggtatccgataatgaatatggatttcagatcgatcaggatggagaagtgcagcagttgctgacagatcttgcgagtggtactgcagttacacgagatccggtatacagcatcagtggtatgcagcgtaacggtgcagatgatctgaacggaagctatatagaagtaagtctggataaccagcatctgtggctgtacaaagatggagcacttgtgacagaaacagatatcgtcagtggagcaccaaaagccggcagggagacatacagaggagcatggccgattgcctacaaggcaagtccatataacctgagcagtcaggaatatggatacaacgtaaaagtaaattattggatgccatttgtatatgggcaggggcttcatgatgcatcctggcagtcttctttcggaggaaaccgatataaaagtggcgccggaagtcatggctgtatcaaccttccgacagatcaggcagcactgatctataatacgattgacggcggatatccgatcattatttattaaaaagatacataaaatgcaaaagaccagtccgaaagtgggctggtttttttgtgcagaaatattttaaaaggtattccggataaatgaggaatgtaagattaattaaaaggtgtttcattgacatttttttggcaaaataatataataaaatggcatatgtgaaggaggaagttatggcacataaaacaggactggaagattattatgtaattaaaaatcaaaagaaacttcatttcggctatacgaccggatcctgtgcggcgggagctgcaaaaggtgccacggaaatgcttctcggaggtcagaaacagaacgagacagatcttatgacaccaaagggaattcttctccatctggaattgcatgacgtctgtatggaaaaagatacagtgatctgcgcagtacgtaaagatgcgggggatgatccggatacgacgaatggaattctggtctatgccagagtggaaaaatgtccgaaatcctctgagattacggtcgatggagggaaaggtgtcggaagagtgacgcgtccgggactttcacagaaagtgggagaagcagcaatcaatcctgtgccaaaggccatgatcctgaaagcagtggaggatgcagcagatcgataccactatgagggtggcctgaaagtaacgatttctgttccagaaggtgaacagatcgcgaaaaagacttttaatccccgtctgggaatccagggtggcatctctattcttggaacgtccggtatcgtagaacctatgagtgagaaagccttgattcagagtattcaggtagaaatgaaacagcatttttcacagggggaacagtatctgatcgtgactccgggaaattatggggcagattacctcagggagcatatggatcttccttttgaaaaaaacatcaagtgcagtaattatgtaggtgaaaccattgatatggcagtgaacatgggagtaaaggggattctttttatttcgcatattggcaaatttgtcaaagttgctgccggaatcatgaatacacattcacacagcgcagacggacgtatggaggttctgtgtgcggcagcaatacgctccggagcagatctggaatgtgccagagagattctggcatgcaacacgacggatgaggccctgcatgtgcttgatcgttatcatattttacagaaagcgatggaggatgtgacccgacatatccagttttatctggatcatcgttcttatcagcagatccttctgggtgcagtgatcttttccaatgaatttggatatcttggccagacagagcatgcagaagaactgatccgtaaaataaattcagctgagagtaaatgacaaattaaacaattatatataaaaaaggagaataaaaacatggtacattttgttggagcaggaccgggatcaccggatcttatcacagtcagaggtaaacagtatctggaggaggcagatgtgatcatctatgcaggttcgctggtaaatccgcagctgctggaatacagcaaggatgtttgtacgattcataacagtgcgaagatgacactggaagaagtcatctccgttatggagagagcagaaacagaagggaagatgactgtgcgtcttcatacaggtgatccttgtatttacggtgcaatccgtgagcagatggatcttctggatgagaagggcattatgtatgactattgtcctggtgtcagtgcgttctgcggtgcggcaagtgccctgaatctggaatatactctgccggatatctcacagagtgtgatcatcacaagaatggaaggccgtacaccggttccatccaaagaaagcattcagtcatttgcagctcatcaggcaacgatggtcgttttcttaagcaccggtatgctggaagaactcagccgcagactgatcgaaggcggatatacagctgatacgccggcggcaattgtatacaaggcaacctggccggatgagaagaaatttgtctgcacagtaggcacgcttgcacagactgctgcagaaaacaatatcacaaagactgcactgatgatcatcggggattctgtaaaagcagctcactatgatcgctcaaaactgtatgatccgggattcactaccgaattccgtgaagcaacagagtgagaacgcgcagtaaataatccgatctaaatggagaattaaataatgcgtatttcaatcatttgtttcagtcttacaggatatatgactgcggaagacctgcaaaaagaccttcagggcaaaggttatacggcagaaatttataagaaaagtaaatatctcgatgattcgattgcggaaagtacaggaatctgggcaggccgccattttgagacagatgatgcgattatttttgtcggagcctgtggaatcgcggtgcgcagcattgcaccttacgtagcaagtaagaagtctgatccggcggtactggtgatcgatgaatgtggaaagtttgtgatatctctgttatcaggacatcttggcggtgcgaatgaactgactctggaagttgcggagcttctgggtgcagttccagtcgtaacgacagcgacagatcttcatcatcgctttgcagtggatgtctttgcaaaaaagaattgctgtggaattcagaatatgaaagcggcaaaggcggtttcagcagccttgcttgcgggagaacctgttggattttacagtgaatttccatggacaggaaagttgccggaaggcctggaagagccttcggaagacacgcaggataaaccggagattggaattgcagtaaccattcatccaacctgtaagccgtttacatccacggtgcagatcattcccagggtggtgacactgggaatgggctgccgcaggaataaagaagcggatgtaattgaaaaagaagctagtgtctgtctggcggacgcggatatatacagccaggcagtagagaagctgacaagcatttccatcaaaaaagacgaagtggggcttcaaaaacttgcagaagactggagaatcccgtttatcacatttgaggaagaagagctgagtcatgcagagggggaatttaccccttccgaatttgtaaaaaagatcacaggcgtgaataatgtctgtgaacgaagtgcagtcctgggtgcggagcagggccgcctgattaaaaataagacagggagaaatggcgtgacaaccgcgcttgcactccggaactgggaggttcattttgaataaaatatatgtagttggaatcggaccgggaggctgtgatcagatgaccggtattgcaatgaatgctttgaaagacagtgatacgatcattggatatacggtatatgtggatcttgtcaaagatacatttccagataaagaatatctgaccacaccaatgaaaaaagaagtggacagatgtgtgctggcttttgaagaggctatgaaaggcaaaagggtttccatgatctgcagcggtgatgccggagtctatggtatggccggactgatgtatgaagtaggagaaaaatatccggaagtagaactggaaatcgttccgggagtaacagccgcacttggcggagcggcagtccttggtgcaccgctgatccatgatttctgcctgatcagcttaagtgatcttctgactccatgggaaaagattgaagcaagacttcttggtgcatctcaggcggattttgtaatctgtctctataacccctccagtaaaaaacgccatgattatttacagaaagcctgcgatctgatgatgcagtacaaatctccggaaacagtttgcggaacagtatgcaatatcggaagagaaggggaagaatatcaggttatgacattgaaagaactgcgagatagacaggttgatatgttcaccacagtatttatcggaaattcccagacaaaagaaataaatggcaaaatggtaactccaagaggatatcggaatgtataaagcaattgtttttgctggtactacagaaggttatgaaatcagccggtttctgagtgaaaataaagtatctgtacttgcctgtgtcgcgacggaatatggatccagatctcttgaagaaaatgaatttttatcgattcgtgcagaacgccttgacaaagaacagatgcaggagctttttgcagcagaaagaccggaactggttttggatgcaacacatccatatgcggcagaagtgacagtaaatatccgtgaggcctgtgaaaacacagcagtttcttatgtgagagtccttcgtgaaggaggcgttcacaaagatgcagtttatgtagaaaatacagaggcagcagtagattatctgaaacatgcatcgggaaatgttctgcttacgacgggcagtaaggaactttctgcttatacagaaattccgggttatcaggaaagaatgtttgcaagagtcctttccattcagaatgtgatcgaaacctgtcgcatgctgggattcgagggcaaaaatctgattgccatgcagggccctttttcgaaagaattgaatgctgccatgctgcgtcagtatgactgcagatatctggtaacaaaagattccggaaaagcaggcggatttgaagaaaagattcaggctgccacagaatgtggcgcaattcctgtgatcattggccgtccggtgcaggaaaagggaatttctgtaaaagaatgcaaacgtatgctgccagagaaatttggattccagccgacaccacatgtagttctcctgggaattggaatgggaagcaaggaaacattgacgattcagggcaatgaggcagtggaacaggcggatctgatcataggcgccagaaggatggcagatgcagtggcacttccgggacaggatgtcttttatgaatacagaagtgctgagattgcagagtatattaagaaacatccggaatatgaaaaagttgtgatcgcactatccggtgatgtcggtttttacagtggggcaaaaggacttttgaaagctttggacggaaatgccgaaatcatctgcggtatatcctctgttgtttattttatgtcaaaaattggtctttcatgggatgatgcaaagattgtcagtgcacatggaagagtatgcaatctggtatccctgattcgaacaaatcagaaggtttttgcaattcttggcacttcagatggaaccgcacatcttgcacagaaactgacggattatggaatgggtgaagtgcagctttatgtcggggagaatctgtcttatgaggatgagaaaatatttgtaaaacaggcgatggaacttacagattacagaggagatgccttgagtgtgatctgtgcctggaatccggatgcaaaaacagcattgaccacacatggacttccagatgatgcatttacccgtggaaaagcaccgatgaccaagacagaggtacgaacagtttcgctggcaaagttatgtcttaaagaggattcggtctgctatgatatcggggccggaactggttctgtatctgtggagatgggacttcgtgcaagtcagggaagcgtatattccattgagaaaaaagaggatgcacttgtgcttctcgaggaaaataaaaagaaatttgcgttagatcatatgaggatcatagcaggaacggcccctgaagcaatggaagaacttccggctcctacccatgcttttattggtggatcttccggaaatatgaaagaaattgtggaacttcttcttgaaaaaaatccacaggttcgtatggtcataaattgtattacacttgaaacggtcggagaaactttgtcctgcataaaggaaatgcagacagaacgcagcgagtggaagtgggagagtgaagttgtgcagcttggtgtgtccagatccaaagaaatcggcagatatcatatgatgatgggagaaaatcctatttatattattaccatacaggcgcataaaaaggagaattttgtatgaaagcggcaagaattctcctggcagcaggagccagtggaagcggaaaaacgctgatcacatgtggacttttgcaggcactggtgaatcgtggtctgaaaacagcatcttttaaatgtgggccggactatattgatccgatgttccatagtcgtgtcataggcgcaaaatcaagaaatctggataccttttttacagacagtgaaactacaaaatatctcttctgtgaaaatgcggtggactgtgatatttctgttatggaaggagtaatgggattttatgacggtgttgcagggacaacaacgaaagcaagtgcttacgatctggcgtctgttacagatacgcctgtgattctgatcgtaaacagcagaggtatgagtgtttctcttgcagcatatgtgaaaggctttatggaatacaggaaggacagtcatatacagggtgtgatctttaatcagatgtcaccaatgctctatccacgaatgaaagaacttctggagaaagaactgaatataaaagttcttggatatgttcccaaaatggatgattgtgtgatcgagagccgacatctggggttagtgcttccggatgagatccctgagttaaaagaaaaccttcaccgactggctgaggttctggaaaaaactctggatattgatggaatcctgcagcttgcagaaagtgcacgagaattatctgcgaaagaacctcggatagatttctgtctgaaacatccccttcggattggtgtggcggacgatgaagcattttgctttttctatgaagataatttccggcttttgcgaaagatgggggcagagcttgtacacttttctccgatcagagataagaaattaccggctggactggatggattgcttttatatggaggttatccggaattaaatggaaaagaactggaaaaaaatacatctatgagagaagaaatacaaaaagcacttagcggtggtatgccatgtatggcagaatgcggaggctttatgtatcttcatgaagaaatggaagcaatggataaaaaattttaccacatggcaggcgtgcttccgggcagggcatatcgtacaccacgtctgaatcgctttggctatgtgacattaatacagaatcattcagttttgggatgtgagacattaggagagatccctgctcatgaatttcattattttgattctgaaaactgcgggaaagcatttcatgcagcaaaaccggaaagtatgagaaactgggagtgtattcatggcacagaaactatgctggctggatttccacatctttattattatggaaatccaaaagttgcagaggcttttcttaaagaatgcatgaaataccacagcagacggggagagtgacggagttgatatatacataccatacaattgccctggcagcagggtttatcttagatttgatatttggagatcccagatggttgtaccatccggtgtgcctgatcgggaagctgatctccagttttgagaagggaatcagaaaagtatttcccaaaacagaaaaaggtgaactggctggaggactggttgaagtaatactgatctgtgtcatcacattactggttccggcatttgttttgtattttttgtatattcatcttccggccttaggtgtgcttttggaaaccttttggtgctatcagctgcttgctaccagatcattgcgtgatgagagcatgaaggtttatgatgcactcaaaaagggaacaattgaggatgcacgtcatgcggtttctatgatcgtgggacgtgatacggcggagctgacggaagagggtgtgaccaaagcagcggtggagactgtggcagaaaatacttctgatggtgtgatcgcaccgatgatctatatggcaatcggtggtgtacctttaatgtttttgtataagggaatcaataccatggattccatgctcgggtataaaaatgataaatatctgtattttggaagatgtgcggcgaaactggatgatgcagccaattatcttccatccagaatttccggctggctgatggttgccggagcttttgtgatcggacttgacagcagaaacgcatcccgtattttcaaaagggacagcagaaatcatgcgagtccgaattcggcacagacagaagctgtaatggctggtgcactggatgtacagctcgcgggaaatgcatattattttggaaaattatatgagaaacctacaattggagacgcgattcgggaaatagagacagaagatattcgttatgcgaaccgcctgatgtatgcaacggcgattctgggtgtgatcatctgtgttttgttccgcgttgtgtttctgtaacgggacacaaaaaggagaaaaagaatgacgaagcacgtacatggcggtaatatctatacttataagaactgtctggatttttcggcaaactgtaatccactgggaacgccggaaagtgtaaagcaggcggtacgtgacagtcttgaatatatga

SEQ ID NO: 590 - DNA, 6813 bp, unidentified
  source 1..6813: mol_type = unassigned DNA
atgcgtattattttctgtctgatggttttcttgttcataggaaagaacacgatgctggcacagcagctgtcctcattcgtagaatatggagcagccctgcataccggtgacaatactcctctttggcaggtcagcaaccagcaaggactcacttcgctcgacaacaatacttacatacgtggaggaatatcctacaaacaccaacttggaaaatggaagtttgaagaagcactggatttggttgcagcagccggattcagcacgacctccttcattgtacagcaggcttacgtagacatccgttacaagtggtttggattctttgccggaagccgggaacagaattctccattgctgaatcaagagctgagcagtggcggcatgacctggtcgggtaatgcgcgtcccatcccacaagtacagataggcatacccgagtatgtacagttgctgccccgtttaggcctgaaaggagaaatctcgtacggatggtttacagacaacaaataccagcgggagcaagtcggagaaaaatactggtacaccaagagtatcaaataccatcataaagaagggttcctgcgtatcggcatacccaaaggaaaatggcaactggaactcggaatgaccctcgacacccaattcggaggatacaagattggaggttccgaatcgggagacttgggcaacggatggaaggattacgtacgcgtattcttccccggccacgggcgtgaggacggaccggtaggtgaacatctggctttccaaggcaattttctgggtagcgaatatatcaaaatgacttatcgtcctaaggaagatttctccatcagcgcctatctggacaatcattttgatgacttctccgccatggccaaactcaacggttgggatggcttatggggtgtggaatataaatccaaccatagacaagccatcaacggaatcgttatcgaatatctccagactaccaatatgagcggtccactgcacggtttgcaaaattctgtagtaggtaagaccggaggagccgacaactactacaacaacggttactacccaggatgggcacattggggtatggcgatagccaatccgttgatagcatcgcctatctataataaggatggcgatatgagtttcaagtacaatcgcgttaaggccctgcatctgggatggagcggcgacatcagcagtgagtggagatatgtggcaaaattgtcccacaacagaacttggggaactcctcatcgtccaatacccgatatattagaaaatttttctacttttgcatcgttttactatattccccgtaaatggaagggctggtgcttcaacgcgtcccttacattggatatgggagagatatatggagacaattttggattccaactgaaagtacataaaacattttaagaaaatgaactacatacaaacagagattgacggcgtatggctgattgagccgaaagtattccatgatgcccgcggatactttatggaagcatttaaggaagaagagttccgtgcacatgtcggaaacgttcacttcatccaggacaatgagtccaaatcctctttcggtgtattacgtggtcttcattaccagaagggtgattgcagccaggccaaactggtacgtgtcattaagggaaaagtgctggacgtggctgtcgacttaagaaaatcttctcccactttcggaaagtatgtcagtgtggagctaagtgaggagaacaaaagacaattcttcattccgcgtggttttgcccacggttttctggtgctgagcgatgaagctgtctttacatacaaggtagacaacgtatacgcaccacaatccgaggcatccatccgttttgacgacgaaaccatcggtattgaatggcccgttgctacggaacagcttctattatcagataaagacggacatgccgtatcgttcaaggatgcggtctattatgaataaaatatgaaaatagccattgtcggtacaggatacgtcggtttggtaaccggaacctgctttgcggaaatcggtgtcaacgttatttgcgtagacacgaacagtgaaaagatagagtcactgaaaaagggtgttattcctatctatgaaaatggactggaagaaatggttagccggaatgtgaaagcaggacgcctgcaattcaccacgtctctggagagttgtctgaatgaggtggaagtggtattcagtgccgtaggtacaccacccgatgaggatggaagtgccgacttgagccatgtgctggaagttgcccgcaccattggacgcaatatgcagaaatatgtgttggtggtaaccaaaagtaccgttcccgtaggtactgccagaaaagtgcgggctaccattcaagaagaacttgataagagagggatgaacattgacttcgatgtcgcttcgaatcccgagtttctgaaagaaggtaatgctatcaacgattttatgagtcccgaccgtgtagtggtgggagtagagtccgaacgagccaagaagataatgagcaagctctacaaaccattcctgctgaacaacttccgtgtcatctttatggacatcccttctgcagaaatgacaaagtatgcagctaactccatgcttgccacccgcatcagcttcatgaacgacattgccaatttgtgcgaattagtgggagcggatgtaaacatggtgcgcagtggtatcggttcggatacccgtatcggacgcaagttcctctatccggggataggttacggcggttcatgcttccctaaggatgtaaaggcactgattaaaacggctgaactgagcggctacaagatgcgtgtactccatgcagtagaggaggtgaacgagaaacagaagagtatcttattcgaaaagttgcagaagcatttcaacaatgatttggagggaaagaccattgccatttgggggctggcctttaaacccgaaacagatgacatgcgtgaagccccggctctggtattgattgacgagttgctgaaggccggttgtaaagtacgtgcctacgacccggctgccatgaacgaatgccgacgccgcataggagaaagtatttattatgcgacagatatgtatgatgctgcgctggatgcagatgcactgatgctggtgaccgaatggaaagaattccgcctgccttcatgggcagtcatcaagaaaactatggagcagccgttggtattggacggacgtaacatttatgacaagaaagatatggaagaacaaggtttcacatatcattgcatcggaaaataaagttgcagaaaaaagaaaagaaataaatagggacgttatgacaataaaaggaagtgcgattctcattgtacttgttgtctcattggcctcatgcagcaacagacaaacaggagaggtttccgtaaaggaagacctcattgcaaaacaactgttacaaggcatctgggtgaacgatgaaacagaaatgccgttgatgcgcatcgaaggggatacggtatattatgccaacccgcaaagcgctcccgtacctttcaaggttgttcacgatacaatctacatatacagcaatgaaccggtggcctataagatagaccgtcaaacggaatacagcttctggttccactcgctggccgacgaagtaattaaactgcataaatcagagaatgcggaagattctttggttttcaccagtcgagaagtggaggtcatttctactactccggaagtgataaagaaagacagtatcgtaacatacaagaatacaagatataggggatatgtatatatcaacccctcaaagatgaaggttttcaagacttcctattctgaaaatggaatcagtgtggacaatgtgtattatgataatgtaatccacatctgtgtatacgaagggaagaagatgctttacggccaggacatcaccaaaaagatgtttgcggatatattccctgccgaaatactgaatcaggccattcttgccaatatgaacttcatgggtgtggacagtaaggggtaccattaccaggcaacccttggcatacccgaaagctccgtatacagtctggtaaatatgattattggttttgactgtacaatgagcatagaaaaagcggaataaatccgctttttctatgtcttttcttcaccacaccacagtgtttatttcttctcaccgccattctgtggccgtttggcactgggctttccgcctttattgttgttacggccattcttatttcctcctggcctacgtccgtttccatggccgccccgtcttcctccgtcaaatgctctcggcttgtattctggtgcttcacccagctcttcgggaaccggtatcttatagatatccctatccaggaatttttcgatatttttaaagttaccctgctccttttcggaaacgaaggtgatggctacgccgtcattattggcacgcgccgtacgtccgatgcggtgcacataatcttcactgtcgtggggaacgtcgtagtttatcaccagacggatgtcatcgatatcaatacctctcgcaacgatatctgtggctaccaggatattgatacgtcctgccttgaactcatacatcacttcttcgcgctgtgcctgctccaagtcggagtgcatttcaccaacgttcagtttcatctgcttcaaagctttggtcacttccttcactttcagtttggaagaagcaaagatgataacgcgttccggcgtctcctctgcaaagaggctacggatgatgcccagcttctgattctcgtagcagacgtaggctgcctgcacaatcttttctgccggtttggaaacagccagcttcacctcggcaggattgttcagaatgttaccagccaactgttgtatcttagcaggcatggtggcagagaacatgattgtctgccgctctttaggaaggaatttgacaatttgcataatatcgtcataaaatcccatgtccagcatccggtctgcttcatccaaaataaaataagagacacgggaaagatctacataaccaaggctaagatgggctatcaaacgccccggggtagcaataacgacatcagcacccagtgtcaaccctcttttctgctgctcgaacagtattccgtcattaccgccatacacagccacgctggaaaccggcatgaaataagagaaaccttccatctgttggtctatctgttgcgccaactcgcgggtaggagccatgacaatgcaattgatggcatcggcagggtgtccgccctctgaaagcttgttcaatataggcaacaaatatgcggctgtttttcccgttccggtttgtgccactgctattaaatctcgaccttcgagtatgacgggaattgatttttcttgtatgggggtgcactcttcaaagcgcatggcatccagtgcctccagcacatcgccatttaaatgtagttctgaaaacttcatgtatctcttttaaatttgcgtacaaagataggaaaaagacttataaaatagactcttacagtaaaaaaataagcccttgggacaataattatctcaagggcttgcaaatttgtttcaagcatctgccttcaacggggaatatcaatgtatgaatccttaaatcccagaaagtaaagtacgccatctaagccgatggtgttgatggattgcttggcattggcaactactttgggctttgcatggaaagcgattccaaggccggcaattcccagcatgggcaggtcgttggcaccgtcgcccacagcaatagtctgcgcaatatccactttctccacctgagctatcaaacacagcaactctgccttacgcttaccgtcgactacatcaccgagatagcggccggtcagtttgccatcctctatttccagctcgttggcatacacatagtctataccgtacttcttctggaggtactgcccgaagtaggtaaaccctcccgaaagaatagctatcttgtaaccgtatttcttcaaaacatacatcaggcgatccacaccttccgtaatgggaagattctctgcaatctcctgcatcacggactcatccaatcctttcagcaaagccactcgttcgcgaaagctctcaatgaaatctatctcaccacgcatggcgcgttcggtaatggccttcacctggtcgcccacacccgcacgtatggccaattcatcaattacttctgtttcaatcagcgtagagtccatatcgaaacaaatgaggcggcgcatccggcggtacatattgtccaactggaaagagaaatccatttccagttcggttgccagtttcattaactgttcttgcatggcaatacggtctttcggagtgccacgaacggaaaattcgatgcaggcgcgtgtacgcgattcgcattcgtccagcgggatacgtcctgtaaggcgcttgatggcatcgatattcatgccttgctctgcaagaatacgggtaacggcagatatttgacaggcagacaacttacgccccaataaagtaagaatatagcggttctttccctgcatattcacccaatcctcgtactctttggtagtaatggggtagaaacggacagtcactcccagggaggaagccttgaaaagcagttccttcataatgaaccccgagtgttgttcttccgtcttgcacaaaatgcccaacgaaagagtattgtgaatatctgcctggccaatatccagaatggtagcatcatatttcgccagaatttccgtcacggaagctgtcagtcccggacggtcttcacccgtaatacgtatcaggatgagttcagtgttcaatggttgcat

SEQ ID NO: 591 - DNA, 9669 bp, unidentified
  source 1..9669: mol_type = unassigned DNA
atgtgtggaattattggatttacaggtaaattaaaagctcaggatgtcttattgacaggacttgcaagccttgagtaccgtggatatgacagtgcgggaattgcatactttaaagataccggaaaaatttcacttcggaaaactgtcggaaaagtaaaagatcttcgtgcaatctgcgatgatgataacaattctacgtgtggaatcggccacacccgctgggcaacccatggtggcgttaccaatgccaatgcacaccctcataaggtcggacaggttgcattgatccacaatggtatcatcgagaactatcatgatctcgccaccaaatatgatctgacggatgaactgatttccgagacggataccgaagttgccgccgcattgatcaataaactctacgaaggagacccaaaagaagctcttcgcaaagcagtagccgaaattgaaggttcctttgccttctgcgttctgttcaaggatcatcctggtgaaatttatgcggtaagaaatgtcagccctatggttgcaacatactgtgatgacggtgcttttattgcatccgatctgactgcttttatcgcatacaacaagcgttatttcatcgtgccggaatatcatattttaactatgaccgcggacggcattacgttagaagatttagacggtcattccgtagaaccggaatatatggaagtaaactgggatgttaccgcagcccagaaagatggttatccgcatttcatgatcaaagaaattcatgaacagccggctgccatcacaagaaccattaccccacgtatcaaagatatgcttccggatttttcggaagatgccattgcggattccttctttgaaaatgtaagcgacattacgatcgttgcctgtggtactgcaatgtacgcgggaatggtaggaaaaaccatgatccagaaccgcctgcatattccggttaccgtggcaatcgcatcggagttccgctatgaagaaccggtaatcaatgaaaaatccatggtgatcgtcgtatcccagtccggagaaaccattgataccttagaagctcttcgccttgcaaataaatatacaaagaaaacactgtctattgtaaatgtaaaaggctccagcattgcacgtgaaagcagctatgtattatatacacatgccggtccggaaatcgctgttgcaagtacaaaagcatacaccgttcaggttgcttctttttacctgcttgcatgcaaacttgccatgacacagcaaaagatttctgtcgaagaagcacgtacatttattggaacactgcaggaaattccaaattacatcgaggaagttcttgcacaggctcctgatattgaacagctgaccaaacgcatgatcaatgccaacaacgcgttctttatcggtcgtggactcgattataccctttgcatggaaggtgctttgaaattaaaggaaatttcttatattcatgccgaagcctatgctgccggtgaattaaaacacggaaccattgccctggtcagtgaaggggttcctgtcattgccgctgctacccagaaacatgtatacagcaaagttatttccaatatccgggaagtaaaagcccgtggtgcttatgtcattcttttgtccaaagacaaagaaatcacagatccttctatctgtgatgtacacatcaatcttccggatgtatccgacgaatttacgatttttgaatctgttgtaattttccagctgattgcatattacacatccgttggaaaaggcttaaatccggatcagccacgtaacctggcaaaatctgtaacggtagaataagaaaaaactgtcgcgcgaaaattcgtgcgacagtttttttgacatagagcctttctaaaacttttgaaggcaaaaaaagaaccccagaagctctctaaaagcctctgaggttgcccctgccaaggattctctcacccatgtaccggaatccttgtatcgtcggcgcgacaggatttgaacctgcgacctctgcgtcccgaacgcagcgctctaccaagctgagccacgcgccgtttcaactgcccaattatagtaacacattctccggtgtttgtctagtgaatttttttaatttatggtacaatacaaaaaaagaatggagaagaacaatgaaacatactgctttgattacaggtgcatcccgtggaatcggtgcagccctggcatgtcgatttgccgctgaaggctatcatctggctctttgctgccataactcttatgaaacgctgcaggcacttgccacaaaacttgaaacaacctgctccatacaggtgcttggcttccgtggtgatgtaggagactatacttttatctgtgacatggtgcaaaaaacactggataccttcggccagattgatgtgttaatcaacaatgccggcatctcttatatcggtctgctcaccgacatggatattaccgactggaaccggattgttgcgacaaacctcacatccgtcttttccacctgcagacaggtcatcccctccatggttcatgccaaatccggacatatcatcaatatttcttctgtatggggaaatgtcggagcttcctgcgaagttgcctattctgcatgcaaaggtggagttaattcccttacacgcgctttgggcaaagaacttgcccctagcaatatccaggtaaatgccatcgcctgtggggtaatcgatacggatatgaaccgttgtttctccgaggaagaacgctctgcactcatcgaagaaattcctgccggtcgtatgggatccccggaagaagttgcttcactggcatattctcttgccacagcaagcagttacctgaatggacagattctcaccttagacggcggatggatttaatttcttatctttttggaaatctttttccatttatttaagaattaaaacgcaatacgcgttttctctgttttttatatcaactttctataaaatcatttgtatgaaaacgaatgataaaaataaatacaaagattttggtgaccgtctgagtctgattatgtataaacaaaatatttccaatatccagctggcaaatgcaatgtttgtttcgccgtccacgatcagcggataccgtaccggtcgtcgttctccgaccgttgcggatcttgcagccatcgtgcagattctgaatgtttctgcagattacctcatcggaaccagtgaaattacaaccagacccgataccaccgaaaaaaatagttgagcacgccctgtttccagagcggtgcccaactcttttttataaatcatgttctgccagtaaaattaccgtagaacgttccggaacacgcacacgtgtctgatctccctgtgtctgggcttcaaaatctgccccatcctggtattcacagaaagtatttactacaagtttccaatgataagactccggcaacgaaggcaggcgcatctccaaaggctcccaatacgcattcattccgtaaaagatcatatcatcatccgtatcatcggcatttcttcccgcatacatgattccaattaaatgtgtattatagtccgtataattccggttcggctctccgttatggatacttacggaaggtaacccgcagactgccggctttgtatcccttcgcagaatcggatgctttgcacggaaatggatcataaaacgggcaaaatcatgaatctcctgaaattcttccagtctgttccagtccagccaggaaataatattatcctggcagtatgcgttgttatttccatactgcgtattacaaaattcatcccctgcaaaaaacatagccggtccacggctgcataacaacgcggcaaatgcattcttcacgagtctgcgccgcaggcccataaccaccggatcatccgtctcaccttccaccccgcagttccagctcaggccgttgttatccccgtccgtattgttccatccgtttttctcattatgcttttcattatatgaatacagatcatacaacgtgaacccatcatgacaggtcagaaaattgacggatgcactatatccgcggcttgccggatcatacatgtcggaggatccggtgatacgtgtaattgcacgccctgcgacgccactgtcgccctttaaaaagcttctcatatcatcacggtatcttccgttccattcggcccagcggttccaggacggaaaacttccaacctgatacaagccacccgcatcccaggcttctgcgatcagcttcatatcccccagaatagagtcaaatgcaagggcttccagaatcggcggattctccatcggtgcaccattctgatctcttcccagaatcgatgccagatcaaaccggaatccatccacccggtactctactgcccagtgccgcagacagtctgtgataaaccgccgtaccaccggatgattgcagtttaagacattgccacagccgctgaaattgtaataatatccatccggtgtaagcatataataaatattgttatcaatccccttaaagcaaaaacatggaccgttttcatttccctctgccgtatggttgaataccacatcaagaatgacttcaattccattttctttcagttcgcggatcagacgctttaattcatcaccctcatgattatgctcctgatgaaatgcataacttgtattcggggcaaaaaaggaaaccgtattatagccccagtaattgtacaactgcacgccatccaccacacgggcactttccatttcatcaaattcaaaaatcggcatgagttctaccgcattgattcccagatctttcaaatacggaattttctgtcgcagaccttcaaatgttcccccaccttttacaccggaggacgcatctttggtaaatcccctgacatgcatctcatagatcaccagatcttcaaatttgtaattcagattccgataccgcccccagtcaaaatcactttgcaccacacgggctttatagacaaaatcctttccgccttccggtttttctccccagtttctctgaccggtaacagctttcgcatatggatcaagaagcgtatgttttctgttaaacagtaaccctctcgcctgatcggcaggaccgtccatctgataggcatactcaaaatcctctgcttttaagccaaaaacaaggatagaatacgtatttccaattttataactttccggaatgcggattcttgcatacggttcctgtgccgccggccggaataacagcaggacacagctcgtagctccatgggagcttacggtaaaacttaccccttcctctgtctgatatgcaccattcatctgataaaatcccggacgtacatcaaatccaccgatattatcgagtggatgaatgacttccccgagactttccatttcttcgtctatcggccagcttttctgttttgacggataattccaaaaacttgcattcatgtgctgattcctcttatcattattatttacttgccacataaaattatagtatccccctactcttccctgatgattaccctgccatttgcgtcaaatccgattttactgtacttttccgaatactcattcatatgatcaataatcgtctgttttctgtcgccttttgctatggcaggctgaaaattatttctttctgatgtggaagaaatgctgcatggtatcatatcggctgatatatctgtctgcagtaccccatccacaaaggtaaaggtctgttcatagatcgccgtatctttgtcttttggattcctgttccccccaaagcagaaatttccaagactgtagcagatcatttttccgttgtataattccattccctgcaatacatgaggatgtgtaccgaccagcagatctgctccccagtcaatcacctggtgtgccagcttctgctgataatcattcggataatgatccccctctatcccccagtggcaacaggcaattaccagatccgctccttcttcccgaagttctgcaatcccatcccggatataattggcatgtttttcatctgcagacaactggcttgcggagacaattccgattttgataccatccttcgtggtataggtatccacatgatcattgaatccgaagataatccctgctttatttaacacttctctggtatcatcaagtccctgctgcccataatcaaacgtatgattatttcccagacttgccccctccacagaactgtctgtcataataccaacatactccggttttccttttaagttccacgttttttccacacgctcggtcgcatttgacaacacacattccagattgatcagtgtaaaatcatcctgctcaaaaatacttctgatatttttaaaaaaataatcctgcccgtatttatcatagtattcatgaaaggaacctgcatacccatgcgtctgtgttgccccaagcgtacagtcacctgtcgccgtaatttttaccgtctgtatcaccggttcctgctgcgtttcagttgcagtcccggtttccgtttcttccagcgtacccggttcttccgtcatctgtgtctccgtgattttttccgtagaagagggcaaagccgatgacgttgctgcaggagaagaacatcccgtcagcaaaaatcctgccattaggattggcaatatccattttttcatacgttttcagactcctctttcacaagaatatccaccgtgtgaccgcttgcacccataagatccatccgttcacaggttgccagatgatactgcagaaacgcatcaaactcttcttccgtcagcgcatttaaaaacggacgcatataatttgctgcaccgtctgccgctatgatctgccggcgcctgacctctacctgccggtccaatgcttcaatatcttccagacgaaccatggaatacagaggattggcttttgaagtacagtgataatcctctgtgagcattccctcctgaagtgcttcaagaatatgtttttccttaaacgcatacgtgataacggaaaattcattcataatatacgccacgagaatcctgcctccgggttttgtcaccctcactgcctcccgcagcgcagcaagcttgtccttttcctcatgcagatgatacatcggcccaaacaacagggttacgtcaaaggaatcatcggaaaattttttcagattcattgcatttccctgatatgcatgcacgcctgcacccttctgtttcaagcgtcccagattatgctttaccagttccacggccgtcacatcgaacccttcctgtgccagcggtacgctgtatcgtccggttcccgccccgatatcaaggatatgaatttcctcttttgcacgttctttcacaatttcatccagacactgatggatataatgcatacttgtcacaaattccaccctgccgtgtcggctgtccagacgcttctcttcattaaatttattataataggcttctaagtctgtcatattttaatactaacacattttctttaaaatttcactcacaatcgctgatgcgacatccgctttgctcattatttccagttccctgcagtcatctgccgtaatcagcgtcaccacattggtatctgtaccaaatccggctccggctaccttcaggttattcgccacaatcatatctgcattcttttttgcaagttttgcacgggaattctccagcatatgttccgtctccatggaaaatccacacagaaactgtcccggttttttgtgcgcgcccagatacgaaaggatatcttccgtgcgttccatcgtaagagtggcattcccgtcttttttcttgactttctcatcgaccgggtgatccggacgataatccgccacagctgccgctttgataataatatcctgttgctctgcggtctcctttacggctgctgccatatccgccgcagatacaaccggaacgacctttacaaacggcggcggagtgattgccaccggtcccgtgatcagcgtcacttccgcgccacggcgcatgcagttttccgcaattgcatagcccatttttccggtagagtgattcgtaatataacgcaccggatcaatcttctcctgtgtcggtcctgctgtgaccatcactttctttccaaccatgtccttttcgcaggcaagatctttcataatataagaaaacagtgtttccggctccggcatctttccggctccggtatccccgcaggcaagataaccactcgccggatcaatgatatgaaacccataatgctccagctttttgatgttatcctgtacgatcggattttcaaacatattggtattcatggcaggggaaacatacttcgggcattttgccgcaagaatcgttgttgtcagcatatcatctgcgattccgtttgccatcttgccgatcacattggcagaagccggcgccaccataaaaatatctgcacgctttgccagtgccacatgctcgacattgaactggaaattccggtcaaatgtatcgaccagacacttgttgcttgtgagcgtctcaaacgtgataggattaataaaattggttgcattttccgtcatgatcacatgcacatccgcatgctgcttgacgagcgcacttgccagataggcgattttataggcagcgatacttccggtcacaccgagtaccacacattttccttttaacattgtctcttactcctttgcagaaaaaatcacatcttctgctattttatcacactttttccctaaaacaattgaatttttgtcatctgttccagtatggaatctttgacagaatcgttcagatatgctggatttaattttctttttgcatatgcaaggtaagaaccatttgtctcttcaatcaaaactgccgtaaaaaaccgctcccagctaaaatatgttttgctttccacatattcccacggcttttccagcacctgatctgcccatttgctttttactacttttgcctttaatatcagccattcaaatgactccggcaaataaagcaccacttgatcttttccaccaatcaactgcatcactctgtcaatttcagaaccaaatgccgcgccgtctgcaattacaagtatgcgttcatttttatgcatatttaaataatggaaaacatttgactttccattcattgtctcacatttcaattgctgttgcctacatacagaattaaaaaactgataaccggaattactgtcttccgttattacaacctctggtttgatatccttctctaaagtctgtgctccatatattctgtaaaactcatgataacacggttttaatgttccgtattttcctgaagtacgaattccatagatttcctccacgctatacggcaaagaaggcaaggattccctggaaataatgacataataattatctgttttctgaatagtatctgcgaattctactgtcttgataaattcgtttccctcatcaataaatacaatactatcctgcattgctgataactgttctttccacagtgagccttcgagcacataacattttttgtcacacgtcagttccacaggggtcccggatggattgtttacgtattcccgaatcatatctaccaatgtggtttttccagttgcgctgtctccccggatgaccgtcagatttcttcgaatttcaaaatcatattttaagcgctttgttgatacaataattctatgttttcccttcat

SEQ ID NO: 592 - DNA, 19077 bp, unidentified
  source 1..19077: mol_type = unassigned DNA
  misc_difference 5054: note = a, c, g, or t
  misc_difference 5055: note = a, c, g, or t
  misc_difference 5056: note = a, c, g, or t
  misc_difference 5057: note = a, c, g, or t
  misc_difference 5058: note = a, c, g, or t
  misc_difference 5059: note = a, c, g, or t
  misc_difference 5060: note = a, c, g, or t
  misc_difference 5061: note = a, c, g, or t
  misc_difference 5062: note = a, c, g, or t
  misc_difference 5063: note = a, c, g, or t
  misc_difference 8947: note = a, c, g, or t
  misc_difference 8948: note = a, c, g, or t
  misc_difference 8949: note = a, c, g, or t
  misc_difference 8950: note = a, c, g, or t
  misc_difference 8951: note = a, c, g, or t
  misc_difference 8952: note = a, c, g, or t
  misc_difference 8953: note = a, c, g, or t
  misc_difference 8954: note = a, c, g, or t
  misc_difference 8955: note = a, c, g, or t
  misc_difference 8956: note = a, c, g, or t
  misc_difference 16586: note = a, c, g, or t
  misc_difference 16587: note = a, c, g, or t
  misc_difference 16588: note = a, c, g, or t
  misc_difference 16589: note = a, c, g, or t
  misc_difference 16590: note = a, c, g, or t
  misc_difference 16591: note = a, c, g, or t
  misc_difference 16592: note = a, c, g, or t
  misc_difference 16593: note = a, c, g, or t
  misc_difference 16594: note = a, c, g, or t
  misc_difference 16595: note = a, c, g, or t
caggcagacgccgccgcgaaaatattggaacatgataccggcgtgctctgcgccgcaactgcctttggtaagaccgctgtcggtgcgtatctgatagcacagcgcaaggtcaacacgttggttttggttcacaactccgagattatgaaaaactgggtggaagattttgaaaagttcctgcaaatcgacgaagatctgccagagtacatcaccccaaaagggcggcgcaaaaagcgtaaaagcgtcatcggcacgctgtccggcggacgcaatacgctgggcgggatattggatgttgccatgatcacgtctcttgggcagggcgacgacgtgaactcgcttatcaagaattacggcatggtcatcatggacgagtgccaccacgccggggctgctattgctgaagatgtgctgaacgccgtcagcgcaaaatacgtctacggtttgaccgctacccccaagcgtgacgacgggcaggagcaaaaaatctttatgcagctcggtcccatccgctaccgctacaccgccaaagaccgcgcggcggcgcagaatgtgcagcattttgtctacccgcgttttacgcgcttgttcgcgccaaacgcaaacaaactcagctacaatcaagcccgccgtgtcgtggtggatagcacggtacgcaatgagctgattctgaccgatgtggtttcctgcttgcaagccgggcgtacccccttggtgctgaccaaagagaaagagcacgcggcgtttttgtacgcgcaactgaagcctaaagccgaccatatttttcttttgcagggcggcagcagcgccagacaaaaagaagatctgcgcgccgaaatgcgggcagttcctccaaacgaaagtgttgtgctggtggccatcgggcagtacattggcgagggattcaactttccacggctggacacgatgatgttgacgatgcccatttcgtggcaaggcaacgtggagcaatatgcgggtcgtttacaccgcgattacgagggtaagcgagacgttatcatctatgactatgtagatgcgcacattcgtgtgctggagtccatgtattataagcgattgcgcacctataggcgtataggatatgaaattcttgctgctcctaacgaggaaaagcagactgtcaacacaatttttgacagcgaaagctatctgcctgtttatgaaaaagacttgatgcaggcacgcaagagcatctatattgcaagtcccggattgaacaaaaacaaagtccggcgattgattgcgctggtagaggagcagcagactgccggggtgattgcgactgtcataacgcaacctgccgagagttacccccagactcgcgtagagccaaccaaagcgctgcaaactgcgctgacggcggcggggatttacgttgtgccacaacccgacctgcacacccattttgcagttattgatcaggagattgtgtggtacggcagtaccaacctactatcacgcgataaagaagatgacggcctgatgcgtatttgcagcagggatgtagcgctcgagttgttggaggaaataggtcgatagtttggcaaacaggatttacatcgttgattttttcacggtatcgtgatacgatgacagtaaggcgatgatcgatatgcccgtgttatcaagattctatggaattatcattcgtatgtattttctgtaaagtgaacacaatccaccacatattcatgcaatttacaatgatgacgttgcagctatagactatatgaccggtgaagttttggaagtctatcttccaccgaaagcactagttatggtccgagaatggattgcgttgcataaggatactttgcaggaaatctgggaaacgcaagagtttaagaaaattccgccactggagtaaggaggtttcttctatgttccataaggttaaaagtgtatcacctctccctaattatttgagacttccaaggcttgcggatcttctcggacttctcggacttcttagacttcttagaatctattatcgcacttaatggagtcattttacagacgggtgattatggagcgattacgatacatcggcaaaataacagcacagcccccgccagaaactcatagagcttggcgggggctgtactattttaatcagccaatatttaaatcaggcccatcaggctgggcaggcccagagacagagccgggatgtaggtgacggccagcagggcggcaatcagtgccacaaagtaggggatcagcttggacgtgacctgctcgatggagacatgaccgatgccgcagccgacgaacagaaccgagccgaccggcggggtgatgttgcccaggcacatattgaagatcagcataacgccgaactggatctccgtcatgccaaagctggtggcgatgggcaggaagatcggagtgaaaatcaggatggccggggtgatgtccatgaacatgccgatgaccagcaggatgatgttcatgagcaggaagatgatgtacttgttttcagtcaggctcatcaggccgttggagatggctgccgggatgccggagtaggccataacgaaggacatggcggaggaggcagaaatcaggaacaggatgatgccggacgttttggcggagttgagcaggatgccaaggaagcctttgaagtcgatgcttttatagatgatggaaagaatcaggcagtagagaaccgcgacacctgcgccctcagtggcggtgaaaataccggagacgatgccaccgatgacaatgacgatcagcagcagagacggcacggcgtcccagacggtcttggcaatgctctggctgtggtcaatgccggtggctttcatgccagccttttttgcgccgatgaacgcaacgaccatgcagcacaggcccatcaggatgccgggaatgtaaccggccatgaacagcgtggagatggagacaccgcccgcgacggtggagtagacaatgaaggcagacgtcgggggaatcagcaggccggtgggggcggaggcaatgttggcggcggcggagtaggcggggtcgtagccgttttcttcctcaatggggctgatgcagccgcccatggcggatgcggcagcaacggaggagccggacagcgcgccgaacagcatgttgcccaggatgttggcctgcgccatggagccggggatcttgccgacaaacagctgggcaaagttgaccaggcgcttggcaataccgccgttgttcatgatattgccggccagaatgaacagaggcacagcaagcagcgagaagctctccacgccggagttcatcttctgcatcgtgataaaggtgatctggtcccaggacagggtggacatggcggtcacgatagacgacgccacaatgctgatggagattggcacgccgaggaacagcagcacgccgaacacggcgaacaggataacggtggtcatggtgatactcatttgtctgcaccctcctcggattcaactttttcgccggtgacgtcctcatagatgttgatgatctgcgccaagacgatgaacacgccggaaatcggggcgatggagtaaacaaggctgcggggaatacccagcagggccgagaactcgcggctggcagagacagccagcttaaagccgccgatagtgaatacgaagatggccatcagcagaatcagaccatcgatgaccaccagcagggcggtgtgcgccttgccggtgaatttgtcgcggatgagggtcagagacatgtgctcccgggtggagaaggcgtaggccgcgccgatgaagccggtccagatcaggctgtagcggacaagctcctcggtgaaagcgacggggctgttgaggatatagcgggagaaaacctgaatcagaaccagcaccgtcataaaggtaagcagtacggcgcaggcaatgctcaaaattttgtccatccagaatttgatggcagcaaaggtgtttttcatggcttactcctcccctcttgcggcgtcgatggtatccagcagcgtcttgacgccgggatactgctcctcgtaggcttcgatcatgggctgggttgcctcgcggaaggcttccttgtcgacgtcatagacgaactcaacgcccatcgtctcctgtgcttccttgacggcctcctccacagcggtgtcccacatgaccttatgggcatcggtggaatcgtgggcggactccagaatgatttcctgatcctctgggctgatggtctcccagaccttctcactcatgatgaggacgtcggggatcatggcgtgctggtccaccgagtagaccttgcagacctcgccgtgcttgccggtggtcagggcggtctcgttgttctcggtgccgtcaatgatgccggtctgcagcgaggtgtaaacgtcgccgtaggacatggcaacagggataccgccgaggtaggtcatcatatcggtctggctcttcatatcctgcacgcggatcttcaggcccttcaggtcggcgggcgtgcggatggcgcgatccttcgtgtagaaggagcgtgcgccggaggtgtaataggtcagcgtgacaaagccgtcgtcaccggtggagaggaagaagtcctgcatctcctgcgagtccatgacatggtagaagtcatcggtatcgttgaagatatagggcaggccgaaggtgttgaaggcatcgttgtaggtagccagaccgggtgcagaaaccttggtcatggcgataacgccggcctgcagctgctcaaggttctcgttttcgctgccgagctggccgttggggaagatcttgacccggatgcggccatcggtcttttcagcgacctcgtccgcgaactgggtcatggcgatgtggacagtgtgggtctcggacaggccgtgggccagagtcagcaccagcgggttctcggcgctgtagccggtggagtcggcggtggtgccggacacgccgcagccggtcataacacccagactgagcgcagccgcagcagccaatgctgcgaattttttgaacatggtatttctccttcttgtatgtatgccgttttccccttggccccctctgagagggggctgnnnnnnnnnnctccgcccctacggggcacctcccctgctaggggaggcaagaagctgggttacatcccgatcaaatcaaactgttcgaacgagacaagtacctcgtgatccttcttggggttggggtacttgatctggacgctcttgaggcgctggctgtagtaccagccgctctcggcctcctcaaacttgcggcggtgcaggaagtgcggcagctctttgccgtccacctgcacatagaacggggacttctcgcggtggatcatatcgaggtacatgctctcgacggcggtctcgtagctgccctcattcgtgaaggtcacgacggtcttgacgcctgccttgacggcgatcttcgtcttgagatacgcgcccttgcggtaatcgttcgtgtggccgtcatcctcgtacagcgtgaactcggaatccacatcgggggccatcaggatgtccagggcggtggtcttttcggtcatcaggttgtgcagcttgttgccgctcatcgggagaatggcaccgctgcgcacaaacagcgggatgctggcaatatcaaccggcacctcaatcgtctggccgggggcgtattcctcgcgggtgtagaagtcgtagaaccgctcgttttcgttctcggtcacgggcaggtagaccgggcggacggtctggcccttttcaacgacgttcgcaaccagcagagaatcaccgaacatgaagtccacgccctcatcgtaggtggccgggtcgttctggaaaacgctgaacgtcggctgccagatgggcaggccgttctcatgcgcgcgctccatcagggaatacagcgtcgggctgagcttatagcggaagtcaatcgcgtccttgatgtactgctttttgtcgctgtacatccacggctcggtgacggtgttgtcggtgttcgtggagtggatggagaagcgcggctggaagatgccgttctgcacccagcgcacgaacagttcgccctccggcgcggggccgaagaagccgccgatgtcgcagccgtggttggacacgccgcagagcgccatgcccagaatcgtggcgatgttgtatttcagggtatcccagtgggtcaggttgtcaccggcccagacctgcgcatagcgctggatacccgcatgaccggaacggcagaccgagaacgggcggcagtcggggtcatactcctcgatggcctcgttggacagctggcacatcaggttgctcatgaccggcttcatcgtgccaatcgtgctgcccttgccctcaaagtaaacctttgcgtccttgtcaacgagggagtcatactcgcagttgtcgttccagatggaacggcagccgtatttcagcagcgcatccttgatgtactgcttccagtgcaggcgggtggattccttcgtgtagtccacaaacaggccggggccgccccaccaggtaccgacagccagaccgtcaagacctgcattgtcgtcggaggcgggcaggaacatgcccttctccttcatctcgttcagcagcggatggacgagcagcataccgggcttgatgttgggcgagacaacaatgccgcgcttttccatctgggcgaaccagtctgccgggtccttgaagcgcttgtggttccatgtgaaggtgcagcgcttgatgccctcggcggtctcaacggcgcagtagccgctggacagctggaagccgtcggcagggatgccttcctcgcgggtcgtgtcgatgaagtccagcacggcatcgtcgctgttctcgggcagctcggggtagtacatcgagctgccgaggtagcccagcgcggccttcggcagcatgacgctcttgccggtcaggtcggtatagcgctcaatgatctcgcggatggacgggcctgcgatcaaaaacaggtcaatgtcgcccgcgtcggtgcggtaggacgagtagcggtgccagtagttgcgcttctcgcggcccatgttgaaatcgcactcggcggtattgtggtagaagtagccgacagcctgcttcgtgccgcggttcaggcggatatagaacggaatgtgcttgtagagggaatccgtctccttggcgttgtagcccatggcgtcgccgggagccatattcatgtatttctcggccttgttgatctcgccggatttctcgccgaagccgtagaagcagtcgtctgcctcgatctggctggcgtggatgcggcggtggttgctgtcctcgcggtaggccaggtcgggaatatcggcgtgcagcaggctgccgtccttatcatagaccatgatgcggaacggtgccttctcgatgacgaccttgagacgcgccccctggatgacggcctgcctgtcgccgtcggtcagggctgcggcggcggactggacgcgcttgcggcagtccttcatcagctcgtcggtgcgggactcccatgcggtcatggtcaggctgtaggaggcttcatcccagtcgccgtcaaagcccgcgcggatgcgcagtatatcgtcggtcaggaaccagatgcgcagctctacagcgttggtggctacggaataatagcttccgcagtccttgacagcgccgccggtgtagcacactttcataggttttctccttccttttttgcgtataattgaatggtggaacttgtcatttggcgggcaatgtgcatattgtacaaaattgcataatatattttgttcaatctgcacattgtgcccttcttcgcctttataataacaaatccttcacaaaatttctgccgtatttgtaatgcaaatgtcgcaaaatgtgatataatcgtggtaaagacaaaattttacaggaggagtcgctcatgatcctgcaaaaaatgccgcattacgtagattccattctgacgcaggaggatgccagtgccgccctgcaggacggtcaggttgtcgtgggcctgtatacaaaccgggagaatgtccagtcggtggtccactcccacccgtattatgagatgatactgccggtggcgggcagcagcgtgcgctactccgtcgacggcagtgtctacgatttgcacctgggggagctgatactgtttccgggcgagatgtaccactccggcaagttcaacatcacggacacgacctcggagcggctcgtcgtgcagatagctcccggcatctgggagcgtgcctgggcgcaaagcggcctgccgcggcatgtctggtcgggcgatcctgtcattctggacactgacgccgtcacgcagtgggacttccgcggtctgctggagcggatggccctgaccgtgtatcttgatgaaaaaatacgcgataccgtgcaatgctgcgaggtcacggagctgattttgcttatcagccaagttgtgacccggcggcacaatgccccgccgccctcggccaccagtctgctcgtcgccaaggcggttgcttaccttcaggccaactacaccgacccgcatctgaccgtggcccagctggcaaagtacacctacaccagccgggagcacctgtcccgcgtgttcaaagagtacacgctggaaagtatacacgggtatctgaccaacctgcgtatgcagcactgccgcaacgagctcgccgacggcaccggcgtactggacgcctgcaccgccagcggttttgcaaattacagcagctttttaaagagtttccgcgcactgtacggcatcacccccgccgagtaccgcgcccaactaaggcagagccgcagaacgccataaagaaaaccacacattgcggtgtgcacgctatttcaggtagataagctgcgcttcatttcggtcatggcagcctttaaggcgcggggaaaccggcttttcccctgttcggtatcggctacggtgtctgttgccttgtaaaccaaaatcgccgcgatctaaacaaaaatccgccgggnnnnnnnnnncttcccaagaacaggaaggctccccggtggtattgccttaggtcgtcatcgcagacgattttagaatcggtatacttattcaggcagttgaatctccggcatcagctcatcggagacgacttgcagcattttctccaatttggccaggtcatcgggactgaagcgctgtttagcgcgctccatgacaaggtgcaagtaggaataactgatgttatagtactcaatgtacttttgggtcgggcgcaggcggtattcccgcttgtcgatggtggactggatgcgctctacatagccttttttgaccagtgagttgatcttatacgcggcgttgggggtagaaagattcatcatgtggctgaactgcgcaatcgtaggttcgcccaatgccatgatgacttccatgcagaaagattctaccgtcgtcagcgtggcttcgcgatcctcgaatcgactgaagatctgcttatagaagtgcagtttgaatttggtatatacccgtccgaatgtctggtccagcatagcgagaatccccctgtaggttagtggatttattatagcacattccgccatgtaaaaccagccctcaggcatccgtgagaacaaacgtcagctcggcgttggccgcgcgcacgccgtccacccatgcggtggccttgccgatgcctaccgggccatgctgttctatcagctcacattccaatatcagcacatcgccgggtatgacctgccggcggaaacgggcgttttttacgccgccgaacagggcgagctttccgcggttttccggcaggcttaacgcggctaccgccccggtctgggccagcgcttccagaatcagcacaccgggcataacgggctgtcccggaaaatgcccctcaaaaaacgcctccgtgcgggtcacgcatttgacgccccgcgcccattggccgggggtgtagtccaggatcttatccaccaaagcaaacgggtaacggtgcggcaggatctcttcgatctctgccgcgctcatggctcggggcggctcatttggcgtatagttcatcctcatccctcccagcgtttgaataccacacaggcgttatggccgccaaagcccagactatcgctcatggcatactccacctgcgccgcgcgcccatggttggggatatagtccagatccagctccggatccggctcctgcaaattgacggtggcgggcaaaaaggcatcgtgcagagccagcgcggtaaatacgccctctaccccgcctgccccgcccagcagatggccggtcatcgacttggtagaagacacggccagcttgtacgcatggccgccgaacaccgttttgatggcagttgtctcgcagctgtcattcaggtgggtggacgtcccgtgggcgttgatgtagccgatctgttcaggcactaccccgccgtcggccagcgccagccgcatacaggctgcaccgcctgcgccgcccggtgccggggcggtaaagtggtaggcgtcgcagttagcgccatagcccacgacctcggcataaattttggcatcgcgcgctttggcggcctcgagttcttccagcagcagtacgccgctgccctcgcccatcacaaagccgctgcggcgggcatcaaaagggatcgaggcccgggccgggtcatccgccgtgcaaagggctttcatgctggcaaagccgcccacgcccagcgggctgatgcagctttcgctgccgccgcagagcatgcggtcctcgtatccatcgcggatacggtggaacgcatcaccgattgcattggtgccgcctgcacaggcggtggtggggcagctgcacatgccctgcaagccaaaacggatggcgatctgccccgccgccatattgccaatggacatggggacaaaataggggctgaccttttcaaagccgcgctgctgaccgcgggtgtgttcttcctcgatggtgggcaggccgccgatgccgctggaaaggatcacgccaaaccgcgtgtggtcgatttcttccagcgcaaggccgctgtcgcggacagcttcgtcggcggcggccacggcaaactgggtaaagcgtgccattttgcgggcttcgcgcttgtcgatgcgcgcggcggggtcaaagtcctttacctctgcggccagctttactttaaaatcagccgtatcaaaagccgtgatcggtcctactgcgcagcggccggccttaatgttcgcccagctttctgccaccgtattgccggtaggatttaccgtgccaaggccggtaataacgaccctgcgtttcttttttgtgtccattgcacacctcacattcccattccgccgtcaacgcaaaggacctgcccggtaatatacccggcctgctcccctgccagaaaagccaccgccgccgcaacatcctcggcatggccgattttgcctgccgggatggccgcttccgctgcggcacgggccggttctgacagcacggcggtcatatctgttgcaataaaaccgggagccacaacgttggcggtgatattgcgggcagcatactctttagcagcgcttttcgtcaggccgatcagccccgccttgctggctgcgtagttggcctgacccgcgttgccgtgcagaccgacaacgctgctgacgctgatgatgcgcccataccgctggtgcatcataaagcggcaggctgctttggtgcaaaaaaacgcccccttcaggttggtggcaagcacattgtcaaaatcagcctcggtcatccgcggaagcaatttgtcggcggtaatgcccgcgttgttgaccagcacatcgatccgcccaaaagcggcaacggtatcttctaccagtttctgacatgcttcggggctgcgcacgtccgcctgcagcgtgacagcctgcacgccaagggcgcggcaggctgcggctgtttcctcggcagcggcagcgctgccggcatagttgacggcaatgttcatgccgttttcggccaaagcccggcaaatggcacggccaatgcctttggccccgcccgtaaccagagcggcacggcgcaagttttcggtttgcggcatggtcaggctcctttcatggtgcgcagcagctgttgcagctgctcggcagtttccaccggatagcacgagagagcacttcccacagtctttttgacaaacccggtcaacgccctgccgggaccgatctcaatggcggcgtccacgcccaattctgccagacggcggacggtcacctcccaacgcacgccggactgcacctgtttttccagcagcgcggcaatggtgtcggtttcctccatctcgtgtcccaggcagttgaacagcacagggaactgcatcggcgcaaagcggacagccttacatttttcccgcagtgcatcccctgccgggtgcatcaatgaggtatggaacgggccgctgacattcagcggcaggcagcgccgtgccccggcagcaagcgccaactcggcagctttatcgacagcggccttgtcgccgccaatgaccagctggccggggcagttgtagttgcagatctgcacaacgccttcgtcggcggctgcattgcagcatgcctgcaagggggcttcgtccagccccaaaacggctgtcatcccgcaggtgcgccccgccgcagccgcagccattgccttaccgcggaaagcggttaaagcgactgcggtctgcacatcgaacacccccgcacaggccagggcggaatactcccccagcgacagccctgccgcataatccggtgtgatgcctgcctcccgcagtacggcagtaaggccagcggcaaacgccgtcatacagggctgggtgtattgggtctcgctcaataccccggctgcgtcggtaaagcagacttctttcaaatcaaaatccaccgccgcgtcggcttcgtcaaaagtagcgcggaaagccgggaaagtctcgtaaagatcccggcccataccggcgtgctggcttccctgcccggcgtataaaaatgctagtttcataaggtgatctccttgtacaccccggcgatgcagtctttggcttcgcttaccatcgcggcaaaaatttctttcaccgggcggacttcgtgcagcagccctgcggcctgtccggccatcaggctgccattctcggtgtcaccgtcaaacacagccttgcgcagacttcctaaagtaaagcgttccagcaccattttatcagccccggccttttcctggcggacatactcgcggctcatgcggtttttcagtacacgcacaggggtgccgccgatgcgcccggttacgatggtatcactgtcgcgggcttttaacagggcggctttatagttttcatggatggggcactcggtgctcgccagcagacaggtaccgacctgcacaccgcacgcccccaatgccagcgcagcagccagccctcgtccatcggcaatgccgcccgcagcgatgaccggcacatggacggcatcgacgacctgcgggacaagtgccatcgtggtcatctcgcccacatggccgccgctctcggtaccttcggcaataacggcgtcaatgccgagcggttccagatgtttggccaaaatggctgccgccaccacggggatgaccgtgatgccggctgctttccacgcggccatatactttcccggatttcccgccccggtggtgacaatctttacgccctcctccaccacgattttggcaaattcatctgcctgcgggtgcatcagcatgatgttcacgccaaagggcttgtcggtcagtgcgcggcagcggcggatgttttcccgcagggtctccgcgtccatgccgccggagccgatcagccccagcgccccggcgttggaacaggcagcggcaaactcgcccgtggcgatattggccatgccgccctgtataatgggatattttgtacctaaaatttcattgagcagcttcattttctaccctcatacgtcagcagcatcccgccccatgtcagcccgccgccaaagccgatgcaggccagcgtctggccgggtcgcagcagatcactttccgccatttcatgcagggcaatcgggatgctggcagcactggtgttgccgtgacggcttatgtttttgtaaaactttgacggttctgcgtgtaaacttttgacacaatggtcaattatgcggctgttggcctggtggcagactacccagtccagatcagacaatgtcttttggctgcggtccagcacagcttgcagacagcgcggcatagcctccacggcaaagcggaaaaccgccctgccgtccatcgtgatcggcgcggtatcgcaggccgcagggccgcccgcgcggatcgcttcattgccccgtgcgcctaacgttacggcgaacggtgcattttcggccagctcaaaaacagccgcacccgcgccgtcgccaaacaacacacaggtcgtgcggtcagtcgggtccaccatgcgggagagtgcctcgcagccaatgaccagtgcataccgcccgcccagcgtgctcaggagcccgtgggccgcggcggcggcataaataaagccggaacaggccgcattcacatcaaaggcaggccggttttccggcagacccaaggcagcctgtacacggcaggcaatgcttggggtagccgtcggggccgagagcgttgccacaacacagcaggcaatgtcgtttgccgccagaccgctgcgggtcagggcctgacgggcggcggtgacagccagcgtggcggcatcctcgttttcggtgcagtaatagcgctggcagatgccggtgcgggtcgtgatccattcgtcgctggtgtccacctgtcggcgcaattcctcgttcgtcactacacggccgggcaatgccccgccggtagccagcagctgtaagcctttcatgcgcccctcatttctccgatgcggcggtattttttgtagcgctgttctgccaacgctttgccgctcatcttacataaagcggcaaggtgcaccgcaatggcagtgtccaaccggctgaaaagcagctgccgtccacgctgtgcgccgcccagcggttcggggatgacttcttccacaatgccatctgcgtacagatcctgtgccgtcagcttcatcatggtgcaggcctcgccgctgcgggaagcatctttccacaaaatactggcaaacccctcggggctgagcactgagtacacggcattttccagcatcagaatgtggttggcaacgcccagacccagcgcgccgccgctggacccctcgcctgtgacaatggccagcaccgggacggtcaggccgctcatctccatcaggttgcgggcaatggcttccccttggccgcgttcttccgcatccttgccggggtaagcgccgggagtttcaataaaagtgatgatgggacggtgaaatttttctgcctgtttcatcacgcgcagggccttgcggtagccctccggtcccggcatgccaaagttgcagcgcaggttttcttccagcgtagtccctttgcggtgccccaaaacggtaacgggcatcccgtggaaccgtgcgatcccgcataaaatggctgcatcctctttgcattgtcggtcaccgcactgctcaaaaaagtcggtaaacaagttgtcgatcatttcggttatatgcgggcggtcagggcggcgggccagaaaaacgcggtccgccggcgtcagcgaggtgcagcgctgtaaaagcgtgttttcctctgcagaaagcgcagccagttcagccgcatgggtggtcgtgctcaccatttcggcgtcatcggcacggctgcacagcgcgtcgatctgcgcgtccagcggttccaattgctgcaaaacttctttgatcatctgcgcttcctcccctgcgtgtggagctgcaagatccgcgttaagacctctttcaactcggtgcgcggtacgacctgatccacaaaaccgtgttccagctggaactcgctgcgctggaacccgtcaggcagtttttcaccgatggtctgttcaatgacgcgcggcccggcaaagccgatgagtgcccccggttcggcgagcgtaatatcacccagactggcaaagctagccgtgactccgcctgtggtggggtgggtcagcacgctgatgtacaacccgccgctgcggttgaaccgttccagcgcggcgctggtttttgccatctgcatcaggctgaaaatgccctcctgcatccgtgcgccgccactggcagaaaaaatgatgagcggcaggtgcttgtcggcagcgtactcaatcgcacgtgtgattttttcaccaacagcggtgctcatgctgcccataaaaaaacggctgtccagcacagcgaccaccgcctgcacgccgccgatcctgccgattgctgtaacggcagcttctttcaggccggtcttgaccgaagcagcggccagcttttcctgataatcgggaaaatgcagcacatcgttgggcgcaatgtccgggttcagctctttaaaagttccgtggtccagaaccgtgctgagccgataataggcgccgattgccaaatgcaccccgcagttggggcagacatactggctcttgacccaaacctgccgcgtggcacggcggccgcattttttgcactctacaaattgcggcggcacccannnnnnnnnnagttgggcgcagccgtgccggcatcgcggcgggctttcatctgaaagctgcgctcctgcgggctggtcgggaacagcttttcaatggcactcattctgcaataccctttaggctgcccgcgcagccagatagttgaagatgtcgcccacggttttgagcgaccccaggtcctcgtcggcaatcgtaacgccgaacttgtcctcaaacgccatgttcagctctaccgcatccaggctgtccgcctgcaggtcgtcggtcaggctggcatccatggtgaccttatcagcatcgcagttcagggtatcaacaaatacttcttttacttcttcaaagctcatattacgtacctcacataatttaactaaataaattgacgtaattgtcaatgaggtcattataccacgtttgcttcgaatgtcaatattattaggtaaaaatatttatctaattgaattgccgtttttctcatcgtccggtattataaaaggggcagcacacaaattatccccccgccggggcagtccttactgactgcgatttgaccgctgctgcatgtcttccctgtgaaatatccaattgcctttaaatggttttatttactttttcttttactctacagattattttctattctgcaacatatttcgctctaatgtgctatactaatactatccgataatgatggaggaacttctatgaaacgcagcagcatccgactccaatacaatgctcccgtcacactgacctttttctttttgtccctcgcctctctggtattgggctacttaacaaacaactggacaacctcgcacctgtttagtgtatatcgctcgtcgatgacggatccgctattctatgtccggttgttcggtcacgtccttggccacggcggttggaatcactttataaacaatatgctcctcttccttgttgtcgctccgcctttggaagaacgatacggaagccgaacacttctaagcggtatccttatgaccgcgctggtatccggcatattgcagtgtgtgctattccccacttctgcattgcttggtgcatccggtatcgtattcatgctcatcatgctctccagtttggctggcagtaagaatggaggtatccctatcaccttcatcttggttggcgtgctgtacttaagccagcaggtatacagtatcttctttatacaagataatgtggccaactttatgcacattgtcggtggtatttgcggtacagcttttggttttgccgtccggaagagataacgaatggtcggaaagagaatcttatttatgatgattaagcacatttttcagaaagaacctgtcctgagcattgccacttgtttggcgatcatttccgctttctttgtccccccggacgcagaatacctcggatatatcgatttccgtactcttgcgatcctgttttcgctaatgacagttatggccggactgagagggcaaggcgtatttgatagactcggccatgccctcctatctcatacccgcaccacttttcagctaacagttgttctcgttggcctatgcttcttcagcagtatgctgataacaaacgatgtatcgctgctgacattcgtgccatttacgtttgtcgttctgaatagtttgaacgcatctgttcgcagcaaactactcctccctatcgtctgtatgcagacgatagctgccaaccttggcagtatgcttacaccactgggcaatccgcaaaacctgtatttgtatggcaagagcgacatggatatgggatcttttgttttgctaatgctcccctactcaattatatcgttagtgcttcttgcaatatgggcagtatggctatgccgtgaaggttccgacattgttgtaactcactctgcggtaaactcagaacccaacaagaaactcattgcgttgtacggtattctgtttgtcgcctgtttattggttgtattgcgtgttctcccatacggtgttgcattcgccgctctcttggtgtgcgccttctttgccgaccgccccactcttggccgcgtagactattctctgattcttacctttgtagcactgttcattttcatcgggaatttaggtcggtttgaagcgttctctggatggttgcagaatattctggccggccatgaggttttagtatcagttctggcctctcaagtgaccagtaatgtgcctgctgccatcctgctttctggatttaccgataatttccgtgcgctgattattggcacaaaccttggcggccttggcacattaattgcatccatggcaagcctaatttcttatcgacagattgcaaatgaagtacctgctgaaaaagggcactattttgcgatgtttactatttccaatgtagtgtttctggccattctgatgggctcttgggccatgacctgatatttccgtaattctattttaggcaataccgcataattctaagtgccgatacggcgagcgaggtgcggcag

SEQ ID NO: 593 - DNA, 12113 bp, unidentified
  source 1..12113: mol_type = unassigned DNA
tcactccctccaccgtacggtcaggctcccctctttcagcttccgcaggtcatcgctctccgagaaatcttcccggtcacgggtgaggctggggttgtagtaggggtcgtccagaatcttctctttgccgtggatggcatacagccgctgctgctccgaggcaaagcgggccgccttggccgggtctttctcgtcgccgccgcggctcttgctctcgtaatgggtcagccgggcgtagggcgtccaggcaacgcggtaacccgcatcccgcacccgcaggcagaagtccacatcgttgaacgccacggcgaacttttcgtccagcccgccgacttcgtcccagacactggcttttaccagcaggcaggcaccggtcacggcggagaagtcctgcaccgtcgcggtgcggaacatatagccgctgccgccggccttcttgtacttgtggctgtggcccgcgtagccgcccagccccgtgaccacgcccgcgtgctggagcgtctcgtccgggtagtagagcatggcaccgcagatggccgccccgccggggtgggcacattggcgcagcagctcggtgagccagtcgccgttgcgcacctccacgtcgttgttcagcagcagcaggtagtccccgctggccgctttccggccaaagttgttgatgcccgagaagttgaagcccttttccgggtaggtgaccactttcaggccctcgtaccgcttccgtgcttcttcatagtaggcaaaagtggccgggtcggcagagttgttctcaatgacgatgacctcgtaattgtcccactccgtcttgctccagatgctgtgcaggcacttttccaggtcgtcggtgtggtccttattggggatgaggatgctgactttcgggtcgctctcaattttccacaagacgcggtaggtgctggggaacaatccatcggtgacggtgcccacccggcccgtgcgggtcaggtggtcggccagcgcctttttggccgccttggccacatagggcttggcgtcggtgccgccggaggtggagcccgcatggacccgccagtagtagagcacctggggcagatgggccgcgccgcccactttttcgatcaggcggaggaagagatcgtggtcctggctgccgtcgcactccgggcgctcgccgcccacttcctcatataaggcccgccggaacacggccaaatggcagatatagttgcagcagagcaggtagtccggcgcgtagtccggcttgaagtgggccaccagcggccgctggatgctcttgttgaaaagagcttcgtcgctgtagacaaaaccgtccggtttgccctgcgccctcaggtccaggatggccctgcccatggcgtacatggcgtggggagccaggatgtcgtcgtggtccgccagagcaagatattccccgctggcaagggcggcagcagcgttggtattggctgcaatgcccttgttttcgatctttttgtatacgatatgttgattctttgcctgatattcccgcacgatctccccgacacggctgtgagcggcatcggaagcatcggcaaggcagagctccccgttgggggcggtctggtccacgaacgaatccagaaactcccgcaggtaattttccggggtattatacagcggggtgaggacggaaatggtcggaagcccgcagtcctcgaacatttttccggccatctcggcccgctgggcttccagtacctttttggcgggcaggtagcgggcttttttgccgaagaaccggcgcttgacaaagcccgccccccgcgccatcatggtgccaaggccctcgtcccgggtcagctggacagcatagcccgccagctctttggcgcgtttcagtcgcaaattcatcccttatgcctcgccgcgctggacggccttgtacgcgttgcagaccgtcatggtatcgccgttcatcttgaggtggccgtggctcagccatgccaccttgctgcacatccgctcgatctgctcgatggagtgggacaccagaatgaccgtggtgccgcccgccatcagctcctgcatccgcttttcgcacttctgctggaacaggaaatcgcccaccgaaagcacctcgtccgcaatgaggatgtcgggcttggtgatggtggcaatggcaaagccgatgcgggccaccatgccggaggagtagttcttgagcggcacatccagaaagttctgcagctcgctgaactccacgatctcatcaaacttttcgtccagatacttgggcgagaagcccagcaccgtaccgttgaggtagatgttctcccgggcggtcaggtccatatcaaagcccgcgcccagctcaatgaggggggcaatggtgccgttgaccgtcactttgcccttgctgggcttgtacacacctgcaatggtcttgagcagggtggatttgcccgagccgttcaggcccaccaggccgtaaaaatcgccgggcatgatgtccaggctgacgtctttcagggcataaaattcatcgtactgcagccgcccctgcaccatggccagaagatactctttcaggctctcgtgcttttcggtggagaggttgaagcacatggaaacattgtccactttaataattggttccattttctcccctccttaaatgtgcagcacaaagcggtcctgcgttttgcggaacatctgcacgcccaccagcatggaaagcagcgcgcacacgccgcacaccgccagcatgttgaaatccagcgggatgccccacatcagagtgcggcggaagcccgtgatataccagtacatggggttgagcttgatgatctgctgcatgttgaacccgccgatggagaacgtcatctgggtggggtcatagaagatggcggagaagtagagcagcgccgtgatgaacacgctccagatgtgcatgatatcccggaagaagacggtggccgccgccaggaacaggcccacgcccaggctgaagaagaagagcgtcaccagcgggtagagcacttccagaacagtccagtggagggggctgcccgtaaacaccataaccagcgccagcgccacaaagctgaacacgcagttgaccatggcaaagcagcatttttccagcgggaagatatacttggggatatacacctttttgagcagcggggccgccgacagcacgctggacatgctggaggaggtggcctcgttgaagaagttgaagagcagctggccgcacatcaggaaaacggggaagttgtcgatgccgctgccgcgcatatccatcaggctgctgaacacggcccagtacaccaggcacatgagcagcgggttgagcacgctccacaccacgcccagcacgctgcggcggtacttgagcttaaaatcacggctgaccagattccacagcagatagcggtagcgccagaagccgttgaacattcccttgatttttgccacgggcgatcaccacttttcaaagaattcaaacttctgggaggcaaaggactcatgcagcttgtccttcgcgctggtcttgtgctcgcagccgcagtccggccactgcacgttgacggtggggtcgtcgtaggggatgccgccctcgctggtggggtcgtagacatcggtgcacttatagcagaactccgccacgtcgctcagcacgaggaaaccgtgggcaaagccctccgggatatagaacatcttcttgttctcctcgctcagggtcacgcccacccacttgccaaaggtcgcgctgtgggggcggcagtccacagccacgtcgtacacttcgcccttggtcacgcggaccagcttgccctgggtgtggttcttctggaaatgcaggccgcgcagcacgccgcgggtagagcggctctggttgtcctgcacaaactccttatcaatcccggcagcagcgaactggtctttctgataggtctccataaaataaccgcggtcatcgccaaacacctggggctcaatgaccacaacaccggggatctcagtttccgtaaacgtaaatttacccatttttcattttcctctctgttttttcgttattgtttttgacattttgttttttatttggaaaagccggaatggcttttgcgcagtgttagaaaagacgttgcgtggattgccaaagcctctcctactaggagaggtggcattgcgaagcaatgacggagaggttggacagagcaccgccttgtccatatgcggatgtcatacaacctctcagtcgcttacgcgacagctccccttgtaggggagcccttggcaaagagggtcagtgcctcgattttttcttcgctttcgagcggagccttaccacaacaaatgcaactcccgccgccagcaccgtgcaccccagcgagatgccgatgagcaggcccgcggtcttgccggggctgcgggtgccgctgcccagctggacaccggtgttccgctccaatagctcctccagtcccgtaatcgtggccggcacccggacgctggcggactcctgcttgtcctgcccgttgacggtatacacggcgtacaccgccgggctggtgcccaagacatactgttccggcagctccagcgtcacggacacatcccctgccgtcaggccgtcagccaacagcagccgggtgccggggtcggtcaccgtgaccatgcccagcggggcaccgcctcccgccaccgtcagctcccgggtcaggccctgggccgggatgtcggtatagtttgtgtagtgggcaaaggcgtaatccagcagggtgcggacatcgttgtacttgtcggtcttgatgttgctctgcatggtgacgcagatgagccggacaccgttctgctccgccaggcagacatagctgtagcgggcaatgttggtgtagccgatcttggagccttgaatggccgggatgtaatacctgctggaacctacccgcattttgtcctgctggtggaaataccgctctttgggctggatgtccgtgggcttcatgggatacatctcgttgcgggtaaacagcgtctcaaaccccggctgggtcagggcccagcgcaggatctgcgccatatcatagcagctggtatagtggtcggtatcgctgatgccgtgggggttggcaaagtgggtgtgcttgaggcccagttccgccacctgggcgttcatggccgccacgccgtccgcaatggtgccatccccgaaatattcggacagcaggttggcgccatcgttggcgctggccatcatggtggcatagagggcatccgtcaggggcacatgctccccctcctgcagggcaatgtggctggaatccgtccccgcgagggaatagacatcctcgtgggtcacttccaggctcacaccatcccactggccctgggctttttcacaggcaaggcccagcgtcatcaccttggtgatggacgccgggtgcagctcttcgtccatattctgctgggccagcacaaggccggtgtccgcgtcgatgatgcagtacgcctccgtggccgacagcgccgggcccgcggcccgcgccatgggtgcaaacaccgcgcagacccagagcagcaccgtgcaaagcacggcgatctgttttttcatctggtcatttctccattggtgatttagataatccttttcacgggcttgccctctccgtcattgcttcgcaatgccacctgttccccactttgtcacctacggtgacatttctccccgcaccggggagaatctttcccaaagtgggaggccttggcagtccacgcaaagtacatctctttgccaatggctctccctttgggagagctggacgcgaagcggcctgagagggctaggacgctatcatacattatcttgttcagtataccacacttttcccttgctgaaaagacattccgtgcccggcggcggggcaaagaacgggctgcagctgccgcccctccagcgccgcgtccagtgcggcgggcagcagggcgaaccgggctttcaggctctgcggctttgcctgcgggtcatcctggccgtagggcacaaagtaatagtgcttgcgctggtacagccgggcaatgttttctcccgaggcccccagcccgtcgttggtggagacggcgatcactaccggccgccccacccgcagcaggctctttgccgccagcgtcaccggcgtgtccgagaggcccgccgccagccgggccagcgtgctgcccgtgcagggggcgatcaccagtgcctcggccatgtttttgggccccagaggctccacggcctgcaaactgtccagtaccgggtgcccggtcaaggcttccagccgctgccgccagctcccggcccggccaaaccgggtatcacaccgggcggcggtattgctcatgacgggcagcagctcccagccccgggccgtcagttcctgtgcctgttccagcgcggtctccagcgtgcagaagctgccgcagaccgcaaaggcacagcgtcgtttctcgttcatcgtgctccctccctttcgcgcagcatctcgcgcaccgtccgggccacgatctccccggctgtttccggcgcgcaggcagcgggcaggctcaacgcatggatggccttgtggccgcagcgggcggcggcatcaaaatccgtcccaccggggcgggaagccagatccacgatcaggctcccgggccgcagccgggccagcaccggggccgtgagcacctgcgccgggatggtattcaccaccgtgtcaaaggccggggccagccgggccagccgggccagttctgccccctgcatccccaggctctctgcctgtgcccgctgggccgggcggcgggctgccactgtcacatgggcccccaatgccgccagccgggtgccaaccgcctgccccaccgggccaaatcccagcagcaggaccgcgctgccccacagggtgcgtttgcgctgggccagcaaaacgccgatgcacccctccgccgtggggatggcgttgcggatggccagctcctcccgggcaaagtaatccaccagctccaccccggcttccgctgcaatggcctttgcttcttccgagagcatcccgcccagcgccagtgccccggggcgtgccgcccgcagcagctccgccaacggggtgcgggccgcgtccagcggcaacggcagcaggatatagtctgccagcgcgatctcttccggcccctccaccgcataccccgcccgggccagcgcccggcctgccgccagctgccgggcatcgctgccgatcaccgcaaagcgtttttgtcgttccatccaaaagccctcctccccaaagcctgcgccattctatgcacaggtagggaggagggtgacggacgcaaacaaaaagccccggagcggggccgcaaggcttactccggggcaaatgtgcggttttgaaaaactaaagcttacttcttagcggctttagcaacaatagcaacataatcgtcgccaacaaccttgacaccgatctcaatcttcttgtcgctgttcttcacagaggtcttcagaactccgtcagccgtcttagccttctcgccccagctgttcttctcggtggctttgctgggcttcttgacgatcacatagttgtaagcaactttatcattgccaatgagaatgatgccgctggtttctttcttgttctcgtcccaagctttctgagcctcgtcgtccagatcggtcttgtgcttgtaagagacagcgctgacatcgttcagcttgttgaccagagctttctcaaccaggttgtcgcccactgcacagccagtcagcatggtcagagccataacgcaaacgagggcagcagccatcagtttcttaaatgctttcattgttgtatcctccgtaatcagatagttccccagcaacggcccgccttgtgcggacagtttgctatgttaaattcagcatacccctttttgtggcaattgtcaagatttcactgcgttttcatcatttttaccaatcggtacggtgagaaaacagcgatatgaccagtttcgccccggggcctccaaggcattttccacacggacacacgcaaaaaactcccccggcaaaacgccggaggagcctgcgattttattgggtttttttatctgatctctcggggcgtccctgactgtgcgcacgccgggagattacttcaggaactttgccaccgcgcgggccacgatgccgcccagaatgccggagacgaggaactccatcacaccctgcacgccgaccagcagcaccacgaacatgaacgggttggccgcgcccttggcagccacgatgttctggatgtaatcacagccgtagaatgccagcacgatgtagcccatgaagaacagggtgttaaggccgggagcgcacatggcggaaacgatgtagctccaggtgccgggcttgtcgaaccgcttgaggccgttgaagacgaggcccacgcacaggcccatcagcacacgcatccccacgcagaggatgaacgtgttgacagggctcacctggaacagggcgcccgtcatggccgaagcgccggtgacagcgtcatagaagctcaccgcgccgaacacgccgcccaggatggcaccagccgccgggcccatggtgatggcacccacggcgatggggagcgtcagaaagctcatgtaaagcgggcccatgggcacgctgcccaggccgatggctttcatgaccagctcaatggcgaccagcagtgccagccgggtgagagtacgaagatcgttattctttttcataaaaatatttcctcctgctgccgttccgccctagatgtcggatacggcgcaaacctgcccgcaaaaggtgcggggccgtttttctattttactttggaatgctttgtcagggaacgttccaaagggagagaacttattgatcacacgggaagcggatgcctgccgagcggcgggcggcggtcagcacccggctgacggcaatggaggtatccagcatccggctgcacagctcctggtcgccgccctcaatggcgcgggcaaaggcctcaaactccgcggccagccgggggcggccgccgttgaggttgtagtgttcctctttgccgtcgttgaggtgcagcgtcaggccgccgcagtagttggccgtggatttctgcagcagatagcccttggtgccctgaatgacataccgggccggggccccgcagtcttttgccgccatgctcacggccttgaagccgctgtaatccatggtcaggatgccgctggtgtcaatgccgtggtcgatgttggccgcgtagttcacccggttgggctccccgaacaggcccacgatgtagctgatgttgtagacattcaggtccatgagggcaccgccggcgcaattgggatcaaacgacggggccacctgccccgcgcagaacgcatcgtaccggctggaatactggctgaaattgcactgcaccagcttcaccgtgccaatgcggggcagcagctcccggatcttatgatagttttccagatactgggtggtcagtgcctcaaagaggaagacccgtttgtggcgggagagggcggccagctcttcggtctgggccgccgtgggggccatgggcttttccacaatgacatgcttgcccgcttccagcgccactttggcatagcgggtgtgctgcaaattggggacggccagatagaccacatccacccactgcagcagctccaggtagttggtggtgcactggggcacatggtaccgggcgcagagctccgccgccagcggcgcgctccgctgggtgctgcacagcgcctgcacctgaaacggcgagtccgccccggccagccagggcaaaaactccttgacgatcatcccggtgcccaggatgccaagcttcatcttctgttccattcttcctagttcctatcctgtttgctcgtgtcagcccgccttggcctccgtctcgtgccgctcccggcggatggcggcggaagttctgcccgtgaggcttgcggcctccggcggggtgatggtgctgctggggcgcgttgagctggtagagcagcgccagccccttgagcagcagctcggggtcataggtcagcgggtggcggcagaggggggtgacatactttgccagcccgccggtgaccaccagcgtggccgggcggcccagctcctcttcaatgcgggcggcgatgccgtccagcagcaccgccgtgcccagcaccgagccggagagcatacagctctcggtgttggtgccgatggcgtttttgggcgaggagagatgcacctgcggcagctgggcgcagcgctcccccagtgcccgcaggcccgtggagagccccgggcagataacgccgccccggaacacccggttctcgtccaccacattaaaggtggtggcggtgcccagatcgaccgtgatcaccggcagcgggaaattggccgccgcgtaggccgcgtccacaatgcggtccttgcccacggcgtgggggtcgggcacccccatggtcagcccggtgcggatctccggcgagacgatgacgggctttttgcccgtgtagtggcgggcgcactcggccagcgcccccgtgatctggggcacgacactggtcagcacggccccctcaaaccggacgggccgctccgggtggcggcggtgggaaaatactttctccatttcggcacggtactccgccgccgtgcgggtgcgtaccgtgtccatgtgggccacaaagcatacacgtccgtccttgatgccccccagggcgacggtggtgttgcctatatcaatggcaagaatcatattgaaacctcattcagcaagggtttttaattcaagttattttaccgcattttcccgcaagatacaagcccatgcaaagattttgttgtgctggcggaacttttgcattatactaaggagaggaatcccaaaacacaggaggttttttggatggatctgcacggaaaatgcgtccttttgggcgtcagcggcggcattgccgcctataaaatggcaaacgtggccagcgcactcaaaaagctgggggccgacgtggaagtcatcatgacccggaacgccacccagttcatcacgcccctcacctttgagaccctgacgggccacaagtgcatggtggacacctttgaccgcgattttaagtttgaagttacccacatctcgctggccaagaaagccgacgtcatcctcgtggccccggccacggccaacgtcattgccaagatggcccatggcattgccgacgacatgctcaccaccgtggtgctggccgccaagtgccccaagctggtctccccggccatgaacaccgggatgctggaaaatcccatcacccaggacaacctcaagacgctggagcactacggctttacggtcatcccctccgagagcggcctgctggcctgcaaggatgtgggcagcggccgcctgcccaaggaggatgtgctcattgagcacatcctgcacgccatcgccaagcccaaagatctggcaggcctgcacattgccgtgaccgccggccccacccaggagccgctggaccccgtgcgctacctgaccaaccattccaccggcaagatgggctatgccgtggcccgcgccgccgccatgcggggtgcggacgtcaccctcatccacggccccacggccctgcccccggtcaagttcaccgaggacgtgcccatcaccacggcgcaggacatgtatgaagctgtcaccagccgctttgcggacatggacatccttgtgatggccgctgccgtggccgattaccgccccgccaccgtggccgacgataaaatcaagaaaaaggacggcgacctctccatccccgtggagcgcaccgccgacattctgggcaccatcggcccccggaagaccaagcagttcctctgcggcttctccatggagacccgcgacatggtagagaattccgccgccaagctgaaaaagaagaatctggacatggtggtggcgaacaacctcaaggtctccggcgccgggttcggcgtggacaccaacgtggtcacgttcatcaccccggacggcacccgggagctgcccctgatgagcaaagccgacgtggcagacgccatcctggacgaaattttaaagcgccgcggccactga

SEQ ID NO: 594 - DNA, 8602 bp, unidentified
  source 1..8602: mol_type = unassigned DNA
  misc_difference 2099: note = a, c, g, or t
  misc_difference 2100: note = a, c, g, or t
  misc_difference 2101: note = a, c, g, or t
  misc_difference 2102: note = a, c, g, or t
  misc_difference 2103: note = a, c, g, or t
  misc_difference 2104: note = a, c, g, or t
  misc_difference 2105: note = a, c, g, or t
  misc_difference 2106: note = a, c, g, or t
  misc_difference 2107: note = a, c, g, or t
  misc_difference 2108: note = a, c, g, or t
  misc_difference 2109: note = a, c, g, or t
  misc_difference 2110: note = a, c, g, or t
  misc_difference 2111: note = a, c, g, or t
  misc_difference 2112: note = a, c, g, or t
  misc_difference 2113: note = a, c, g, or t
  misc_difference 2114: note = a, c, g, or t
  misc_difference 2115: note = a, c, g, or t
  misc_difference 2116: note = a, c, g, or t
  misc_difference 2117: note = a, c, g, or t
  misc_difference 2118: note = a, c, g, or t
  misc_difference 2119: note = a, c, g, or t
  misc_difference 2120: note = a, c, g, or t
  misc_difference 2121: note = a, c, g, or t
  misc_difference 2122: note = a, c, g, or t
  misc_difference 2123: note = a, c, g, or t
  misc_difference 2124: note = a, c, g, or t
  misc_difference 2125: note = a, c, g, or t
  misc_difference 2126: note = a, c, g, or t
  misc_difference 2127: note = a, c, g, or t
  misc_difference 2128: note = a, c, g, or t
  misc_difference 2129: note = a, c, g, or t
  misc_difference 2130: note = a, c, g, or t
  misc_difference 2131: note = a, c, g, or t
  misc_difference 2132: note = a, c, g, or t
  misc_difference 2133: note = a, c, g, or t
  misc_difference 2134: note = a, c, g, or t
  misc_difference 2135: note = a, c, g, or t
  misc_difference 2136: note = a, c, g, or t
  misc_difference 2137: note = a, c, g, or t
  misc_difference 2138: note = a, c, g, or t
  misc_difference 2139: note = a, c, g, or t
  misc_difference 2140: note = a, c, g, or t
  misc_difference 2141: note = a, c, g, or t
  misc_difference 2142: note = a, c, g, or t
  misc_difference 2143: note = a, c, g, or t
  misc_difference 2144: note = a, c, g, or t
  misc_difference 2145: note = a, c, g, or t
  misc_difference 2146: note = a, c, g, or t
  misc_difference 2147: note = a, c, g, or t
  misc_difference 2148: note = a, c, g, or t
  misc_difference 2149: note = a, c, g, or t
  misc_difference 2150: note = a, c, g, or t
  misc_difference 2151: note = a, c, g, or t
  misc_difference 2152: note = a, c, g, or t
  misc_difference 2153: note = a, c, g, or t
  misc_difference 2154: note = a, c, g, or t
  misc_difference 2155: note = a, c, g, or t
  misc_difference 2156: note = a, c, g, or t
  misc_difference 2157: note = a, c, g, or t
  misc_difference 2158: note = a, c, g, or t
  misc_difference 2159: note = a, c, g, or t
  misc_difference 2160: note = a, c, g, or t
  misc_difference 2161: note = a, c, g, or t
  misc_difference 2162: note = a, c, g, or t
  misc_difference 2163: note = a, c, g, or t
  misc_difference 2164: note = a, c, g, or t
  misc_difference 2165: note = a, c, g, or t
  misc_difference 2166: note = a, c, g, or t
  misc_difference 2167: note = a, c, g, or t
  misc_difference 2168: note = a, c, g, or t
  misc_difference 2169: note = a, c, g, or t
  misc_difference 2170: note = a, c, g, or t
  misc_difference 2171: note = a, c, g, or t
  misc_difference 2172: note = a, c, g, or t
  misc_difference 2173: note = a, c, g, or t
  misc_difference 2174: note = a, c, g, or t
  misc_difference 2175: note = a, c, g, or t
  misc_difference 2176: note = a, c, g, or t
  misc_difference 2177: note = a, c, g, or t
  misc_difference 2178: note = a, c, g, or t
  misc_difference 2179: note = a, c, g, or t
  misc_difference 2180: note = a, c, g, or t
  misc_difference 2181: note = a, c, g, or t
  misc_difference 2182: note = a, c, g, or t
  misc_difference 2183: note = a, c, g, or t
  misc_difference 2184: note = a, c, g, or t
  misc_difference 2185: note = a, c, g, or t
  misc_difference 2186: note = a, c, g, or t
  misc_difference 2187: note = a, c, g, or t
  misc_difference 2188: note = a, c, g, or t
  misc_difference 2189: note = a, c, g, or t
  misc_difference 2190: note = a, c, g, or t
  misc_difference 2191: note = a, c, g, or t
  misc_difference 2192: note = a, c, g, or t
  misc_difference 2193: note = a, c, g, or t
  misc_difference 2194: note = a, c, g, or t
  misc_difference 2195: note = a, c, g, or t
  misc_difference 2196: note = a, c, g, or t
  misc_difference 2197: note = a, c, g, or t
  misc_difference 2198: note = a, c, g, or t
ttacttttcaatgggctgcgagggcttccagtccttgtagttctcgtagcggctctcgcggatcttggtgtgggaccagatctcgtccgccgtgggctgccagttggctgcatagttcttgcacttctcgcacaggtgctccacgctctccggcgactgcaggtcggtgctgtgggcaccggtctcgtgcaccatcttctgcagcagttcggggttttccagcatcgggcagggacgcagatggttcttgttgaagggctggccgttgtgataagccatgaacagcgggctgtgcagaatttccagaatgctctggtcgtggatgtttgcattggagtagtggatgaacacgcacggctctgcgtcaccggcagagttgatgtggaagtagttgcgtccgccggcaatgcagccgcccacgaactcgccatcgttctggaagtccatggggtagaacgggatatcgcactcttccgagcgcagatagcggatgcggtcgatcatatatttgcgctgctccggggtaggcatcagttccggtgctgcctcgttgcccacgggcatgtagtggaagtagaagccgaagtgtgcacccttctcacacaggaaacgcatgaactcatcgttggtaacagcttcgatgttatcgcgggtgtagcagatggacgtgccgaacacgatgccgtgctccttgagcagatccatagcatgcatgacagcggcatagtgcccctcaccgcggcgggcatcgttggtctccggggtgccctcgatggacagcatgaaggcaatgttgcccagacgcaccacctctttgcagaacggctcatcgatgagggtggaattggtgtagatggcaaactgcacatcgttgtgcttctcggccagcttgaggatatcagccttgcgcaccagcggctcgccgccggtcagcatgtacaggtatacgcccagctccttgccctcggtaacgatcttgtccatatcctcaaagctgaggttgttcttgttgccatactcgccagcccagcagcccacgcaatgcatgttgcaggcagaagtggggtcgaacaggatcagccacggaatgttgcactgatacttcacgcggttctcgcggatggtcttggtgccgcggaagaaagcctcgtagcccagattcagcgccatggtgcgggccacgttggggtcggtctgatccagcacacagttgatgagcttggaccacttgctgtcggggtcggtcagggtctgtctggcgtgttcgtaggcttcagcgctgaacgaactgccatagaactgctttgcaacatccaccagctgtcccacggttttctgacgatctttatcggcatgagaaagcaccacgtccaccattttaccaacggcagcacgctgcattttatgagtcaggctctcaacagaagtattcattatccttttcctccaaacggtatttttcggaaatctctttttctatttctatgccattactctaccactctatcccacaagttgccataaacagaaaaagcgccgtgatagaaaacccatcacggcgcggattatgataaaattttgtcgttcttccggttcaaccgtcctgttccagatggatcttattgctggcaaggcggcataacgcgcggcgcagatcgccctgcagcatccgtcccatacgttctaccatcacagcaggctcggtcttcatatcccggcggatccattccagcaccacgcccaccagcgcatatttgtaaaaatccaccacaaactgcttgtcatcgtcctgcacggtgatgtcgcggcattcgcgatccgcaaattccttcagcatggagtccagaagtttgtacagatactgctccacctgttcacgacccacagagcggtatacgttcagtaccagtgctttgttatcccggatctggtgcaggatgtccagaaatgcttcggtccatgtatcaaagctctggcggccttccatcgtcttggccgcatcttccatcaggatccagtccaccagatcgtaaatatccttaaagtggtagtagaaggtcatgcggttcacgccgcagtcctcggtgatatcgttgatnnnnnnnnnnnnnnnnnnnnnnnnnnnnnnnnnnnnnnnnnnnnnnnnnnnnnnnnnnnnnnnnnnnnnnnnnnnnnnnnnnnnnnnnnnnnnnnnnnnngcaatgcctgcaaaagcggcttcttccggcaaaaaagcggaaaaggcccttgattttatattcctctacgcttagaatgggagcagacggcggtgattgaagtgccgttttgagggagggtacaaactatgatggataccattggttttctgggctgcggcaacatgggtggagccatcgcccgtgccgtttgcaaagctgttgaccctaagaaggtttttctggcaaaccgcactgcggccaaggcacaggcactggccaaagaactgggctgcaaaacagccaccaatgccgaggtggccggtgactgcaacctgatctttctggcggtaaagccccagatgatggaagctctgctccagccgctcaaattcacctttgacgagcgccccagccgttttgtgctgtgcagcatggcagcgggcctttcgattgcccgtattcaggagatggccggtgaggactttcctgtgatccgcatcatgcctaacaccccggcttcggtgggcgagggtatgatccagtactgttccagcaatgtcaccgctgaggaagaagaagccttcctcaggatcatggctcctgcgggccgtctggatgccgtgccggaaagtctgatcgatgccgccagctgcgtttccggctgcggcccggcatgggtgtaccagtttattgaggctctggccgacggcggcgtggcctgcggcctgccccgcgccaaagcgcaggaatatgccgcgcagatggttctgggcagcgcaaagctggtgctggaaagcggaaagcatcccggcgaactcaaggatgctgtgtgcagccccggcggcagcaccattcagggtgtgcgcgtgctggaagaacacggcctgcgcggtgcggtgatggatgccgtgatcgcctcgtacaataagacaaaggaaatgggaaagggttaaggatatcatgcgcatcgttgtaaaagtaggcacttctactctggcatacgccaccggacggctgaacatccgccacacggaacagctggtcaaggtgctcagcgacctgaaaaacgagggtcatgaggtcattctggtgtcctccggtgccattggcatgggcgtgggcaagctctcactgccaacccgcccaaaggacaccaccaccaagcaggcctgcgccgctgtgggccagtgtgagctgatgtacacctacgaccggctgttcaacgcctacaatcacaccgtggcgcagatcctgctcaccggcgtggacgtggagcacaccgaacgccgcgtgaactttcagaacaccctgtcccgcctgctggagctgggtgccctgcccatcatcaacgaaaacgacaccgttgccaccgatgagatcacctccattggcgacaacgacacgctggcggccatcgtggcctgctgcgccaaggctgacctgttggtgctgctgagtgacatcgacggcctgtacaccgccaatccccacacccacacggatgcaaagctcatcccgctggtagaggagatcacccccgaggtgatggctctggccgatggtgccggttcggcccttggcaccggcggcatggccaccaagctgcgcgctgcccgcatggtaacgggcagcggtgccgatatggtcattgccaacggcgcacacccggagcttttgtacgacattgccgcaggcagatccgcaggcacccgctttgcggcccgcaaggaggactgaacacatgaccacacaggaaattctggaagccgcccgcagcgccaaaagtgcccttgcgctggccgataacaccgcccgcaacgcggccctgctgggcatggcagatgcgctgtgcagcgcagacgatcaggcggccatccttgctgccaacgctgaggacatggctgcggccaaggggcacatcagcgatgtgatgctggaccgtctggccctgaccgcaccgcgcattgaagccatggcgcagggcatccgggaggtatcttccctgcccgacccggtgggccgggtgctgaaccgggtggagcgccccaacggccttgtgatcgaaaaaactgccgtcccgatgggtgtgatcgccattatctacgagagccgccccaatgtgaccagcgatgccgctgcccttgccatcaagagcggcaatgcctgtatcctgcgctgcggcaaggaagcatggcgcagtgctcatgccatcgtcaccgttctgcggcagggcctgaaaaaggccggtctgcccgagacagcggtctgcctgatcgaggataccacccacgcttctgccaacgctctgatgaccgctgtaggctatgtggatctgctgatcccgcgcggcggtgccgggctgatccgtgcctgcgttcagaacgccaaggtcccctgcatccagaccggcaccggcatctgccatgtgtacgtagacgacaccgccgatctggacaaagctctggacatcatcgagaacgcaaaagccagccgccccagcgtctgcaacgccgaggaggtgtgccttgtgcactctgccattgccggggagttcctgccccgtctggcccagcgccttggcccggaccgcattgcaaagggtctgcatccggtagagcttcgtcttgataagcgcgcagcctccatcatctccggcacccctgccggagaaaaggactttgacaccgaatttctggactacatcctcgcggtcaaggtcgtggacagcgtggaggaggccatcgggcatattgctgagcactccaccggccacagcgaggccattctgacccagacacaggcccatgccgacctgttcactgccgcagtggacagcgccgccgtgtatgtgaactgttccacccgctttacggatggcggtgaattcggccttgggtgcgaaatgggcatttccactcagaaactccacgcccgcggccccatgggactggccgagctgtgcagctacaagtatatcatccacggcaatggtcagatccgctaaagcccgctgaacccacctttccagtgcggaaatcgggagtgagcgttttctccataatattcataatttagaaacgaaactgaaaagctttttccgaaacaggctggtgcgatttgcgccagcctgtatttttgttttattcccatgaaatgttctttcagcaaagacaaaaactgaattatgttttcaatctgccttttctgttcgctcattgatatggatgattgtatcccagttttctgcacttctcacaaagatatagtcttactttctccattttgttttgtaaaaagtacaagagcccccttgacaacccctatttcgatgcggtaaaactatattggaaaacttgataacgatttcacttcatttcactttccaatgagaaagttgttcgtcacacacaacactatacttggaacaaaggagagagcaatatgacgatcgccattcttgcacacgattcccgcaaagagcttgcactgcagttctgcactgcttacagcgccattttgtccaaaaacacagtcattgctaccggtaccaccggacggatgctggcgcagactaccggcctgcccgtgcactgttatctctccgggcgcttgggcggtgtgcagcagattacttcccgcattgcgtgcgacgaagtggatctggtgttgttcttccgtgacccgctgaaagcggatgccgccagcatcaccgagcagaatctgctccgcctgtgcgatatgcacagcgtacccattgccaccaacattgccaccgccgaggtcttactgcgcggtatggatcagggcgacctggactaccgcgaggggatgcatcccgctcttgtggagccaatgcccaccgtgcagcgccacgccgtgtgatgaatcgtgtatagagtatcgggaaagagacagcgccgcaggaaacttcctgcggcgctgttgttttttgttttgcttttatttcagtaaagcctgcagcttttccagccggcggacggcttcgttcagcacatcggtgccgcgggcaaagtgcatccggatcaggtggttcaccggctcccggaagaagctggagccaggcacagcggccacgcccacttcccggatcatccactcacagaactgcaggtcggtccagcccttgaactggggcagcgccagaaaatcggaaatatcgatcatcacaaaataggtgccctgcggaacattgtgcttcagccccacacggtccagtccggccagaaaatgatcgcgcttttcggtgtaaagggcctgcagctcttcgtaatagctggcgggcatctccaaaccggccacagcggcctcctgcaggggtgcagccgcacccacagtgaggaagtcgtgcaccttgcgcgcgccctcaatgacctctgcgggtccgatcagatagcccagacgccaacccgtgatggagtaagtcttggagagcgagttgcaggtgatggtgtgctcaaacatgccgggcaggcttgccatgcagatatgctctgcgggcgcatagatgatatgctcgtacacctcatccgtcaccacaaaggcatcgtactggatggccagctttgcaatggctttcagctcgtcgcggcggaacaccttgccgcagggattggaggggttgcacaggatcagcgccttggcaccctcggcaaagcccttttcgatcaggctggtgtcaaactcataggtgggcggcaccagtgggatatagatgggttccgcgcccgaaagaatggcatcggcaccgtagttctcgtagaacggtgagaagatcatcaccttgtcgccggggttgcagatggtcatcatggcggccatcatggcctcagtgccgccgcaggtcacacagatctcggtgttggggtctacttcgtggtgcagggcagggctggtcttttttgccagcgcctcgcggaagttttgcgcgccaaaggtcacagcgtactggtgcgggcctttgtaagctgtttcggccagagcgtccatcaactgcttcggcgggtcaaaatccgggaagccctgcgaaaggttgatggagtcgtactgattgttgatgcgggtcatgcggcggatgacagaatccgtgaaggtacccacacggtcacttaaaacaggcatgcgctctcctctttttagtccttaaaataagccttctggatggccagcagcacgcctgcacggctggcagcaaagttcagaccgccctgcaggtagcaggtatacggctcacgcagcgggccgtcgcaggaaagctcgatggtgctgccctgtgtaaagctgccgcttgccatgaccacctcatcagtatagcccggctccggagaaggttccggggcggcatagctgtccacgggacttgcagcctgaatgccctgacagaagccgatgagcgcatccgcagtgcctgcatcaaagcaggtgacgatgtcgttgtggtcgtcgcagtagcgcggcactggattcttgcccagcagctccagcatacactgggcgtaaatggcggtcttgatggcctcgcacaccacgccgggcgcatagtagaagcccagatacatatcacggggcgtttccagcgtgcagcccagatccttgccgagaccgggcgcattcaggcggtaagcgcacagctccacaaggtctttgcggcccgcaatgtagccgccggtgggagcgatgccgccgccggggttcttgatcaggctgcccaccacaaggtctgcgcccatctgacagggttcctgcgtctgggtaaactcgccgtagcagttatccacaaaaataatgatgtccgggtttgcggcgcgggcggtatccgcaatttttcggatcgtttccagatcaaaggcattgcgctgcagatagccgcggctgcgctggatgtggcacacctttgcaccgggggccttttgggcgatcaggtcataatccggggtgaagtcggctttcagcggagcttcatcgtaccggatgccgtaatccatcagggtgccggtgcccctgcccttgccgtccagaccgatcacaccttccagcgtatcgtagggacggccggtggcagccagtagggtgtcccctgcccgcagcaggccgaacagcgccacagccagcgtgtgggtgccgctctggaactggctgcgcacgagggcatcctctgcgcccatcacctcggcaaagatctgctccagctttgcgcgaccggtatcccacaggccgtagccggtggtgcccagcatatcggtggaggacatctgggtatccgcaaaggctttcagcattttgagctggttaaaatcgcggatctcctccatatggcggaagtagggctggcacagctccatagccttttcgtccagcgccagaacttcgggtttgtaattgaaaaagtggttcagcattgacat

SEQ ID NO: 595 - DNA, 19634 bp, unidentified
  source 1..19634: mol_type = unassigned DNA
gtcggtgagacacagatcgttgtcgatggtcttgggcacaccgatgaaccgcacactgctgcccacctgctgcccgtagcgggacaacttcgcgatggtatccatcgagtcgttgccgccgatgtagaacacggcgcagatgtcgtacttgtcaaacagggtgaacagcttgacgaacggggtggcatcggtgtccgggtcgggcagcttgaagcggcagctgcccagatagctggacggagtacgcttgagcagctcgatgctcatgcggtcatccagcaggatgttgagctccagcagctcctccttgagcagaccttcgatgccgtacttcatgccgtacaccttgtctgcacccagactgcgggcggctttgtatacgcccgcaaggctggagttgatcacggcggtagggccgccgctctgaccaatgatgatattcttggccatggaaacctccttcagatcatttaaaatgtatcgctgccgggcaaacggttttccgcaccgtccggtaaagtagtctgtcgaccctgcactgccaacagaccggaacggcaaaacagccgcctgccgcaactgacacaaaaatatttgcagcttgtgtattcgctttttgtaaaatgtgcaaaataagctgcaatcctattgtacccgttttgcctgttgtatgcaagacccaattggttgcacaggcaaaaaaaatatgataaaatgggtgcgcactccaaaattaccgggcagaagtacctgcctgttgggataattgcagaaagctggacagagattatgggcatttcacacgaatatcattcggcaccccggcggcgcacgggcgggggcatcagcggcaaactgcggctggcaggggtcattgtggccatcctgctggtcgcctatgcggtgaccgccattctggaaaagggaacagcggcggaggacagcaccccgcagaccagcgcgggcggcattgcgcagaacattctggcgccgctgcccatgcagggcgagacggactccggcagcgagagcgcagcaggggacagcggcacggtgcaggcggtgcagctggagagcttcggccccgcccggcaaaccgatggcgcttataccattaaggcgtatgacgccagtgttatccggcagccgacctgcggtcaggtagacctgagctacttttcggacgccgcttttctgggcgacagtctgacggtgggcttctcggactatcagatcaatctgagtggcgcgctcatctgcggctatacgggtgtagggccggacgccatcgtcaaccgcgccgccgtcaagagccccacccgcgggcaggaggtggcactggatgtgctggcagcggcgcagcccaaaaagctgtatatcctgctgggcaccaacaccctgaccaccttgggcgctgcggaccgttttctggcatactacggacagatgctggacgagctgcgccagacgctgggcgaggactgcattatttatgtacagtccatcccgccggtacggcctgcggcagcggaaaaaaagccgggtcttgcctcggacgtgctgcgcggcgtgaatgagcagctggcgcagctggctgccagcaagggctgcgtttatctggatctgtgggagacactggctgacggcgagggcaacctgaaagagatgatcgccgcaccggacggcgtgcacctttcggccggcaacggctacggtgcatgggtcacttacctgcgcaaccacgcgaaatattccgcaagtaacccgtggatcatgggcagcgcatacagcgcagaataaccagagcaaaggacagctgcaccaaacgatgcggctgtccttttttttgcgggttcagcgggatgtttttgcacaaaacagtcttttctgcatggaaaaggctgtctgccaaaaagttttagttgacagaaaaggcgaatcatgttattcttttgttgattttgagagacaccgccttgcagagtcttttcaaagcaatttactcgggaccgcccaacggggctaaggccatacggacagccgggtccactgccgaccggcggcgcaagctgccattattgattgagttactgcgagacaacgatgaaacgggtttcaaaccttgcgttggctcgcgtgccgcagcgctgctgttttgattagaagcagcggctgcccttgcggcaaagctctaaattttataagttggttcctttacaaccatgaaattgcgcagcctatgcgcagacttgtgaaacggtcaataagagtagtaaaagtgtagttgctatatagactctcatcaccccgtctttttggatcacagataacgcgcagcaccggcacttatggctgggtgctttatcagcgcggaaaaagctgttccaagcgcaggtctgcacatttgtgcagtgtctgcgcttttttgttgtgcaaaaagagaacagggacggaggaaaagatgaacgagaacaaagcacgttcccggctggatcagcgccgtgcgcccatctacgaggcgctggagcggttccggcagatgcgggtggtgccctttgacgtgcccggtcacaagcggggccgcggcaacccggagctgaccgcttttctgggtcagcagtgcgtgggcgtggacgtgaacagtatgaagccgctggataacctttgccacccggtgtcggtcatccgggaagctgaggagcttgccgccgatgcctttggcgcagcacacgcctttttgatggtgggcggcaccaccagcagcgtgcagagcatggtgcttaccgcttgcaagcggggcgatgagatcattctgccccgcaatgtgcaccgcagcgtgctgaacgcgctggtgctgtgcggcgcggtgccggtgtatgtgaacccggaggtggataagcgtctgggcatctcgctgggcatgaagcgggagcaggtggcaaaggccatcaaggagcaccccaacgccgtggccgtgctggtgaataatcccacctactacggcatctgctctgacctgcgtgccatcgtaaaaatggcgcacgacgccggaatgctctgccttgcggatgaagcccacggcacccacttctactttggcggcggtctgccggtgtctgccatggcggcaggcgcggatatggcctcggtgtccatgcacaagagcggcggcagcctgacccagtccagcctgctgctcatcggccccaatgtgcatcagggctatgtgcgccagatcatcaacctgacccagaccacctccggcagctatctgctgatgtccagtctggatatctcccgccgcaatctggcgctgcggggacggcaggtgttccatcaggtggcagacattgccgagtacgcccgcgaggagatcaacgccgtaggcggttactacgcctttggcaaggagctgtgcaacggcgattccgtctttgactttgacaccaccaagctcagtgtccatacgctggatatcggtcttgccggcattgaggtctacgatatcctgcgcgatgagtacgatattcagatcgagttcggcgatatcggcaacatccttgcctacctgtccatcggcgaccgtccgcaggaggtggagcggctggtcagtgcactggctgagatcaagcgccgctaccgcaccgacggctcgggtctgctgagtcaggaatacatcgaccccgtggtggctgccagtccgcaggaggccttctacgcccccaaaaagagcctgcccctgcgggagaccgagggcatggtgtgcagcgagttcgtcatgtgctatcccccgggcatccccatccttgcacccggcgagcgcatcaccaaggagattttgaactacatcgagtacgccaaggccaagggctgcagcatgaccggcccggaggaccctgaaattttgcacctgaatgttctggcatgaggagggaaaaagatggaattttggttttcagagtttcacaccccggatgtgaagcacagcatccgggtgaacaaacagctctactccaagcagagcgattatcagcgcattgatatctttgagaccccggagttcggccgggtgctcacgctggacggcaacgtgatgctgaccgagcgcgatgagttcatctacgatgaaatgatcgtccatgtgcccatggcggtgcacaaggaagccaaggatattctggtcatcggtgccggagacggcggcgtggtgcgggagctgacccgctacgaccgtgtggagcgcatcgaccttgtggagatggacccgcaggtggtggaagcctgccgcgcctatctgcccggcaatgcctgccgtatggatgaccgccgggtgcatatctactttgagaacgccctgaagtatatccgccgctgcgaggaagaatacgacctgatcatcgtggactcctccgaccccttcggcccctccgagggtctgttcacccgcgagttctacggcagctgcttcaacgccctgaaagaggacggcatcatggtcaaccagcagggcagccccttctacgccgaggacgccagcgccatgcagcgcagccacaagcgcattgcgtccaccttccccatcagccgggtgtatcaggcacatatccccacctttgcggcggggtactggctgttcggctttgcaagtaaaaaatatcatcccatcgatgatttggacgcagagtcgtggaaggcgctgaatatgcgcacccgctactacaccacaaaactgcatatcggagcattctacctgccggcttttctggaggagatgctgcgggaagtggaggaacactgatgcaccccaacgttgagaactttatcggctgcgacagcagctaccgcgccgccagcatcgtgctgtacggtgcaccttacgattccaccaccagctaccgccccggcgcacggttcggcccggcggctatccggcacgagagctatggtctggagacttacagcccctaccagaacgccgacctgaccgattttgacgtgttcgacagcggcgatctggagctgtgcttcggctccagcgagctggcgctggccgatatcgaggctcgggcagaggaaattttgaaggacggcaagttccctctgctgctgggcggcgagcatctggtcacgctgggcgcggtgcgggctgcggtgaagaaatatcccgacctgcacatcgtccacttcgatgcccatgccgacctgcgggacgactatctgggcgcgaagctgagccacgcctgtgtgctgcgccgctgccacgagctggtaggggatggccgtatccatcagttctgcatccgcagcggagaccgggcagagttcgagtttgctgcccagcacaccgagatgcacaagttcgattttaccggccttgccgagctgaccgcacagctgtgcgagagcaaggtgccggtgtacctgaccatcgatctggattgccttgacccctcctgcttcccgggtaccggtaccccggaggctggcggcgtaagctttttgcagctgctggatgccatccgcactgtgaccaaggccaacatcatcggtgcagacctgaacgagctggctcccacgctggacaccaccggcgtttccaccgcaaccgcctgcaaggtgctgcgcgagaccctgattgcgctggacaagggctggccgggctttcaggtataaatacgaaactaccattttacagataaaggagtaaccgatatgagcaaagttctgatcatcggctgcggcggcgtggcctccgttgccatccataagtgctgccaggtgcccgaggtgttcaccgagatctgcatcgccagccgtaccaaggcaaagtgcgataagctggctgccgagctggctcccaccaccgccaccaagatcaccaccgcacaggtggacgcagacaaggtggaagaggtcatcgccctgatcaaggcttaccagcccgatctggtaatgaacatcgccctgccttatcaggatctgaccatcatggatgcctgccttgcctgcggcgtcaactacatggacaccgccaactacgagcccgagaacaccgacgacccggagtggcgcgccatctacgagaagcgctgcaaggaggccggcttctctgcctactttgattacagctggcagtgggcctacgctaaaaagttcgaggaagccggcctgaccgccctgctgggcagcggctttgacccgggtgtgacccaggcatactgcgcctacgccaaaaagcacgagttcgataccatcgacaccatcgacattctggactgcaacggcggcgaccatggctacgccttcgccaccaacttcaaccccgagatcaacctgcgcgaggtgtccgctcccggcagctactgggagaacggccactgggtagaaattcccgctatgagcatcaagcgggagtacaacttcgatcaggtgggcgacaaggatatgtacctgctgcaccacgaggagatcgagtctctggcaaagaacatcccggaggcaaagcgcatccgcttcttcatgacctttggtcagagctatctggatcatatgcgctgtctggaggacgtggggatgctgtccaccacccctgtcaacttcaacgggcaggagatcgtgcccatccagttccttaaggcgctgctgccggaccccgccagccttggtccccgcaccaagggtaagaccaacatcggctgcatctttaccggcaaaaaggacggcaaggacaagacctactacatctacaacgtctgcgaccatcaggagtgctacaaggaagtgggctctcaggccatcagctacaccaccggcgtgccggctatgtgcggcgcgctgatgctgctcaccggcaagtggaacaccaagggtgtgcacaccgtcgaggagtttgatcccgatccgtatctggatgcactggacaagtacggcctgccccgctccgagagccacgacccggctctggtggactgatgcgggtgcgcgacagccgcccgccctttgcggggctggcaaacctgtccgaggagcagctgcaccgcctgcccaccccctgctatctgctggacgaagcccagctgcgccgcaacggcgaaattctgctgggtgtgcagcagcgcactggctgccgcatcctgctggcgcagaaggctttttccaacttcaatgtctacccggtgctggcaccctatctggcgggtaccgaggccagcggcctgtacgagagccgcttgggcagggaagagctgccggagaaggagaatcatgtgttctgcgccgcctaccgggcagacgagtttgaggaattactgcaatacgctgaccatatcgtgttcaactcgcccagccagctggcaaagttcggcccggcggcaaaggtagcgggcaaaagcattggtctgcgcatcaacccggagtgctccacgcaggaaggtcacgaaatctacgacccctgcgcccccggcagccgtctgggcaccacccgtgcccagtgggacgccgccgtggcggcgcacccggaactgcccgccctgctggacggcctgcacttccacaccctgtgcgagcaggacgcggatgcgttggcggtgacgctggcagcggtggaggaaaaatttgcagacctgctgcccaagatgcagtggctcaacttcggcgggggacatcacatcacccgtccgggctacgaccttgctacgctggaaagctgcatcctgtcggtgcggcagaagtacggcgtgcaggtgtatctggagcccggcgaggcttgggcactaaatgcaggctatctggtcactaccgtgctggataccctgcacaatggaaataccagccttgccattctggatatgtccgcagcctgccacaccccggacgtcatcgagatgccctaccgtccgccgctgctggatgccggtgaggcaggggagaaggcgtgcaccgtccggctgggcggccccacctgccttgcgggggatatcgtcggggattacagctttgacgttcctcttaccgagggggataagctcatctttggcgatatggccatctacaccacctgcaagaataacaccttcaacgggatgcccctgccgcccatttggctgctgggcgcagacggcagctgccgggagctggtgcatttcggttatcaggacttcaaaatgcgcttgggcgcgatataaaagaaatagcaaaagggtcatcggcacagcgatgacccttttgctgtctctgcctgatggtgcaattgacaaagcgccggcagaaacatataattgagtttataagaaaactatcgctatagaaccgacaaaagaggagaaacagcgcgtgcgcacattgtctgagatcattgtcaagcgggattattctcaaaaatcgccgtcttccgtattttataaggatagccccttctggcaaaagctgatctgcatctgctatgtgggttttatcgcactggcagcgcttggcgactggaaaaccctgcagagcattttgggtggtctgcctaagattattactgcgggtgttatcggcatggcaattgtctatggattcatatacccggatctggaacgagtaaaaaaggtgttctggcctgcactagtctatatgtccctgatcgcgatgctgttcttgtggtccattgttatctggctgatggacttcagcgcaatctccacgatgatccgggcctgctccaagctgatgttccagagtatttcaattctgacagcggtgagcggagtatttctgctggggtcaaagacgatcgatctgtttgccattgcggcgtgtctggcaaacgcagccatcatggttctggaaatcccgacctatggtctttcagcaagcatccagtcgcttgtgcagtgtctggtgacctttggcgacgcagagggttatgccatcaggctggaaatacacgatcttacctttgtgtttggtcagctggtgctttattatgcagtgtttgccccgcatgacacaaaacaggaaaaacgccgccgccgtcgcctgcttgcagcttgtacgtttttcttttttgtaggcatgaagcgtatcgccattccggcggtggtgctgtttatttttgtggcgctgatcgtccgccgtttcaaagacaaaaagaagctgctcactctgtggggcgttgcgtgggtcgtgtttttctttttgtatatttacgcggtccggaacggaaccgtttcaagaatcctgaacatggcaggcattgatatgatgggccgtgattatctgtggagtcttgctaacgactattatacctattctattacctattgcgggcatggctttgagtttgtggatactattgttaccggctggtataatgcaggaatcattaacgagccttttcctttccacaacgacatcttaaaggtgtttgtggaaatgggctttcccggttttgtgttctggacgggcatccaatatatcattacgccgatcttctggatgcattacgcggatgaggacaccgcgttgctgtacctgagcaatctcagctacatgacaatgacataccttacggacaacacatccttttctttctggtgcacgatggcgctgcggctgctgccgctggcctattcggtacagcggcgcaagccgccaaagccgcaggtctggaagccgaagaataagaaggaaatgcaagaccgcatccgcatcatgatgcaggaaatgtaaaaggaaaagcgttataggtttgaacgattggggcggaagtgcttgtgtgcttctgccccaataaaattatacaggtgctgaagtacaatagccagtatgcaggtgaaaaacagcacgccccagaagtagaagatgtcaaaaggacgagcgtttgttatatagtagttctttgtgacatcgagaactgcaaactgaaatagatacaggaacggagcatagggattcattgtgcggagaattcgattgccaactttgaatttgtccagcagccagatcaaaagcagaccgaagaaaaggttcatgagattgtggaaaattaagtctggtaagcttttttcgggtacggttatggcaagaaatgaaaaaacaagctccgcagcgatgatcgaagacagggcatatttcttttttaaaaaagcggcaaaaaagtctgcatattcatagataattactccaaagggaaaagctagctcgctgatgtaataaactctgtggtttaagcctgtaacagcatcaaagatgcagaggatcgcagtgatgatgaatataacgccggaaagaaaaacgacacgccggaatttattttttgggaaaatgcggtgggaaacatagaagatcagatacagtacagtcaacgtaggcatataccagttgaccagctgaaaaatctgatgttcgtctagcatcgtgttccgaatgagcgtgctcacaacgcttgaaaacagggtgatccatagcagatcgacgatctttttccagaagttgcgcagatagttcggttttgaggcaacagagcaagcaagcccaaagccggatgaaataaagaaataacctacgcccaatgtggagatcttgcttaacggcaatagaatatgcggcataggaaaaaacggatttgtacaatgggaaaagatgatcagtactgcaaaaacaaagcgcagctcatgcagacggttcatggtctttttgatatcggcaccggttggacagaactgcatatttaaaagacaaagcactgctaaaaaaagatataaaaaaatatagggcatatgcggcctcctgacgtttttgcttctgtgtcttgcgaatctctaaagaaggagaatacaagtttatcttatcataagctgctttgcatggcaagcagacaataaataagcaccacacatttctgtgcagtgcttttctttctggtggagattaccgggccgattcaaatcacggtgaccctcttgcagtccatgcacggcgctctcccgggtgagttaaatcctcactcgtttagcactaacaaaaaagcaccacacatttctgtgcagtgcttctctttctggtggagattaccgggatcgaaccggtgacctcttgcatgccatgcaagcgctctcccgaacggtatcgaaacacaccccccacacgaaagtgcggggacaggcttaatatcgcgttgatacgttctatccaccaaaaaggttcacagttgcatcctgcttccaggaatcatgctccgcctacaaggcaattttaccacccaattttcaagtgtgtcaatgggttttgctcagagagaaggtcatttacgagaaaagttttttctgacagcttacttagcgcaattttgattttacacatcaaagttgcgctttttattttccccaaaagtattgacaaggaggttttctcaacgatgccgatgtattatcgctgttttttatccatgaaccaaccgcatgacccttgactacttctacggacagactggagagcttttctccttctaccgcattccaaaggctctttttcaggagcagcggttccagagcctgtccacggatgccaaaaccctgtatggtatcctgctggaccgcatgagcctgtcggtgaaaaacggctggctggacaagcaaaaccgggtgttcatcatcttcacaatcgaggatgtcaagagggcattgtgttgcgcagacaacaaagcaaccaagctgctccgggaacttgaaaagtttggtctgattgaacgaaaacgccgagggcaaggaaagccaagtttggtatatgtgaaaaacttttcggcagaatcttcaaaagagagtgtcaagaatcgtgataatgacgattcttgtggcttcaaaatcgcgtgtcaagaccctgcaaaatcacggtgtaataagactaaagagaatgatactgaaatgagtgagactaatctcttctattccgaagaatcggatgggatgagtaagcgcgcccaactggaagaatatttttcgcagtctttggaggtagaccttctgctccggctctgcccggatgatgaggacaccatctatcagatcgtagatttgctggtggacacctgtgctaccaaccgcaagctactgcacatcgccggggacgataagcccgccgaggtggtacgtagccgatttatgaagctgaacgccgaccacatcaaatttgtgttgaagtgccttgcagagaacagcagcccaatcaggaacatgaagcaatacctgctcgcttctctgtacaacgcaccgaccaccatgcagctttactatcagaatcagaccaaccacgatttagcgaaacgggggtgataaaaatttccaaaaaagcaaccacgattgccattgtcaaccaaaagggaggcactggcaaaacaacaacctgtgaaaatctgggtgttggccttgccgccgagggtaagaaggtcctacttgtagacgctgacccgcagggttcactcaccattagtatgggctggcagaagccggacgaactgcccgttactctttctaccctgatgcagaaagccatgaacgaccagtgcattccgcccggtgaaggtgtgctgcaccatgcagagggtgtagacctcatcccggccaacattgagctggcagggctggaagttgcccttgtcaataccatgagccgggaaaaaatgctgaagcaagtcttggacagtgcaaagcaggactatgactatattctgttggactgcactccctcccttgggatgctgaccattaacgcgctggcggcggcagacactgctctgatacccgtacaggcacagtacctttccgcgaaaggtctggaacagcttttgcagaccatcaacaaggtgcatcggcagatcaacccaaagctgaaaatcgaaggcatcctgctgacgatgacagataaccgcaccaactatggccgacaaatcgacacgctgatccggcaggcatacggaaagcacatcaaagtgttcggtcagacgattccccactccgtccgtgcagcggaaatcagcgcggcgggtaagagcatctttgtccatgacccgaaaggcaaagtggcagaagcctataaatctctgacgaaggaggtgctggccgatgccaaaaagcagcgtaaacgccagtctgagcagctacgatgatattttttccaccgaagaatcccggcaggaagaacagcgcgagcaggtgcagcagattccgattggagagctgtttccattcaagaaccatcccttcaaggttctggacgatgattctatgagcgataccgtggaaagtgtcaagcagtacggtgtgctttcgccgttgattgcccgccctagaccgaagggcggctatgaaattatctccgggcaccgccgtcaacacgctgcggagctggccggactggaaaccctgccggtcattgtgcgccagatggacgatgatgctgccataatcctcatagtagatagcaatttgcagcgtgagcatattctgcccagcgagagagcgtttgcgtacaaaatgaagttggatgccatgaaaaatcaaggtacaaggtcagatttaacttcgacacaagttgtgtcgaagttgcggagcaatgaaaagctgggtgcagagaataatcaaagtcgtgagactgttcgacgtttcatccgtctgaccaaccttattccagaactgctggacatggtggataacaaaaccgtgtccttcaatcctgctgtggagctttcctatctttctcctgaacaacagcaggaagtgatccgggcaatggatgatacccagaactttccttctgtctcacaagcaaagcgtatcaagaagctggctcaggatggaacttttacaacggagacgatcgttgccattatgggcgaggagaaaaagagcgagcttgatacggtgaccatcaaaaatgacaccctgagaaaatactttccccgcagctatacgcccaaacagatggaagataccatcatcaagctgctggagcagtggcagaaaaagcgtcagcacagtgaagaacgctgacaggatatgaattggaaagacccggttgggtctttttctttagaaaaaaggagaaaatgcctatgaaaaatgattctaatcccattattcgttccgaggaagtcaccattgatatgcacatctgtgcggcactgtcggagagccggagcagtggcgagatctattttgctgccatcgccccggatatggaactgacagtcatcacgctggacgaggctcccgacattctgccctgctttgacgaggatgatgcgtacctgaacatccccgacagctcgctgctgctcagctacaacccggcgcaggtgctgaaactggcgggcaagcactatctgaccggtccggtcattctggtgcgcaccaatatggatggcgagttcatctcgctgacgatcgatcaggtctacctctttcagaagtacctgatgcgccacagcgttaccctgatggctgacggccagaagcttccctgcatctgcatggagtgaggtgtccttatgtcaaccagagaaaaaagagaacagcggaaagcccggaaagcgaggtttgctgcaatgtatccgggcttgtcacacgatgaaattatcgaggagtgcatcaaggagctgaatcactatttcgaggttgggccggaagttgcccttatcagtgccgaaaaaggcgttcagtgtgtgccgtttgatgaatcacctcaaaagaagtttccttactttgagggaacttacgaagtctttgacgttccgcatacggatttccagattcgctatcagccagagcagattctcgctgcaaacggaagaaaaatcctgaccggcacggcatttctttgccgcaaggaaaatgagcgttgtcttatgcttccgagccgatatgaaaaggtcgatgtggaagattttattcgggagcatctgtttttctacgatgatgctgagacgcgccatgttggtgttgagctttcggaggttgcgtaatggagttcgtgaaagactttctgatctatgaagccggtgcgctctgcgggttctttatcgcagccctgatgaatgcggcacgcgccggacaggaaatcgccatcaaatttgaggaggacaagcatggagcaggagaagaacaccctgacggtgctggaaatcgcaccggggcattacccgaagcaggtcgagatcgaccctgacctgaaagccttgcagcaggcagtcggcggcaacatcggtgccagctacccgttcagtgatcctgttgccatcgtctacaacgatgagggtaagctgatgggtctgccgctgaaccgcgccctgcgggacggaagcggcgaagcctatgatgtggttgccggaacctttctggtggtcggtctgggtgaggaagattttgcatctctctccccggagctggcgcagaagtacgaggagcattttcatcagccggaagattttatccagctggggcatcggatgatgattgttcgtgtaccggatgaggcagtcagcccggaagatagcaaaactgcaccgccgaaagatgccggacatgaccgttgagcctgattctctgctctggaggtgatggaaatgcaggaagaaatcgagcacaagacggtcaacttcgccatctcgactgcgaagctgtctgcccgcacactcctgagaggggcgcagttctttctgcgccagtacgacaagagtgcatcgcagggcaagcagtccatgaagcggctcatacggcagaaccggggtgtgaccaatctggaaatcgaaaagactggcatcaaggattttgaccgctgcgctaagcggtatcacatcgactacgccatccaaaaagacctgtcctgcacaccacctcggtttctgattttcttcaaggcacaggatgcagacgctctgaacgctgcgttcaaggagtattcggcagcagtattgaacaaggccgagcgtccctctgtgctggccaagctgcacgatctggcacaggtcattgccaacctccccgacaaagtacggcacaaagaggaggaacgtggcttatgaataagaaaaagttcaccaagctgctggccttgtacctgccctatctggtgattgggctggctgcgaccaatcttggcgaggcatggcggcttgccgagggcaaggaactgggcgataaaatcatgtcgctgatgggcaccattccggtggcgtttgcaaaccctctgcccagtctgcatccgcttgatttgctggtgggtttatgctgtggtgctggactgaggctggccgtctatctgaaaagcaaaaacgccaaaaagtaccgacacggcatggagtatggctccgcccgatggggcacaccggcagatattgcaccatttatggctccgaaatttgaggataacatcatactgaccaaaacggaacgcctaatgatgagcaaccgtccacctgaccccaaaaatgcacgaaacaaaaacgtgctggtggtcggtggctctggcagcggtaaaacaaggtactttatcaagccgaacttgcttcaatgtacgtctaaaagccatccagtttcattcgtggtgactgacccaaaaggcggtctcattcaagaatgcggccttgccttgctgaagaacggatataaaatcaggacgatgaacaccataaattttcacaagtccatgcgctacaatccgttcgcatatatccacgaggaaaaggatattttgaagctggtcacgacccttatgactaacaccaaaggtgaaggtcagggcggcgatccgttctgggacaaggcggaacggcttttgctgacctcgctgattgcctatctgcactacgaagccccggctgaggaacagaattttgctacgctgctggaaatgctcaacaccatgcaggtgtccgaggaggacgaggattatcagaatccggttgatttgctctttgaagatttggcaaaaaagaagccaaacagctttgcagggcggcagtacaagctctataaattggctgccggcaagaccgcaaaatccatcctgatttcctgcggtgcccgcctttcgccctttgacatccaagaaatccgggatgcgaccatgtacgatgagctggagctggataagctgggcgaccgaaaaacagccttattccttatcatgtcggatacggacagcacgtttaatttccttatcagcatgatctactcccagcttttcaatttgctctgtgacaaggcagatgatgtgtacggcggaaagctgcctgtccatgtgcgctgcctgatcgacgagtgtgccaacattggccagattccgcagctggaaaaactggtggcaaccatccgcagccgcgagatttcggcctgccttgtgctgcaaaccagaagccagttgaaagccatctacaaagacaacgcggataccatcgtgggcaacatggacagtcaaatttttctgggcggcagtgagccgacgaccctgaaagaactgtccgaagctctcggcaaagagaccatcgacggcttcaacacctcggacacacgcggcaatagcccaagctatggcaccaactaccagaaacttggccacgagctgatgagccgggatgagcttgctgttctggatggcggcaagtgcatcctacagctgcgcggtgtccgcccatttttgagcgacaagtacgatttgacccagcatccgaactacaaaatgacatcggatgctgacccccaaaatgctctggatattgaaaaatatctgagccataaagaaaaaatccacccggatgaccagttcgtcctcgtggatgttgattcactcccgcccgcctgacaaagacgagcggttattttttaccctgacccaaaaggcgcgccagcaaatcagcgcttgccgcagcttgcggcagttcatcactggatttcaggtgtgtgcagggtcactttttcaaaacaaaggagatacaattatggaatttttcaacagtgcggtggatgttctgaagactctggtcgttgctctgggtgccggtctgggcgtgtggggtgctgtcaacctcatggaaggctacggcggcgataatccctccgcaaagagtcaggggatgaagcagctcatggctggcggtggtgtcgccctgatcggcattaccctgatccccctgctgagcggtctgttcggctaaaaactgcgggcggtatctgccgcccatacatattgctccaactcaccgtggctaacggtttttgtacttgtggagcgaattttcaagccatacgttctatcaaaaaggagatgtttctatgaattttttgacgaacctcatctttgttctcaacctgctcaagaccctcatcaaccatttcttttaaggtggtggctctgagtggaaactgttctcaaagcgatttcagattggatcaagtcgctgctgactgcggccatcatgtccaatctgtccggcctgtttgatgatgtcaatacacaggtgggcagcatcgcacagcaggtcggcacaaagccatccaattttgagccgcgcgttttcgccatgatcgaggctctgtcccgcaatgtggtgctgccgattgctggcatcattttgaccttcgttgcctgttatgaactgattcagatgatcacagaacataacaacatggcaaattttgagcctgtcctgctgatgaaatggatcttcaagactgccatttcggtctggatgatctccaacaccttcgacatcatcatggcggtgttcgatgtgacgcagcaggtggtggcaaattccagcggcattatttccggcaacacacgggtcaacgatatcgggctttctatgctgcaatccagcatgatgcagatggacgtaggccccttgttcggactgttcttgcagtcctttttcatcggcattaccatgcgtatcctgtccatcgttatttttgtcattgtttatggcagaatgatcgaaatctatatggccgtcagtctggctcccatcccgatggcaacatggggcaaccatgagcagagccatgtgggacagaattatcttcgctcgctgtttgcgctgggttttcagggcttcctgattttgatctgcgtggcgatctacgctgtcctgcttcagaatgtcgccatatccggggatgccatcaactcgatctggagcatcgtggggtacacggtgcttctttgtttcagtttgttcaagaccagttctgtggccaagagcatactgggtgcccactgattggaggtgtgattttttggcagcatatatttctgtgccgcgtgatctgaccaaggtgaagtccaaagtgatgttcaatctgaccgcgcggcagcttatctgctttggtgcggcggcagtcgtaggagtgccgctgttctttgtcctgcgggacaccgcaggcaattccggcgctaccctcggcatgatggcagtgatgctccccatgttctttttggccatgtaccagaagaacggacagcccgccgaaaagatcctgcggtactaccttcaggcacgttttgttcgcccgaaggtgtgtctgtacaagacccgcaactactatgcactgcttatgaagggagatgacacccatgattccatttctgaaaaagaataa

SEQ ID NO: 596 - DNA, 5399 bp, unidentified
  source 1..5399: mol_type = unassigned DNA
atgaaactgggcattcttggcacgggtaagatcgtgcaggaatttttgccatggcttgtggagcacacgccgtttactgtgcaggcggtgtgcagcaccccacgctcggcggcaaaagccgcagagctgtgtgcgcaatatcagatcccacagcacaccaccaattattttgagctgctgcaatgggtagacgtggtctacatcgccgtgcccaatttgcagcacgcccgctacgcccgggtggcgctggaggcgggcaagcacgtcattgtggaaaagcccatggcggtgactgccgccgagaccgaggaactggcagcgctggcacagcgcaagcggctgttcctctttgaggcgatgaccacccagtaccagcccaactacgcaaagctccgggagctgctgccccgggtgggcacggtgcgtatggtgcagtgcagcttcagccagtattccagccggtacgacgccttttgcgtcgggcagaccccgccggtgttcgacccgctgtgcgcgggcggcgcactgatggacttgggcgtgtacaacgtcagctacatcgtgggtctgtttggtgagccgaataaggcggtatatgccgccaacatggagcgcaacatcgacaccagcggtgtgctgatgatggattacagcggcttcaaggcggtaagccttgccgccaaggactgcgcagcccctgcccgctgcatcattcagggcacaaagggctacattttgcaaaaatccaccccgaactactgcggcggcgtgaccttccatcccaacgagggcaaggaggagcactataacctgaacggggaccgtccccggcaggcggcagagttcgaggccttttaccgcgccatgaccaccggagatcaggagctgtgcgcccggatgctggacaccagcatcgcggtgagccgggtgctcacggtggcgcgccgcagcgccggggtgcgcttccccggtgacagattttaacgcatttttctctggaacacgccctgacacaataacgcgcttccaagagatttgaatattcacctaaaacccgcacagagcgggcaggtttgcgccgtatccgacaaaaagggcggaacggcagcaggaggaaaactgaattatgaagaataccaataccaagactctgactcgtgtggccctgctggtggccattgaagtggtaatgaagcttgtcggtctgggcagtgtgcccatgggcccgctgtacatgagcttcctcacccttcccatcgctgtgggcgctatcaccatgggccccgccgtgggtgccctgctgggcggcgtgttcggcgctgtgagcttctacgatgccatcaccggcgcatctgccatgaccggcgcactgttccaagtcagcccgctgaacacctttatcctgtgcgtgggtatgcgtgtgctcatgggtctgtgctgcggcctgatcttcaagggcctgcagaagctggataagtcccgcacctggagctacatcgtcagcgccatgaccgcacccgccctgaacaccctgttcttcatgggctacatcgtgctggctttctacggctgcgactatgtgcagaatctggtgtccgtcaagggcgctgccaaccccttcatgttcgtggtgctgctggttggtgtgcagggcgtagccgagtttctggtgtccggcattctgggcggcatcgtcgcccgcgccgtggcaaagttcctgaagtaagaccggctgcgcaccatgtcagggcggcgcatccgtgtttagaatagaaaaatgaatgctcctccggcaacccgccgggggagttttttgttggtagacttagaaagacccccctcaggctcactgcgttcgccagattcccccttttgtcacctacggtgacaaaagggggagtgtggcatcgccgcaggcgatgacggaaggggtgccccgcaacgcggagcgcattcaaaattgtccccctcacgcattttcatcttcctgcataggatggcgcacagcggaaaaggggagatgacggcatgagacagacaaagcggtttgcggtggtgggcagcgatgcccggcaggcggcggcagggcgtgcactggcgcgggcagggtatacggtgggcggcgtgcagcagctgccgcaggcagactgcatcctgctgccgctcccgctggaacaggctgatttgccgctggcgcagctgctgggcgcggcaaagcccggtgcgctggcgctgggcggtaaggtaacggacagtgcaaggaccatcgcccgggcggcgggggtggagctggtggattattttgcccgcccggagctgaccgtgtataatgccatccccaccgccgagggctgcatcggcattttgctggagcggcgcagccgcaccctgtggggcgcggcggtgctggtgctgggctttggcccggtggggcgggcgctggcggtgcgtctggcggcgctgggtgcgcgggtgaccgtggcggcacgccgcccggtgcagcgggcaatggcagaggagctgggtctgcgggcagtgccgctgacagagcttgccgcagcagctgccgcctttgatacggtggtcaacaccatccccgcgccggtgctgacggcacaggtgctggcggcgctgccaaagaaaagtctgatcgtagatctggcttccaagcccggcggcacagactttgccgcagcccggcggctgggacacacggcgctgcacgcgctgagcctgccgacggtctgggcaccggaaacggcaggggaggcgctggcacgcacggtgcaagccattttgcaggagcgggagggaacggtatgaccacagagaaaaagggctgtcttgcgtttgcggtgtgcggcagcttttgtacgctggaggacgccttgggtgcggcgcaggcactgacggcacagggctggacgctgctgcccattatgagctttgccgcacaactggatacccggttcggcaccggggaaagctggcggcagcggttgcaggccgttaccgggcaaccggtgctggacaccttgcaggcggtggagccgctgggtccccggcggctggcgcaggcgctggtggtcgccccctgcaccggcgcaacgctggcgcggctggcggcagggctttcggatacgccggtgacccttgctgccaaaagcctgctgcgggtgggcagcccggtggtgctggcagtctccaccaacgacggccttggcgcttccggcgaaaacatggcgcggctgtgccagcgcaagcactattattttgtgccctacgggcaggatgacccctttgccaagccccagagcctgaaggcagatcttgccctgctgcccgccgccgtggacgctgctttgcggggtgagcagctgcagccggtgctgctgggacaaaggaatgcgtaaatcccttttcagcggggaaaaaatgtggtatactccaaatgatgccttactggcataaaactgacaagcggagtataccagatgaaaaaatttaccgcagcactgtgcactgtgctgcttttgataggcactgtgctggtgcccggcgcggcagcagccggcccggcgctggccaatacccgggcatactgcattatggacgcagacaccggccttgtgctggcgcagcagaatatggacgaggagctgcacccggcctccattaccaaggtgatgacccttggtcttgcctgcgaaaaggcgcagggagactgggatgacgtaaagctgaccgtgagccacgaggatgtctactcactggcgggcacggattccagtcatatcgccctgcgggaaggggaagaagtccccttggtggatgcgctgtacgctacccagatggccagcgccaacgatggtgccaacctgctggcagagtattttggcggcggcaccatcgcggacggcgtggcggccatgaatgcacaggtggaggagcttggccttgcccacacccacttttcaaaccctcacggcatcagcgatgaggaccactacaccagctgctacgatatggcgcagattttgcgctgggcgctgcagcagccggggtttgaggatgtgttcacccgcaaccagatgtacaccatgcagtccaccaacatccagccggtgatccgttacttctcccagcaggataagatccgcatcggctccagccgctaccacatcgacagcgtgctgggctctaagctgggctacaccaacaccgcccggtacagctatgtctgtctggcggagcaggacggggtgcgcctgatctgtgtgacgatgcaaagccagctgagcaccgataaatacaatgatgtgcgcaccctgctggactacgcctttgccacctacaaaaactacacccagctgcccggcggcagcgtcaccgcacagttggcagtggcgggcggcgggcagagccttggtacggtcaccgtggccgaccccggggtgaagctgctgctggccgagggcttatccgcgcaggatgtgaccgtggatttggaactgccggagcagtatctgctgggcgcagaacccgccgtgtatgcggtgtataccctgaacggcggcgcaaagcaggagagtaccagcgtgcgggtgaaggccgagatcaccggtcttgccgagctgctggagcagagcgccggcaaaaagctggatactgccaaggacgtggagccgggcagcagcgcatggctgctggcgggcatctcggtggggtgcaccataggcgcagccgtggtcacggtgctggtgctgcggctgcacgcccgcctgaaaaagcgccgcaaaacggcaaagcaccataacaaagcgtaaaagcctgttcaaaaccagacttttccagataaagaaaaaactttcagaaaaaaagagaggtacaatatcatgggcaagtttatttttacgcagaccgagatccccggcgtggtggtcattgagccgcaggtgttcggcgatgaccgcggctattttatggagacctaccagaaggaccagttcgcagaggctggcatcgacaaggaattcgtgcaggacaaccagagccgctccacccggggcgtgctgcgcgggctgcacttccagaagaaccatacccagggcaagctggtgcgcgtgaccaagggtgaggtgtatgatgtagccgtggactgccgtccccacagcgctacctttggcaagtgggtgggcgtcaccctctccgaggacaacaagaagatgttctatatcccggagggctttgcccatggttttctggtgctgagcgatgtggcagagttctgctacaagtgcaccgatgtctacgaccccaccagcgagggcggcatcccctacgacgaccccaccgtcaacgtgcagtggccggactgcggctgcgagcacaagaccagc

SEQ ID NO: 597 - DNA, 57012 bp, unidentified
  source 1..57012: mol_type = unassigned DNA
ttatctctcaaccttttctttatcctgtacgctgatatctttcccgatctgtacctcgatcagtttcagttcggtctgtgccataactgtatggcagcatcctgcgggcattgtcactacatcacccactttcacggactgctctacgccatctataactgttctcccctcaccggagatcactatccacacttcattgcggtgcttatgattatgataattcatagagtgtccctcattgagcgtcaccttaattgtcatggatcctgcttccacgtccaacacccggaagcttccccagctcttctcagcaaacatgatctgctgttcgaacttatctacaaacggtttgatatatgagctctgttctttatctgaaactaaaattccctccggggatgcagatattactacatcatgaagtcccatggccagcaccggaacatccatctcattcacaatgtgcacgttggagcagttatcattcaatactccctttccgataaccgaatccttcattgcttctgtcagagtattccacgtaccgagatccttccattgtccggcgaagcgctgtacctgaatcttatcttctttctcaactaccgcataatcaaaagaaatctttggtaatgtcgcatatttagcaaacaggtcgtgataatccgtaaaatcaatcaatttgtgggcgatctccatgacatacttcaatttgtatgcaaatactccaccattccacaaagctccctgtgcaatatactccttcgccacttccattgtcggtttctctttgaaagtagctaccattgaagtctgatccgaagataccggaataatgtatccgtatttttcactgggatacgtgggttcgattcccatcaataccagattagcttctcccttatctgcctgaatcgacagttgcttcaaggcctcaaaatagtcctcttccacgtaagggtctacgggacatactacgaccgactcctccggagacactttcattatgtctaccaggtaggccgtcgccaatgcaatcgccgggaacgtatctcttctgcaaggctctacagaaattcctacatcttctcccaactgattatgaattgcagagacctgggtcttgcttgtagcaatcgtaaccgttgcctcggcatctaccttcttaatctgatgataaactctctgcaccatggattcataagatccatcttcctgtttaaaaatcttgataaactgcttgcttctaatatcattggacagcggccaaagacgtttccctgatccgccggataataacacaatgttcatacttatctctccgctctcataggattattcaaaaaatcttcataagccaaccggataccatcctccagttctgtcatataatgccagcccaatttctctgccttgctgacatctaacagttttctcggagttccgttcggttttgtggtatcccatttgatttctccggtgtagcccacaacttttgcaaccagctctgttaattccttaatagtcagttccttgcctgtaccggcattcaccgtctcattaccactgtagttattcatcaaaaagacgcacagatttgcaaggtcgtctacatataagaattcacgaagcggtgatccgtctccccaacaggttacttctgtcttgccctccaccttagcctcatggaaacggcggatcagcgccggtaacacatgagaatgcgtcggatgataattatcattaggtccatacaggttagtcggcataacagagatatagtcggttccatactgtttattcaaaaattcacaatatttcaatcctgaaatcttagccagcgcatatgcttcgtttgtcttctcaagttcagaggtcaacaggcaatcttctttcataggctgtggtgccatgcggggatagatacaggagctgccaaggaattccagctttttgcaaccattcttccatgctgagttgataacattcatttccaatgtcatattaaaccacataaaatcagccagtgcattctggtttgcaataattccacctactttggcagctgccagaaatacatattccggcttctccgccgcaaagaactcttccacgtcagcctggcgggtcagatccagttcctgatgtgtgcgggtaataatattcgtatatccctgacgattcaattcgcgtacaatcgctgaccctaccattcctctgtgaccagcaacataaatcttagcatttttttccatcatttttcttttaccttcttaatttactttactacgcctttttccaagtattcttccagattggtacggatatgctcctccgctctctctacagcaaccttttccatatcgtgttttgtcataagctctacaagttcttcaaaacttgtcttcataggattccagcctaattcggtcttagccttggtaggatctccccaaagattgactacgtctgtcggacggtaaaaatcaggacttacttccacgataatccgtccattggccttatttattcctttctcgttcagtccttctccctgccattccacttcgatgcctgcataatggaatgcaagtgttgcaaattcacgaacagaatgctgtactccggtggcgattacaaagtcctccggcttttcattctgaaggatcagccacatacactctacatagtccttcgcatatccccagtcacggagagaatccagattgcccaggtacaacttatcctgcttaccctgtgcgattcttgcagccgccagtgttatctttctcgtaacgaaggtctcgcctctcctctcactctcatgattaaacaaaataccggaacaacagaacatattataagcttctctgtattcctttacaatccaataaccatactgcttggcaactgcatacggactgtaaggatgaaaaggagtcgtctctctctgcggaacttcttctacctttccataaagttctgaagtagatgcctgataaatacggcacgtcttctccagtccacatactcttactgcttccaatactctcaatacgcccgtagcatcaatatctgctgtaaattccggcacatcaaagcttacctgcacatgagactgtgctgccagattatagatttcatccggtcttacttcaccaattaattttaccaggctaatcgagtctcccagatcgccaaatttcaaatggaaattaggggttccttccaaatgcgcaatacgttctctataatccacggaagatcgacggatcataccatatacttcatatcccttttccaacaataattcagccagataagaaccatcctgccctgtaactcctgtaattaatgctctcttcatttacgctacctccaaaactatacttcacgatttatgttcatataagagattataatataataaaaaaagaaaccgaagtcattttcttcggtttctcttgtacttttttcggattttcaccacattgctctatattctgtaggtgtgacaccttccacacgtttaaacattctgctaaaatatgctgcgccgtttattcccaccattgttgcaatttcttctgttgtcttatctgtaaaccgcaacaatttttttgcttccgtaattctcacagaaacgagataatcctttaggtttacaccatattgttccttaaacatctctgacaggtatgttttgttaataaagaattgtgccgacaatccgtccaacgtaatgtccgttgcatagttactgtcaatgtactcccgcacatccattacctggacacgctttcccttcactgtatcatcttccggattccagctgtcttccatcagtaataccagcagctgtgacagcaatgcattgatttccatatcacgaacataagaatccgaagaggcaatggttttcagcttccgcaatatctccatatatgtttccctattttgtgaccggaatatagttctgccgccacgtgctttatacttttcatagatgcgtaccatctccggtccattaaaatggcaccaggacaacgtccacaaatccttgtctgttgtatgtgcatatggcaatgcgcaatccagaaagacagagtctcctgctcgtagttcgtactccatgccaccgtagattagtctccctctaccggatactaccgtaaaatacaagtaagactccagatttgatcgggaagacgtatgaggccttagtgcagaaagagttcctgtttcctgtaaaaataacaacgtggaacgtgcaaaattagatgcagtgtatatgacacgatcggatgaaaccgaaggtgaatctgtatctgtaaaataattcatagtatcattatctaccaatgttaatattgctgtataacagtataacgtagccaccagtctaatatatccatccggactagtcagtcattgtttcttcttaataaatttttatgtaaatatgtataaatttcaaatgtaatcgcacaaaaaataatgcaaacaatataaatcaataaaaaagctctccacgaaagcaatcccatttttccaatcacaaaatttgaaacattttctataataataggatgcactaaatataaacaaaatgtaaatttgctcaaatatgtcaaaatcttttttgctattgcatttatatttattatcggaaaagccaatgcaaatattaaacatgcagtaaaaatcaattcatatccaaaaaattgcatggaggtcagcacggctactaccaaacatgccattcccaatgcgaacctgttcttctcatctttaacaaaataaaccatacatcctaacaagaaaatgtatagctggtttattggctccccgcctgccaacatatcggctccactcacatttcctatcttcgaaaacatattaaaagttatattaatcatatatgagtttactaacataagaaaaattgtaacgccaaaaattttccaaaatttattaaatattttataaatcagaggcgcacatatataaaaaaaagcaaatgcactcattgaccgtagtgcaaatctattattccaccatgcaaaattatctgatggtaatacatattgcaaaaaaaacacatacctaatatatctgattccacaagggcctttaaagaaattaaaaatttcgggtatactcaatccttgactatgatacatatatatactgtaaatatagtcaagaaataatgcccaataatacattggcaaaatacgctttgcacgtcctatatagtaatcttttacggtgccatccatgctaaaaattctatggcacgataccatagctaaataaccgcttaaaataaaaaataatggaacccctttagctccaacatccgtccatttattcagccccgtccattgacctacatgcaccattaagaccattagtgcagcaataattcttaatatatctaaagacatatttttacttgctatacatgctttttcatttgtcatttatcaaatctctcgctttatttctatccactggtgaatattatggtgcaacgaatcaatacttaaaatatcaaccttatagaaaccgtatggtatatacttcataataacttattactctgtcatttttcttcattgtagctagggaaccattatactaatttttgatatatctttcctctatttgcaatgtaccattacttttaccaaattatctggtttgtctctcataagataaagcgcatcttcaactctctctaatccatacatatgatgcgtaattaatggagatggatcaactcttccattctctatcatagacataattcgttctattcgagttcttccaccctttgctaattccatatgcaaagttttcccacacattcctcttcctccggaaaatataggtaatggcaaatatcccttaccaccaaaataattaatatttgaaatagtcccaatgccatatctggtcatgtcatatgcctgttccaacacttcaactgtgcctcctgcaattatagtggaatctacacctactccatgcgtaatttcctttatctgttcaacgatatctccttccttatagcttaatacttgatttgctccatattgctttgcaagttctacgcaaaccggccgtgttcctattgcaataatctttcctgctccacgtaacctagccccagctacagccataagaccaatcggtccgattcctataacacatactgtatcaccaaattttatatccgcatactctgctcctgtaaatcctgttgtaacaacatccacactcattaatgcctgttcatctgttattccctcaggaatatgtgccaatgtagtgtctgcatctttaattaaataccgttctgaaaaaactcctggttgagttcgccctaattgatgtccagaaaacggtgctgatgcatgtctatcatttccctcctgaatgcttttctctctccaatctggtgttattgccggtaccgcaactttatctcctattttgaagtctttaacgtattctccgactgcaacaatgcgtccaattgattcatgtcccaaaaccaaattaggttgtttgggtgagccccctccaaacactgtatgtacgtccgatgaacaaggagtcaccgcaataggttctagtattgctccatacggtgttaactctggctccggagcattataccattgaacttttcctggttctgccaaaacaaacgccttcataatcctgcctccctagatatcctactcattgtttctataatcccatctccaaattctgtaaagtgcatctcgcctattattttcaacactttatctatattgggtaccaaattgggagatccttctgggtttgttgccacttcaccaaatacatattttccttttttgccagaacattcatatatttcttccacaaactcacgaagtacacgtgtatccttacttgctatattataggttcccgtaatacagttcttttctagtaactttaggactatctccacaaaatcattaatatataaataattccattgctgcgtgcacggtcccagatgaattatcccgccctgattcattttatgaacacagctatcaatcagtgttccctctctatctccatatccatatacactaaaaatccgaaggtgaataaattgcaattgtctttttgcagcttccactattgcccatcttgaaaaatccaattttgcttttccatatggagacaatggcatacattgatcatcctcatgtatttcatcaaatttagggccatactctgcttgtgatcctggaaaaataaacatcttacattttaagtattgagcaatatccatagctttcttggcatattcaacatttctttgctgtatctccgtattagctcttccttcattgcctgagccatcccatgcaaagtgtataaaaatatctgccttgtcaaccgtatcttttataatatccaagttttgtaatgttccatatattttgataaagcttttctcattcggaagcttatttatattggctgagtcttctcgtactagcgcatatactctatatccgctctctaacaactttttcactaaatttcttcccagaaaactagtcgcccctgtaaatattactactggcattttttaatatcctcatacatttgtaaatcttttgccatcattactgctatttctatattttttccaaatttttcatatataatagatgctatctcttctgtatatccaggggccattataataatggcatctaccggattattcactgcgtatgcaggcgatacaattggtatatgtgatgctggtgcgtatttcccctgcttaaaaggagccgaatcaattatataactaattttctcttctaaatgggccgtggaagcgagcgtaaatccctgatggctcgccccccatatggcaactgtttttccttgcatttttaaattatcaatatatccatttatctctttacaaatttttctataactttctgctatttgagaaacatttattttcttcgttttacgaacaataacagataaggtatccctatttacaatttccttttccaacacttcaaatccatttttatttaaaacaaattctaatgtttcaaaagtataatagactaaatgatctcgaataaattcataataaccgttattttccaaaatgtattctaagctgggaacagttattaatcccattccatcctctgacaggttattataaatcccctgtagcattccgttcggatccggttgatgttcaaaaaaattaaaagacaaaaagacatcaaaaggtccctcttctattatattatccgctgtccctaaaaactcttcccgtacatttattccctctttctgagcactctctaccaaatcatgcttatgttctattccaaatgcttgaacagggaactctttgagtacaccaagaaattctcctctaccgcatccaacttctataaatttctttcctgttaggttatacttctctataagatgagcatattgtctttttcgaagattaatcatcgttgtagaaaagcctcctgagcggatcacatctttgtaatatttaacaggactacagtcaaattgaaccaatccacatctaggacattgaaacaattcaagcgtgattcctcgatcctgctctacctgcgtaccatcaggaatatcttgtgcagatgccggcatatcatcaaatttcaacaacggattaatatctaattgtctcccacaaactaagcattttttcataatagtaatcctttccgtctttatgtttccaaattatttaattttccgacattaatggaataaacatatttttctctaattcttctctgggtaagaacggtgctagatcctccaacggagggcttaccaaagtaccatcagaaagtcgttttgtgctacttttgggttcccaaacctgtgtcgtatctgtaaatatttcacaaaataccggtccattttctgccaataccttgtcaacaacttctttcatttccttattgctggaagcacaataatatgaatatccaaaagcttccgcaattttcttaaattccgggaaagaaagatctcctgactcaggtccgattccaatcttgctgtgctccttgaacaaattattttgggtaattcgaatggaatgatagccattgttattaatcaggaacagcttaattggtaatcgattcgtcaataccgtctgcaattcctgaaggttcatcataatactcccatcaccttccaagcaaatagttgtacgtcttcctcctccgatacaagtgccaattgctgctggcaagccatatcccatactagcaactgcactattattagccatacgactgcccttttgaattacataagcctgatttcccacaacacagcaagccccattggaaactgcagtcaaactattttccggtaatctgctgcttaaatatctcacaaatgcatatacatttgcagtctctccattctcttcccattgtctggatagaactgccggatattcctttttccatctctggcaggtagcgagccattccttgcttctattcacaggatactcttggccaatgctttcattcatcctatttaaaaagtcttttgcatctgcccatattggcatttcaacatgaagtgttggctttttcatttctgcctggtcaatatctaccatgattacttctgctgctctcgcccaagttttccaattataccctacttgtcgaatagatattcttgttccaattgcaaggattaaatctgcattctgaattgcccagttgcctggtcgatcccccatattgcccgcacgaccacaatataattcattatcatcttctatgaggtctactgcattccagtatgtcacaacaggaatatttaatttttcagcgacttttcgaaacacttcatagcctccggatagtctaatgccataccccgcatgaaataccgggcgttttgccatccgaattttctccaataccgtctggattgtctgttcactcactttaggcggaagtaatgcatcatcctctgaaggatcatagccttccaactcctctgtttcaatataccctccttggaagtttactggaatatcaatccataccggtcccggccttccggtagttgccagatgccatgctttctccaatgcgtaacgaatttgcttgggatcctctatcattacggcatactttgtcataggtgttacagatttaacgatatcatactcttggtcacccatagctcgtagcggcataccatctgtaaatttcattgcatatcttgcagttgtgtcatatcttacttgtccactgataataaacattggaatagagtctagccatccacccactactccagtcaatgcattcgtacctcccggccccgtagtcacacaaacagctgcaattctattatctaaacgcgcataggcctctgctgcaatagcacaggcctgttcatgatgattatatgttacttttaagccttctttatgtcccaatgcatcgttaagatgcattgcgcctcctccgactacactaaaacaatctgttacaccgtgatttataagaaaatccgccacataatctgctaatctctgcttcattcgttccccctatgaaagaattcactgttttctttattttgttactgcttctttgataatctgtgccatataatcaatcttttcgtctgtcattccaggataaacacctacccagaaagaattattcataatataatccgtctgcttcaaatctccaataatgcgataagcatccgttccacgaatctgatcaaagcaagggtgcttgataatattaccactaaataaaagacgggtctgaatattatgatcctctacatattttgtaacctgatttctggtaagtccggattccgggcgcacactgacaataaatccaaaccaggaaggctcactattttcagcaggctccggcagaatcagtttgtctgctatcgattccagttctttgtgcaatctgtcccagttatgacgtctggcttcaataaaagccgggaacttctttaactgttcgacaccgacagccgcctgcatatccgttactttcaagttataaccaaaatgactatatacatacttatggtcatagccttgaggaagttctccaaactgaccatcaaaacgatgaccacataagttgtcacgtccggaagggcaaacacagtcccgtccccaatcacggaaactcttgataagacgatttaacgacgggttgttggtatatacacagccgccttcccccattgtcatatgatgaggcggataaaagctagatgttcctatatctccccatgtgccggagaatctcgtctcgccatcaatcgtatattttgttcctaaagcatcacaattgtcctctaccaaccagagattatgcttatcacaaaattcttttacatgctttaagtcaaacggatttcccaaagtatgtgcaatcattactgcttttgttttagggctcaatgccgcctctaactgtgtgacatcaatgttgtactgtgggaccgttacatctacaaataccggtatagcaccatactgaagtgccggtgtaatcgtagtcgggaatccagctgcaaccgtaataatttcatcacccttcttaatctgacgatctcccaattcgggtgcagtcagtgtcatgaaggcaatcagatttgcagaagatccgctgttaacaagattagcaaattttacgccaatccattctgcaaatttcttttcaaattcatcagagaagcgtcctgtagtcagccagaaatccagcgctgcatctacaagtgaacacatttccttctcatcatacaccctgcttgcataggaaagtctgtctcccggatgaaagggcttgtcctgctccggttttttaaaatcattataatattccgcaaccaaagatttaatctgttctctggcttctgcttcattcttccattttgtcattgtttttcctctcttattttgaatttaaaaattcttctatctctctattcatgcaagctttgacatcttcaccctgcatccagcatttactccattctactactttttcaatagcagtatccagattccaatgtggtttccatccaaaagttgccttcagtttagagcaatccagttttaagaaattggcctcgtgcggtcctccatcataccggttaatccatttaagcccttctccccacttacttacaaatagatccaccaacgctcccgtctgaaaacaatccacatcatccggtccaacattataatacccagcatacttaccatcttcatattgtttcgctgcaatcataaggtatgcatataaaggttccaatacatgttggtatggtctggtagaaaaaggatttcttacaatgatgtcttcctgcttctgtgctgcacgaatacaatccggtataattctatcgttggcaaaatctccgccaccaattacattacccgctcttgccgtagaaatagcaacatttccatctgaaaagaaactatttttataggaatgtgtcaccagttctgaacaggatttagaattcgaatatggatcatatccatccagttcctcattttcccggtagccccatgtccattccttattcagatacactttatctgtcgtaacatttaggaaagatcgaaccgtattgctgttccttacacactccaaaatattaacagttcccatgacattagtctcataagtataccttggatccttataactgtctctgacaattgcttgtgctgccaaatgaagcacaatttcagggttcgcctgcgtaaatgcctcctttaatcgttcataatcacgtatatctccaattatcgaatgaatatctttttcaatctccgcaatcttaaacaaagacggttctgtaggtggcatcagtgaataaccggttacttctgctccggcattcaccagcatgtggcaaagccatgatcccttaaagcctgtgtgcccagtcacaaatactctttttcctttatagaatgataaatcaaatgtatcaggcatatttagtcctcccactttttccaaggagcattcccttttgcaagcattttctccagaatatccatttctcgcttattatccatgcactgccaaaaacccttgtgcgtataggacatcaactgcccctgctctgcgagtctttgtaaaggagactgttccaatacacaactatctccatccagataatcaaagatttccggatttagtaccatgtaacccgcattgatcatagctccatcggtagccttcttctcacgaaaggaacgaactgcattgtctcctccaatgtctagaacacctttctgctgctcctggatgaccgcagtaagggtagcaatcttaccatgtgtctgatgaaatttcaacagatcccgaatgttaacatcacaaaccccatcaccatatgtcatcataaatggctcattcccaatatacggttgaatcctcttaatacgaccgcctgtcatagtattcagccctgtatccactaccgttactctccatggttcgcaatgctggctgtggattataacctttttggttccatccttgaaatcaaatgtaacatcgctattatgtaaaaaataatcatcaaaccattctttgataacatattgcttgtatccggcacatatcacaaaatcattaaatccataatacgaatattctttcattatatgccagaggataggttttcctcctatttctatcattggtttgggtttaaattgtgactcttctgaaatacgagttcccagtcctcctgctaataatactactttcatttttctctctgccttcctatatttatactttaaatcgttcattgcctatactttttgactatattgtaccaatatgagaaaattcttggcattttttcttgtagcttaatcaatctaatcatcataatacaatatgctttagacccatttatttcttttttcattgttagcatatattcactagccatttgtggcgtaatttttttagaagcaattcttgccaatagccttcttgaataccaatgataatatttttttgtttccctactcatattttttagaagttcagaataatagttgtccttattcaaaaaagaaataagtgaaattagcattttttctaagttactcgagctatcttggtttgcatatattctataatttattagcggatattggatttcagcaattttccctcccattttttctatatccatgtataggactacatctgcgcatggtcccgcttccactcttaaatataaattgttatcttttataaaatcagttctatacatagttgccggaaatacaatatttttttgttttccaatataatacgcaaagaactccgtgtttctccaagtttttatctcacctgtcttatgattattttcttttgtcacctcatctttctcgtttattatgtttgccaaacatgaaacagccatacaattcctgtcatattccatatactcaatttctttttctataagattttcgtgtaaaatatcgtcatcatgaaaaacacaaaaatattttgcttcacagtttttgaaaccataattaatattggcacctccgccaatattttgtgtatgtcttatatattttattctagaatcattcaatgataatacatacttctctgtatcatctgaagagcaattatcaagcactatcaaagtaaaatcactatatgattgccttataatgctgtcaattgcacgtttcaaatattgaaccctattataggtcgttatatatatacacaaatcattcatctttcatcaatcccatatcaatatattatttctacctatatattccattttcatagcataaaaaatgttcaaaacctgcactcattataaatgccgcctcacttcctgagttttcagaacaaatgaagcaattgcatttagataataaataaatttctgtaatataatctttttcattagcgaaggccttttcatacggcagtttacttattctttcttctccatctagcatgtctttataatccactctatctctatctaagcaacatgccttttcaccaaaactatcaaaaaaagcctttactgtttcattcgtttggcatgtaaaaaaaactgtatttacatcccactcctccatatattttttcacatcatttattaactgcgtgacaggtgtctggatagagtgtccccagataccttgcggctttatttctgcaagtttttgatatccttctctaattgatacccccaacacctttttttgagctagtaattctttgtatttttcttccacatattttttcatgttttcatttaaacgaatgtactctctagctattcccctccaataggaaattactttttcatcgttgcacctcataatacttacgggatacattcctccaccattgttgcaaaccgatacgttcattgatgtataatcaatatcatctaggccataccctttcggttgttcaaaaaagagttcccaagtatttatattttctggtgctggcataaaatcattttttattgtcatcctgtctataattggaagttttcctgtttctatcgcatattcaatggatttaagaaaaacaatataatccgaaaaggtacctacttttttatttaatcttcgtaatataagaatatcctctttagcctttccctgtatatcattcaatttttcaattgtgctttccctttgtattctatctaattcatctctgtatgatttttttacaatatatttaatataattttttattttatagaaattactttttctcaccttgtttcaaaacctttctaattgtggtgtccttcaatataattaataccacaaaatatattattatgccaacaatcacttgtcctattatggtcatccagtgatcatgcagatttattttaaaaatactaatatacattaccactgatgccacaaaatagcgccacgatatgtttactatttcttttaaattaattaggtctttcgaataatttgcaaccatgagtaatattgccaagctggctatcaccgatgctagtgccacccctactgatttcatatttctaaccaatattaggtttagtgccacatttaatattgcactagtacttatagcaatattatattctttttgttttgcccttgcaatcaaacattgttgtgcaataaaattgcttaatacaacaaaaagaacatttaagcataaaatctttagcaattccgcgcttttatcataacctcttccaaaaaaagctggtacaaaatcatttgctatagcgcttactccaaatgtcattggaaaagcaatgagtgccgctccacttattgataccatcaaaaaatcttttgtttttctgttatcactattcgaatataaatatgctactcttggaagtattgcattgcttacagcatttaacatactcatacttaactggcatatcttattagcctgttcatatactcctatttcatatgcatttttcccaactgctcctaaaatcgttttatctgttgatgcaaatattgtattaatcaatccaggcacaaaatacaccatagatggttttaaatgtcttttaagattaagctcactaaatttaatccattgtatcctttttaataccgcagggtatactactacataaccaattaaagtagataattgcatgattatcgcatataaaactaaatccttctcgcttttaataagagcaagaatcataataatatttatcaagcgaactagtattgtccttattgcattaaccttaaactcctctataccattgaggaaccatgacacatccaccccaccactaataacattgagtagcatagcataatacaaattttttaacgtgcctgcttcatatgtgctaatccatatcatatatgccccggaacaaattatcattaagatgaactttagccaaaatatttcccaaaaaaacttgcttaactctcttttgtcatcccgaatcatagctatcttaatagttccatataatgataaccccaagcattctatcagtacaaaatacgaactatttgccaatgtataactatagttccctatcaattcagccgaaagaactcttgctatataaggtgaaataatcaaaggagctattacacttgccgtctgcatcaagacactgtaaataatattatatgatattttcttttctttcatttttcctcattttattaaatcagttattcttttaatgtaagcattaattgaaaattctttctgaaatgtttcagatgtaataaattcgtctgccgccttcaaatattcttcatatctttcttccgttatttcatctacatattgacatagttctttgatagtctgaaattttcttctatctataaaggcttctttgggaacataatcagtaatattttccgctccccaataaatcgggactactcctgcaaagaagcaatcaaatattttctctgtaatatatccttttttaccacacatattttcatagcatatagagtatttatattgagataatattcctaatttatcatctatcggtcctctatatgatttaaaattttccttttcccacccataaccatacaaatctaaattatacttattttgctctagatacttaatcatttcatagcgttttgaatataattcattttttccaacaccttttttattaccagcaataatagtatataattttttttctttaaaaggtacattataagatatctttgctggtatctgtgggtattgaaatttgtaatattttttattatctaccaaatcatcatcccaggtaagaatgtcatcaaaatattggtgatagcgaatatcataagactgagggcatactgtctcaggctcttgcattattaatattttttttaatggttttgaactttttattgctttttcaagatagtcttttttccattttctcttcaaataatatttgatataatcaataggtgacgacaataaccgtatagaattcttgtttaagtcttggaaaataatcacatcaatctcttcaaagtcgtacatatctgcagtatgcaaaaaatgaccttcttcttctaattttttcttcaataatatcccagggagcaataaattttgtccaatcttacaagcagcaggatcaaataatctatctttactatatacatctccatatatatttactattgcaatattcatcattttgcctttccaatgctatatgcatattattataaagtataaagcgctctcttatcccttgcttcgccaatatttaaagtatatatataattaaaagcaagcatcattccactctgtccataaaataatacatgccctgctccaaagctcaaagctattgaccatattataattaacgctccccataaactttttttagatacatcacaaaattttctcacataaaacatacaaactatgcagaaacccactaaccctgttctaaaaagcaggtcgagaaaatccatttccatattgggaaatccattcgcttctcctgcgaatccccatcccaatagcaaataaaatccattaacaaaaatagatatagcatcctccaatcttcttaatctcatgctgaacaagaaatccacagtagaatggctcaaccctttttgatactgccatctttcaaatatactagctgtcacattttgtatcttagtatatcccaatgcgcacataaatatcacaaggataattaacatgcacactcttatctttttagtgtattttttttcaaatatactatctataaaaaatatccctgcaaataaaataattgtagcatatcctgtttttgttcccatcaaagcaatgcatatacaattaatagccaaaagaactaatgtcccaatattgatttctttatgaagcttccaaaatagatacataaccaatccagacattataaatgaaatttcatttacagcataaaaaaagcctttccatcctacatttccgtcataagcatttattccatatccaaataatccaggagttataataagtatggggtatatcacagaccatgcatccattattctaaatatataagcatcttttatttttttttctattattaatagttccattaaaactatcataattatcggtgtaaataattttataatgtctttcacaccattaaatatatctacaccacttaccactgtttgcaagattgtaaaaagaagtagcatagtactcactattgcaaattttttttgagaattttgcgccaaaataaccaacattaatattaacaaaaaaaatctatatacctgcccaacaggtaccatgtcatgtaatgctccacttatagtatctactattggcattatcagtaataaggccaataaaattgtatatacattaaacctcaatctctttactacaatttttttcactttttttcaccaaacattttttatatagattagtaatattttgtgtcatagaagttgtggaaaaattatcttcacatttttttctccctgaaaatgctttttcttccaattccgttctatttgtgtaacacctatataattgttctgccaacttaccagggttattacaatctgtcaaatatccaccgtcatcctttactatttcaatcattccgcctacaggattaacaataacacaacatcctgcattcattgcttcaagaacagcaattccgaaagattcatattgggacggctgaacatacaccgcataacaatttaagacttctctaaccttattgctatacccttttagtgttatatttttcaagtttctttcatctatataactttttaacttttctctttccggtccttctccatatatatcacaatgtacttttacttccggatgctcttgcttcaatatatttaaagcctccaagagtttcatatgatttttaacaggtctaagataacctattgaacatattttcaatgtatcagaataataatccggaagcacatcatatttttttaattcaattcctgtatatacaacttccaatttgttattatctaccccacgctccacaaggatgtgcctaatagactcagatacggcaatacaacaactgcaatgcctatttattaaccatttttccaatttacaatagctgttggctataaattttcccttagacatctgatctacaagtacgtcaccatggataacgcctatttttttacaactgttattttctttaaccagcaaacttacaaatagaccattattactattgcaatgtactatagatatattacactcattgacatattttttcagagcaatcatatccgaaatgatatgtctacccatataaacacgtaatttcttatcagtgtttattttcgtgtctaaccaactatttgctcttaatacatagtgtacttcataacctttattttctaataattttcccagtgtaagtgtataactttcaacacctccagagagctttcccacacttacaataagtatttttaacattttttactatcctttttatactttattgccaatgataaaatctttctgtcatcaatcaaatacctttttgccagccttttgggatcttgtgtaatcctataaagccattcaaatccatgatttgccatccatttaggtgccctcttaatatttccagcttcaaaatcaaggcttgctcctagccctaagctaatgggcacccccagtcgctctcggttatgcaagataaaaagctcttgtttcggacatcccaaagctacaattaatatatgtggacttgcctgcttaatcgttttttcaattttttccatctctgccaaatcgctttcaaagcctttggctggagaataagttcctactattttcaaacctttatattttccaataaggttttctgctgccttcgcagccacaccttctcctgctcccaaaaagaacattcgatatcctctttctgcagctctctcacacaaaagagggaacaaatcggatcctgaaatcttttcctttataggagtcccataccatttagcaatccacagaagaggcttcccgtcacagagaatcaaatcggcattcttgtacgcctctttcagttctccccctcgctcaagttgaataatatgatccacatttggcgtaacaacatatgaatttttattttcagctattaacttgtctatagcatctaaggtctctcccatagtcaaattgtctatctctgtattcataaactgcattcttgccatatttttaccttgatcctcttccaagcaatactactcctactgtttgtagtaatatctttacatcctgttttagtgaccactcatctatgtattttagatcaagcttcactacatcatcaaaatccttgatatcgcttcttccgctaacctgccacattcctgttagtcccggagtaatactcagtcttctgcgataataaatgttatattgctcaaattcatccactgtcggcggtctggttcctacgaggctcatatcgcccttcaggacattaaaaaactgaggtaattcatcaatactggttttccggataaattgccccaccttcgtaattctcggatcattatccattttgaacatcaatccttttacctcgttttgagacattagttctttcttgcgttcttccgcatcaatatacatagatcggaacttgtacatcttgaatcttcttccgttttttccaattctgacttgagagaagaatacaggccccttggattccaacttgattgccaatgcaacaaaaggagtcagtaacaaagtaattaatgcccccacacttcctcctacaatatccattaaccgtttgatcagcatacggcgataatccatttccgtcatgacataggtcattacaggcataccggcaaattttccaacactgctgcaaggtatttcaaacccaaactgttccacacaattatgacatactacacccatagccagaaaagattgtaccagaagttctaattcctgattgttcatatgaggacaatataatagtacaacatccacagcgctttgtctggctacatcaataacattttcttctgttgccaccacaggaactccatgaatcttctcccctatatgatttacatccatcatcgccatagcaccgacttcataactccatgcagcatctttctcaatctgctgcatgacatgctctgcctctgcctctgaagtcaccaccatgaccttatcactgctacggctcttgctataataacggcgcatataactcttaaacgcaatacgaaccacataagttataatagtgttgagtacgacaaaatagcctaacaacagtctggagaattccagttccaaccgaaaagcgtaaatgtaagcacttgttgccagaaaaagaataatattataacgcactactcttaacagttcataataatatcctctttggaaaaaatgtttatattcatttgtgaaaaaattattcagcatacagatcagtaaaaatggaacataaatctgggctatctccctgtttcccaacggtgattccgtcccatggaaacgaatcagataggccaaagcatacgacactgtaatgcagataatatctaatagaaacaaaccataactttctataatctgatattttttattataattattcatgtactaccgttctctccttaaacaaaatctgagccagatatagcatcggcagattccataacacactgagaggtaacagctccacatatccatacacagccataacacccaaagcaattgttatataatattgtcctttcacattacaataccacattccggcagtatacgcaaccaaacacagaatcaatattatccacccataattgaataaggtatggaaatatatactatcgtatgactcttgaggcatatgccccaatactaaagtccatacttcatcgtacacaaaatttacaagggtaattcttcccgtcagcaatctgttgatccatattgaaaactcttcatttttttgagctatgacaggaattatcatagttacaacagcaagtaccgcgggaattgggataaaaaacattgcgtataatttttgccattgaaaacgttttgctatccgatataccagaattgcaacgcataatactccccatagcagaaatcccgttctacatattagaattttataagcaccatacaaaacaattgttgccaccacgtatacataccatttaattttctccctatatacaacaattgccaacagaagtattacaaaaatattagcatatgccatattgggagtatgatacccatagcttttaatttcaagataatcatctcccttaatcagccatattcctacattttctatcactcccgccatgaccagcgtcagcgtccccaccgtcagcactgccttttcccacagtgcatatttcatgaccttatcgagattcacattcttagcgccgaagattcccatagccgtgaggatcagggtcttctccccatttctgaggaaatttgcgcctaacaatagtgtgaatatccccatgatcacgatttcccgccaggtaaaatccgtcactgccattttcaggagcaggaacagtgttgccacagcgaacacgtagaggtagattctgtcttcggagttcagtcccatagaggtcatgcccgtcatagggagcaggaacaacatatagaagatttcctgatagtttgctaattttttacgtaattccagcatgtttattttcctcatcaatatccatatattctctgcagcatccgtatggtttcctgcatttgattagtctcttcgtattccgaataatctgtgttatcggcaatccgtttcatttcccggaacattctcttctgctcatttcgcaggtcatgtgactgtgcatagaacagtccggataccagcagtccaaaatatccttccgggaattctatatcctccggatacagctctgcccactctttggcacggcgcatcacggcatccggtattttccggtagtctgcactctgtgcataaaaagcattacttacactgatataggacatgcggatacttttcgactgtgggaaagccttcagatattgctgtatcgtctcatagggttgtatttccactcttttacggcttgccgcagtgtttgcgatgcataggctttccacttccgctgcctcgcagatagttctcttctggcagatgatatgtgccaggctctccaattgttgtaatccggagatatcatttttccttgtcagataccggattgcttcccctgctgcttccatggatatcctacacatattcaccggatagtcccactgtgcgaggagtttctctatcttgtcccattccggttgcaggtctgctttccggtctttgtacagcttcagatgttgcaatctggcataattgttacagtagaactcacccagttccggaagttctcgcattccttttgtcatatcgcagcacttttccagaaatgcaccatagttttgcgcatcttctgcattatgcagtcccacacaatatgcctccagtacatctacggtttcctttcgtaagggcattttttccgcagacttctgtaagtaggttaaaaagcgttcgccactctcgaataaatatctgctgtccccacgttctgtctgtgtgatagcgattcttctccataattccagttcatacttcagaaaaatcggttcactccgcagcaaaacgtcctccactgcccggagatcctccactgcccgcagattcggtagtagtcccacgtaatattcaaaataatttaacgcctcggcaggtggtgtgactgccagcttctggagcttcctgttatccggccagtcttctaatgccagtgcaatgaaatgagacaattccatgactgaatttgcccttgccagtctggcaaaacgctcgatatctctttcattaatagcataagatacaatgtattctttgatgatatccggaaagaccggttctatgatccaggctgtctgaggcattgctgcatatcttttttcttcggcttcatgaagctcccaggctcttttctcttcttcgggagtcgcaataccggcattgacacgcatccagaggtacatttcctccggattgacatccagtttagcatagcttaccatatagccgaaccggtcatcatcatccagactgcgaagcagttccgctgcttccccgtggccgttttgttccagcctgtcgggattacttaaaagttccagcaccgagtcttctttttctgtttctaccagggtgtccatctgcgcatacaggtcgaggaacagattctctgctccggggcgtgcacttttttcattaaagtattgtatcatattttcgcaatcttcgcacagataattatcaccgcgcctgtccgtaagattgaatctgccgatagcgcaggccaccgccagcacacgcagataggaatccaccagatcctcccgtcccagcaggagactccagcggttcttttctttgttcaaatattctgacagcagttcttccgtggaattcagcttcatatgtccttctttgctgagccatacttcgatatacatgctcagatacagtggacggtcacagtctgctgccacggaattgtgatagcttttttgtatctcttctgccgttttctttctgtgtccgatgcagttaaggataaattccgttttttccaagaggggaagatatccttccagatagttctctgtatagaccagttcatcctcttcccccagtttttccagattcaatgcctgttccctgtagctccctgcttcgaattccagtctcgcttcagaacccatcccccgtttcatgccaagcatccagtcatcgtccgtagtacgtctgtggcgctccaacaggagaatcctgagcttataaggggaatcataaaaccgttccagatatgcggtaatggtctccgcgcagagctgttcctgtcccagtacataatcaaagattacaacagtatctgtaaaaggggaaaattcacgtactgcatcagcatttttcctggcaaaatacccaaaccagtgtgtcggcattttcttcagccattccaaagccagacggcttttgcccatgccgccttctcccaggatcatccaccaggaaaatttctcatcctcttccagaaactgcgtaagggtctcctgttcctcctctcttccggtgaatttcaggaatccattggcgaagtgcattcttccgaaagcagaggtggcagttctgcgctcctgatacggattcacagagatcagtgcaggcagtcccactcttcgctgcagccgaagcaaggagagttctttcagaaattgcggaagatccccatagtcttctccgtaatagatcatcactgcatttcccggcagctgtggtgcagtatccccctttttcatcaggtaaaagtagggaatgtccgaagttcccagtttttccattgcaaatgacagaaaccctgccagattggggtcttctacggtccctccacagcctacgatgacgatggggtaggtactgagaagattctgtataaattgtgcgccactattgtccagaatgctctggtactggggtccgtccgcaatgatgtcatctatcccgttttctctgtcatatcttccatggagatggatcactttatttccggttttcccgcggatcacagacaggatatctgccggtgtcgtataggagatgccggtacttcccacggtctcttctaactgcaggtcgtaatttgtcgtggcgatcaggtctcctgcccgccagattttttgcaatgcatcctgaaaggttctgtccacaggatgcagggctcccatggtctgatccataaattctgtgtaacatcctgcggctttcagtcctgccaacagatatgtggctgcatcgatcagttcaccggtgctccatgcgcctatcttttgctccagctgcgtctgctccagtactgtcaggtactttttcccctccaggatccacctcgtccagctcaactgatgtgctccaagggacatggatgccccggcaccacataaatatacgattttcgggctttctgtcaccgcggacatcaactgcggataatttattacagatattgcggacatcccatgcaccctcttgtctcattattctctcactttatttttcaccagcatccaataatatttcatttcctcacttctgccatacaacaggaaaaatatcgcatgaaacaggatcacagccacggttcccgaggccagcaaatttggaatcgagctccatccgaccatcgggcggatgcaaagttccgtcatcccaaggcttcccagcagtaccagcaggtgttccacggttttccccacatactgtccatacgacatatcaaacagtggtttacacacgtatttcgggtaactgtacaggtagacgattcccatgctgatgatcgttccgaggaagacacctgctgcccccatcagcttcgccagcacaatggataccaccagattgatccccgcctccagcaggggaattctccggtcttcatggaagatgccggccgcctccttgaaagtattcacggaggcccgcatgccatccagatagaagctcacggtcagtacaaataatacgtttttatcgaagaggaactcctcacccagccacagtacgatcagtggctgcatcacggcatacattccgacggtcacgcatccgaagcaccagaaattgataaaatcaattttgcggtaaatatctctgtttttctccggattgctgtctaacaggaagttacccacactgttggtcaggatctcgaagatccgcaccagaagtgcccgtactccggatatcaccagataatagttcgtgtagaggttcatcacctgcaacccaaggacaccggtgatcacgatactgtcactgccggtgaccagcatttttccgatcttatgacagaacagtccctttaccttgacaatgatatcctgccggacctctttttccaccggtttcacatttttttctttcgtgaaaggatatttctgccggatatacagggaagtcagcagattgggaatgatcttacctagtgtcttaatgatcaggaacagaatatagctgttgcagaataacaatgctccgatctgcagggcgttctgtatcacatatgtcacaaaataaatagcatccggtatgtaatttttcaggtctgcatagagcagggactttttgtatgccagaaaataggagctgatacaatccgccagaaataaagcataaatcaggtaaatgctgtcagggatctgtgtatctcccactagccggggaagcagcagtcccaccggaataccaatgagcagtaccacaccggagatcaccagatagcagcgtttgtagaacattaacagggaattgatcttctcctcatcccgttccgctaccggacgatacatatggtagataatggccgtaccgattcccaggtctgccagtgacatcatggaaatgatactgctgaacagtccgttgatgctgttatattccgcccctttggtggcgatcaatgtcttctgtaccacaaatgcagtgatcagaaatacggcatttgtcagaaaggaagtcatgacattgataaatgatttctgtgttctcttcatcggttacccttctttacaggctttccataatgcaatgtattgtcttgtaatatttcccagagaatattccgggaattcttccatcgtctccggttgtgtcagggcataattcatctgttttacccaatccactaccgaatagggatcctgtacatagacagccttcccctgcgtcacttcctccaggcaggattcccgggtcattacgacccgcttgcccttccgcatggcttcgataggtggcatgccaaagccctcaaatacactggggaacaggaacaggcgacagttctcatacaggctgtctcgctcggcatcggatacgaatcccgtcaatactacacggtcctctatcccgtatttttgcaggatcgtgttcatttccccactgttctgtcccacaccgctgagcaccagtttttcattgcctgcccatacactgaggaccttcagcaccgtttctatatttttatgagggagtagggaactcacacagtaaaaatattcatccgtccggatgccatacttttccgccaaaggggcgaaatcgcaggtctttccttccgtaatgatcggattatatatggtcttcactttttctctgaccttcggataatgccggatcagatcttctttgcaataatcggagatcgttacaactttccgggcactccggcaggtgtacttccaggcatagtgcaggaacatgcgtctcgccttggagaaatactgcggatagtgcaatgcctgcagatcatggattacagccgcatagggaatacttccacgagttctcggcttactgtataccggaataaacatgacatctactcctgcctttttcgcataggtatccagatggagattctcccacagaatgcgcttcggctgtctggcgcagtttaccgggcatctctccagatgcatgtgtgaacatttctcataatgttgaaacgtatctgcgttgtcctgcgccacaaataatatataatggttttccgtatcatattttgccagaccgtttaacagattgcggataaatgattccgtgccaccgcagataccgggtctgacccataaaagatccactcctatatacatgcctgtccgctttgcctcccgaaattttcttttttgcgattccgcaggttcctcacttttataccggcatgaccggcctggtattctatcccaggatcagcttcgccgcctcgatcactacgcattcgatcagataccatctgctgtatccattgattcgatagcagtacagatatctgtcccggatccgcttcctcgccgccttcaggtctttatggttgctggcacctcccatgtggaaattcgccaatactttatctacggtgacgatctgttttcccagtttccgcatctggaggaagaatccatagtcatcatgaatgcccagctggcggaagggatattttttgtaacattccgcccgtacaaaggtcgtaggatgattccagtctctggaggtctggaactttctggttcttgctctcttgacaaaggtactgccgtctgccttatgcattcgtatatcggcatacataagatcacatcccgtcttccggaatgtctctaccgctgtctggaccgcctccggctcgtaccagtcatcactgttgataatgccgataatgtctccggtagcattgcggattcctttattcatggcatcgtagatcccgccgtccggttcgctgagaacgtgataacggatacccttcgcctctagcctggaacggtaggattctgcgatttccacggtccggtccctgctggcaccgtctatgatccagtattcgatgttcgtataggtctgtgccagtacggattctatcgtatgagccagcgtctgctcactgttgtaggacacggtaataatgctgaccagtggctcttttttctctttcttaccggcattccgggcaatggttaatgttccgaaagccttccttgccagttttcccagctttcccggaagataaaacgccattttaacgaaaggattcatccatcctgcgtgaagcatatggtgaccggaagtctgtgccagttcaaagaccatatccggggtactgcggtaagtatcctcctgtggccaaaagagtcctccctctccggattccgcaagagttctcagatactcgcataaatggtcgattcgaagcacgctgcgttcattgtgataagtaggaaacagaggcagtttctgtgccattttgaccagtgtcttataatttcccttgcagccggagccgtagatcatgggaagtcgcagaattgccaggcgggtacctgcagacttttcccccacaaacagcccctgaagtttcttctccgcctgccacttgctgtctccgtagaagttcgaaggtgccggtttcgtatccgcggcgatccgtaccggcttccggctgttactgctgtctccgtagacaatgatactgctgaagtagatatactgtgcaaccccgtctgcaatagctttcctggctgcttccacggccagatcacagttgacagcatagtattcctttttctgctcctctgtgagactactgatatccgcatgagcttttccggtgacattcagcacactgtcgtacccggaccagtccctgtttttccagtcggttcccttcagactgacaatatctgtctgatattgtccgggatattttgttgtaaggtaattatgaaaagaagtgccaatatagctattggcacccagaatcagtatttttttcattttttatcggaattctccttatgcattttcatgctcccggtgccaccttccacgacaccatcctgcctgagtacacttacaaaggtaccgaaaaagcagcgaagatccatacccggaccatattttttcacataatcaccgtcgagttttgccttgacgggaatctccagttcatctctgccattgatctgcgcccatccggtgagtccgggaagcacatcattggcaccgtatttatcccgttccgcgatcagatcatactggttccagagcgccggtctcggtcccacgatgctcatgtcccctttgaagatattgaagatctgcgggagctcatccagactggtgcgacgcagaaattttccggttctggtaatatactgctccgggttgctcagcatatgggtcggcatgtccttcggtgtgtctgtccgcatggtgcgaaacttataaatctgaaaatagcttttatggatgcctacccgtttctgtgtgaaaaggattggtcccggagagtccagcttgatggcaacacacaggatcaggagaatcggtgacaacacaagaataccaatgccgcttaacaggacgtcaatggttctctttatcggtgtataagtacggatccgcttctgcgttgctgtcgtcatgtatcttctcccttcgtgttgctcttgccctgtttccctgcccggaaaccattcgtactactcttatcaggatggggccatcggctactcttctgccggatgataggtggttacaattttttccactgctgcccggatgtcactggtctcatccatagcctcccgttccagttccaccagctggctgcggaacacttcctcatcgaattcaatgggtttgccgatgaagatcatcttattggctgtttccttcagtccttcttcattcatcagcagttcctcatacattttttcaccgggacgtaagcccgtaaatacgatctgaatatcctccccgacacgatagccggacagtttgatcagattcgtggccagatccagaattttcaccggttctcccatatccaacacgaagatctctccgcccctcgcataggctcccgcctgaagtaccagagatactgcttccggaatcgtcataaaataccggataatatccgggtgggtcacagtcacgggaccaccctcgacgatctgtttcttgaacagcgggatcacgctgccgttgctccccagtacattaccgaaccggaccgccacataattggtccgggagttgcggttcatggactggatcagcatctcacagagccgtttggaagcacccatgatattcgtggggtttaccgccttatccgtggagataagtacgaatttatccactccgtaccggtctgctgcctgtgctaccttataggtaccgaatacattatttttaatagcctcgtgtgggctgtcctccatgagcggcacatgtttatgtgcagctgcatgatacacgatattcggtcgatatgtctcgaaaatgctgtcaatacgctctttgttacgcacagatgcgatcagtaccaccagatccagctccggatacttgcggatcagctcctgttggatgtcataagcattattttcatagatatccaggatgatcagctgcttcggatgatgggctgccagctgtctgcatagctcgcttccgatagaaccgccgcctccggtcaccagtacgaccttaccgccgacatgtcccagcacttcctccgtattgatacgaatcggctctctgcccagcagatcctcgatctccacttctttcaggctggatacggagacatccccattgatcagctgataagttccgggaatggtccgcagtttacagccggactccttgcagatatccagaatctcttttctcgtctgcacgctggcagaaggaattgcgaagatgatctcatcaatactgtatcgtcccacagcatccagaatactctctctgccgccaacgatcggcacgccacgcatcagtttgccgtggcatccgggctgatcatcgataatacatttggcccgcatacttaagtaacggctgttctcgatctccttgaggatcatatcgccgccggctccggcgccgatgatcatgacattgacacaatgttccttgcccaatagattcatacgtttgttattgatcagacgtaagatacgatagccgaaacggatacagcagatggccagtgtcagcaggaaaaagtacaatactgaatagcttctgggcatccggttgtctgtaaatttgcaatagacgaactgcgccagtgacgcgcaggcagttgcccccacgatattgaccagttcattggcactggcataacgccatacgctgcggtacagtttccatattacgaaaaatatcagagttcctataatattcgggatcaggaggttttcacaatgtttaaaaaatagaggatcaatatcctgaaaagaaaaatcataccggatatacaatgctgcaaaggataccagcaatatggacataatatccatgatcaccaatgcaatgatcctttgaagaggaacttttgaattgtatttattctccatcacagattgcctttctccaagcgatgaacaacagggtgatcgtcagactggatactccccaggaatactccagtaggccgaatgccaccggaatcagcacgaataactgtgccgctgctgccgcaggatctttcttttccgcgtaggtcttgcccagccttatcagagaccacagcgccagaactgcaaatacgatcatcatcggaacgccgaagtccgtaccgtattgcaggaaaatgttgtgtgcatgtcccacccagtagtgctcgtgcaattggaatccctgttcggaatagggatgtcccgtcagattcaactggctgatataatatttgtaaatggtgcttcgcaccaacagagtatccgtatcctgatccgaccgcaataccggaatcttgttcgccggaatctcggtctgtgcttctgcagcttctgccttcatggcaaacggagaatgctccaatgcattctcaaaagtttcgaaaattctgcccagagcggcatccagatattcatcgatatctacgaatttttccgagttccagggatcccaggaatgaacctttccctcgctccactctccccagaaccataccggatgatggaacaccggcggcagatatctggtagcgctgaagcagatggggaatgtcaaaatcacgcacaatgacagtgccatcagattcttgaaccattttttataacttttcagtttacagatcatccacaggaagccaccgatcatcagaaccgccaccacccatccggtgcgccctatggtcagcagttcgaacgttaacaccacaccggcccccagccagtagtacaggcagatccatttgctgcaccggtttttcgtcacatacaggattttggcaaagactgctgccagtacttccaggtaaaacagggcattcaggttcgggttgttatacattccctgatatcttacgctgtcataaggccggaacacacaacagaatccctgaaacacgaaaaatcccagtatgataccgttcaggcatccctgaaacagatcttctctttcctcggcggtataatctgtcagatagaaacagccgaacatcaccagatagcagagcggccagatgtaatcgcttctggagaagatcatcagaaacatcatcactccccacactgccagaaatttcttctcaaggacaggatattttttctcaacggccacacggatcaccgtatggatcagggcataaccggtcaggaacactgccagcgctgccgacactcgaccgttcacaaaaggatcaaacgaagttactcccactacataggcaatccccacagctccacccagaatcgtccagagcagataaggaagcttatgtgccctgatctctccccatttgcagtgggacagcagtatcactgccataatgctgccggtcatattgcggaaagtctcaatatagccctctctgccggaaccggtcttggttcgctgatcgatcaggcagaacatgaaaaagcagagggtatatactatcctcttccatgaccatatatgaaacgtcttgccctttattgtaaagtccattttgctatcctcattttctttgctgtcattgcatactcttctatattttaaacaatttacggtataagtacaagcttttctttatcggtccataaattctcattttcattaaagtatttccaaatctgaaaggcaccgatattccaccgatgccttccctacaacgcaatatgtatcttcttctccactattttccgggccgcctctgcacagtccaatgtaatctcccgattgtctatatcgtagatttcagctccaaggattttgatgattccattgttgccggcatgcaatattggcagtaattcctctgcttctgctgcgatcccttcattgtataatgcctgcaccggtttaggggtgctgaacagaataacgcattttccccggtatctccggttcacccgtctgaaagaggcatctattttacctgcggcgcctttatcatctgtaattacgcaaaatttttcctcttcttccggcaatttcacaagaacatgcaggcataccgcaagcatttcttccccaaggttgtctccggattccttattttttcgcaccccggagaaaaaacgcgtgtaaaagtcctgagtgtttttgcttttctcttctactatatttcgaagtccctcatcttcaagaagtgtctttgctattgtacttaccggactgttgatcatccggattgcccagatcagataattattcacctgttgtctggaagcgaagcagctttccataatatcctgtaattattctcccgtcatcccggctaccaccgtcacagattccttcccataatactccgcgcaggccgtatttacccacacatagccattctcgggctgcagatcggtatacatgagcagttccacataattcagcggtcggaacaccggatttttcacggaatcatccttcagcaccgtgatccgctcttcccagccggcgccgtaggcctgtgcccagccgtttctccacatgcggtaggcacggtaactggtggtgctctggacattgccgaacagaacgactgctgccagaagtgcccccgtcactgcaaaataacgcaggaggtatttctgtgccaacaggtctgccttttcgctcttttccgctttcagaacccgctttgcgatccagccacaccagtacagtacattggccaccatccacaacacatagaaataccacaggatagctccctgcctgccgccgcccatggtgccgtccacgtagatcgttgcagtagcctgggaggcatatactccgaaggtcagcgcagtaaacaggccggggaagcgaaactcatagttcatttttctgaccgctttccagaagaaagggatcagcagaaccagtagcagcaggaccttcagattcgtccagctgataatattcagaaaagttctctccagggacagccagatggccatcagcggggaagtggctgtgctgccgccaaaattgccgttgagtctggtggctgtcagcggagaagtcacacacatcaatacgctgagtgtctctaacagagtcacgatccaggtccggcgaaatgcatctttacggcagatcaggaataagatctgcagacagatcaacaggcacatggtggatacgctggtggaaaaattgttaccacccaccagaatcgccagcaggcaggccagcacggtaagcacaacccgctttgccttgccggtctcgcgaagcgcaatttccagatacagtgtcagcaggaccagtgacaagctatacacaaaagtgtaattcaccgaaccgttataccaataaaagctttcctccggataggggcagtaaagcacctggagaattgccatgggaataccgatgggcaggatcagccagcggttctcctttgcctggcccgcaatgcattctctgagcagcaggaactgggacaggatcacggaaccgatcatcagatagggggtgatccggtaaaaatgttctccaaatgccgcaggctgcaaagccgacagaatcagtatggaaaatctggcttcccacacattttgtgccaatgtctggtatatcgcatgaaatacaccggtgattccttctccggcctgcattgcccggtacatatattttccgaaagaccagtcatccgcagagggataatcgtattttgcgatcgtaaacagcggccacaggatcaccgccagtgccaggatccacgcgatgtggatcaataccattttctttcgttctgtcagtttcattggtataaaatatcctttcttacaatagatccggtgtccagtccatatctacatcacttccgccgctgtctccaccggaactgccgctgtcactgcttccgctatcgttgctgccggaatcactactgccggaatcactgctgccgccgtcatcatcgtcgtcatcgtcatcatcctgtgcaggttccggggtcggagccggtgtgggcgcaggggtcggagtgactgcaggctttgtcgcagcaggtttggtcgtgggctttggcgtggtgccgggattctgggtggctgcaggtttctgaatacttccaccggtcttgtctcccgacacggttccgctgccggtgatcgtctgcccatcgttaccggctgtactgttgccatctgcactgccggtgattttgccggtaatgcttcccgtgacgcttccggatgcagtggtatcatggttttcttcataagccgcaaaaggatcctgttttgccatttctctgaccgcaccggcgctgacccagtattttccgtcaaaccattgtacttctccgtcaaaaatacggatctgcggggtatcactgtctatggcacccgtggtgttgtccgctgcgttgccgttctctccgccatcagtggcggcaccggttccctctgctgtatttgcattgttctctgctgtcatatcctctgtcacctcataggacgtgtattccggacgggtctccagtccgatcatttccccgccaaaacgatactcctctgcggtaatatccccgccgattccctgccacaggcagttctcaccggtagcatcataggcatagagaaccagatccgtataatctgttccctccagcagttttttcttgatttcttcggaaggctgctctgtcagaatctttccttcggaatcaaagcttcccgtgtaagtgatatactccatgccctcccggttgctccagagggaatagacatccaacgcaccttctccggtatggacatcgcaggtatagtctccggcgagcacaccgccctgcatggttccctgttcatgggtaatgcttccggtagcgctgtccacgctccaggcttcgaaggtaccgttccagtccttcatggtttccggtgtatctgccagaggcgctgttgtatccgaaatctctgtcgttgtattttcccgggctctggcttctgtggttcccgtttcctgtgtggcatcgggattctcagtttctgccggatccgcgatgttctcgtccgcaccggccgctgtcactgttaccagccggatcgttgcaccctcctggctcaggaatcgtttcgtgtcgtttccggtataccacaccctggagaagcattgtccctcttccgtatagccggtctgtacatagagcagaggctgactgtctctttccagatagtagtttcgctgtccttctttcagtttgggcatcatggtggtgaaccagtcctcgctgtcgatgagattcacgctctcactcagatactcggtcagctccagatcattttgcatttcctgtgcacggctgcggatcccctctgtctcttcctccagattcacgctgatctcctgtagagcagcaaatgcttcctcatccgcatagagccggtaatcctgttccagcatatcccgctgtttgcggatgtatcccgctctgttgtaggcatcggccaatgacagataatcctcctgggtaaactctcctttattatattttgtctccagattgagaatctccagctccagctctgagagcatcggctgtgcctctacgggagtcacggcatccttcgcattttcatcactgccatctccgcaggccgtcagggatgttaccagaacagtgctcatggccagtgccagaaatcttgttgcttttcttttcatctttttgtcctatctgtttttcattcttaactattgtgcatcactgatcagttttcgcaggaaagtatccgcctccgatccctgtgcataggttcccatattcagtacctgttgtgccagagcatagatgctgcgggcctgcaccggaccgtaaatggtaatgtccttgccatccttgttcaggatgatgtatccgcggaatgcatattccaccttatactggtttgccggaaggccgaccagtacggaagtgaaccggtatctgccactcacggtctcataaatactatcctgatgggtgccgttggcattcgtaccgtaagccagtccgctgatgactttttcgccgcctttgatcatgggatagcttgtccggttggcattgttcatgaccagtgttccgtattccttgagatgatagccgttcacaccatttcccagcagttgtgctctgaggtccgtactgataccggtcttaaagcggattcccgcttttccggtaatccggatggaaaatccatggtaggtcagcagatccgtaagtcccggctgttctgtggccacataggcattgttacgatattccagggtccagacatacatgccgataggcgctccgttctcattataccggtacacgaccgccgactgggcatttccgttcggcagtttgacgatacggcggttattccgcacctgtggtgtataggcaataccgtccacgtagatcgtggaagcatcgtaacccgacggtacctgcaataccacattggtagaggaagtcggcatcgggcaggggctggccggcatattttcatagaccggaatcttgaagacaaaggtattctccagcgctcccgcactttcatacagtttcttcatgctcagtgcctcactggtgggtgctgagatgttctgcatatactgatgggtatataccggattgctggcagtgggggatacattgaatttctgtaaatacagggtatcctggcccttacgtatgtagcttgcggagattacttccgctcctccaaggatcgagtagtaggctccatgccagtcatgatctttggcataattcaatccattgcggatcacttcttcattggtactgccggaagctcccacattgaaataattgtaataatgttcataaccgggataggtgccggagatcagcggggatgtcccctctccctgctcctgcagtactctggctgccagatggaacgggctgacctgccggttctcctccgcaccgatggaccagaaaatatggtagaatttcattgaggtctccggtgcgttctgactgctgttcatgaaggttccctcgaggaaattctttaccgcttcttccgtatgatagcttgcgttgtaggtcagctgttcaaactggaaaatagcattctcctgcagggaatttctggggtccatgtataatttcagtacatcttccgaagcgaaataccagttggggctgtgctgtccttccttgcaataatccccgtaactcttatagaccagactttttccaccctgcagttcgttgttgactgcggtctggaaatccagtccggtattctgtcgtacaaaggtccagttgggatgtttctgtttcaaagcctgcaatgccggccggtagctctccgggaactgctcgatgtccgcatagacaccggtggcattttcctctgccagcataaccgccgctccgggattcatgccgtacagttcttcccattccagaaaccgttcgtcggaacatgccagatacttccgggggatatatccctcgtagaccttaccgcttacctccgcggacaccttttcccagacctgatagtcttcagccactgtcacatccaggatctccaccatctgtccgctgggtacggtgactgtttttgcactgttatcgtccgcttcctcacggatcgaaagttcatcgcacagatacaccagtgccatgacttcccgctcttctgcgatatcctgcaaagcccctcgtgcttcttcgatccatgcctgatcttcttcatccaatgcatgcgtctgataggtattgccctcgtaggtgaatataaatgccgccaggagaattgctcccagaaatgccaattttctcttcatataacgtgactcattccttattttatggttgctgtgttgcccgttctatcctgcttctacgtcgggcatcactctatgtgcttcagtttcttatgcagtacccggattcccttcggtgcaatggcaaacagtgtatgataacacttgttctttttggtaagccagggatttttcatggctctccaccagccgtgacgcaagtcacgcaccaccctgcggtagaatgcgttgtccccggtcatctgggcgatagggatgtgcagcagataatccagccgctggaagatcccgaaccggaatgcaatttccgacagctccggatattttttatccaccagtgcaagcaccatgtccgcattgtcgatattgtcggcgaatactctggagaaccggttcttgtctctggtattgctgtccggacgataaaatacatgatacgcctgtccgggaatgcatgcaatccccggaactgcactttcctcccgggtcagcatttttactaataaatgaaaatcttcattcagtgcccccaccggaaattgttctatggtaaacaggtccttccgcaaaagcttggtacagaaggagcagtctccgcggtgcatcagaagttccttcagaaaaccttctgccgggatcacctgttccgttgccaccggctcgcagatattcggtaaaatattgccgtctttgtcgatttcatctctgccgacctgcgctacgggcattccggtcttttcgattgccccgtacagccgctcatacatatccgcatccacgtagtcatcgctgtccacaaagcccacatattctcccccggcctgctgtaatccgaaattccgggcggaagaaggcccgccgttctttttatggaagacgcggattctctcatcctccgttgccagccggtcacataatgccggtgtctcatccgtggaaccgtcatcgatcagcaggatctccagattttcgtaagtctgtgtccgcaggctttccacgcagcggggcagatacggtatgatattgtacaccggcacgatcacgctgatcagcggttgcttggttacactactgttcactgtttattctcctatacatagaccgctccgggattacaggggccggagagcaggggccgtcattccataattgtggaatcaccggggcaggtgttgtgatgtcctgcatcacattctggccggcatccggcatttcctgttcttctgacatttctggcaagaacttcattttccggcacagttcgatcaatctttccgcagccgtccgggcattccattccccgacaatggtctgctgtgcgttttctcccagtctgcggcactctccgggatccctgagaagccgttccacggtccgaaataattcctgttcctcaccgtcccggtacatcctgccgttttctccctgacggatcagccagggagccgctccgatcatatgatctgccaccacagcacagccgctgttcatggcttcattcaccactgccccccagccttctttgcggtcactggtgaccagatagatttctgacttttccatggccgcccggacttcttccgggccttgaaaaccgggaaaggtgatcacgtcggtcacttcgagttcctctgccaggcgatgcgtctcttcctccagttcccctccgccgatcatggtaatatgaaacgtattttcttccagatgttcttttaaataagatgctgttttcaccaccagctccggatgcttccagtcgatcatccgggccgcccacagaatactgcccggttctttgtgatcgaagggctgccctgcctcgtaatgcctggtctccgggaaatagccgaagcgcagcattttgccggggtaggcattgatcaggtgataatcgcaaggcacataggctcctgcgcacaggaaatacaccggtgccttacggtatctggtgtgatccttgtatttctgcaacaggcctctcggagaaacagccttccattgcccttccttatataagcgttcattataacggaagatcggttttccggcagtcagtctctcctgaatatagctttcgtcatcgcatccgccgaagatcaccacatccgcggtaaacaatagtttctcaaaatcttccgcatctgtgacggcgttgctgttcgactcagagccgggcgttttctcccccccagacttatgtgcacacgaattcttcgcagcgtagcgcacgtagggacgttcctcggcctgccagcccatcttcacccgctcttcttccatgggctgtgtctgcaggaaacagaaatctccctccagcaattcatacagagcatcacagaaggacaactgatgatgattaaaatagtttgagacaaatatcagcttcattccttcctccctgctatgtttgcatagatttcctgcaattttgcgaaattctgctctttatcatggttttttcttgcatgttctcttgcattttttgagtattccagtattttctccggagaactccacatttcgataatagaatttgccatggaatttacaatattttccaattcttctgtttttgtcgttttataatttcgcgtgttatttttgctttcagaagcatctgacgcatatttgtcattttcagccacttccgacagctgatgtccccggcaccacagaccgtcccttccgccatcaaacaggctggggattccccctacctccgtgctgatgcagggaactcccagaagcatggcctctcccagggaattcggtgaattttccagagaggaacaacacaggaacagatgacttttcagaaatctttccttcatttcttctccggtcagttttccgaggaagtgtaccctgtcctccagctgtccttcccggatcagtctgcgcaggtaacggccatatgccgatattttcagcttttccttcggcgtccggtatgccgtcagatcatttcctgccacatacacctgtacccggggatatttctcccggatctgtggcaaggcctgcagcagatagtgcagtcctttcagaggataatccgcctgactgacgaaaatggaatagggttcacagtgctccggctgccattgtccttcataaaaggaagcccgcagggtctcattcatcgtataataatgtgccttgggattccacgcggtagtcactgccctgtcccaggcggttcttccggtgatattgccggcaagtcctattgcttccctctccattacacctctgcgggcaaatttttcctgctggctgcgcagggtatccttcttcaccagatcccggaaagtggtcttgtggatctccgattccggcatatcggcaaaatatgcctccgcacacaacgtacagattccctgaattcccaccagtatcttctccttgtggggaaacacccggcatactgccagtgtgtgtggatattccgtgccgaaacagtggatcacatccggtgaaaagtcttccgtgatccgatgcagttcttcttccagcaacggctgatatctgtcggggtgtacggtgtcttcgtggaatccataacatgtgatattatatatttcagcatctgtatttgtctgtaaatgctcccggtcttctttttcccatggcattgctatctgcagtctccagggcacctccgtatctgccggcaccgggaatgccacagccagctccaggtcactggaattctccgcggctacctgctccaacagaccggacagccagccctctttattcgaagcttctttatgcaatgcttcggctatgaccggaagcatgatattgcagacccacagcactttcataaattaaatcctcttttaattaaagatccagtttagatacggaagcagccgtatctccacatcatacattccccgcagcagcattacgaaatacaatagatatgctgcaacaacaccaataatacacagggttcggaaccatccttttctggcatccttcagcacacccggaatcaggaaaatctggctttggatcaggtaatatgccactcgggatacttccgggataaaggagccgcaggaatagagcaccagtcccgccagattcaggtagaagtaataacggtttctgcgattttcctgagcgctgtccttccaatagatcaggcacagtatcagcactgccaggcatttggcgatgttgacataggataactgtccgttgtcgaacatggaatccttgtaatagggatagaaccggaagataatattccggtacacatcctgtccgaagatcagagataagatcagtaatacgccaaccgcatagtgccactttttcagccggatccgggacaagagatctatcacaatatatgccgggatgaccagcagtaccgatttgtggatcgtacagcccatcagcacccagagaagaaacttcccatattctccccgcagcacatatttctgcgcatacatggccagtgccagtgcgaaatagtaacgtaccgaattcatactattaaagtaaaaaccctgtgtcaataacaggaacagggaaaatacataccagtccgcctgatcatgcagtgccttcaggaaaaagaagaccgtaatcagggaaaagaagccaaagatcggaagataagatccctctccgaaaatcagatggaaaaatttcaccagatacacaaaaccggtttcgtaggagacatgccttccttgatcgatcagctgaaatttcagccagtagacccagtaatcaccgcccacagcaatgcggcaggcagaaaccccggccaggagacagaagatggcgaattccgccacagcattgcacgcctgctgtctgtccggcccggccgccatcagatccccggaggtattcccacgaaaggagcgtctgccggacagatattctatcgtatagtcacgattttttaccagaaaaccgaatgctacggtaacagctgtcaatatgatatacaccagtgcgctcttctccatgtggaacctcctttctttatggccttttttccaaaaagcaagctatcgtcctcctgcctcccggatgccgtcacgcatccactgtctggcctgctgcaggcttacctctgtgcacaacatgcccttatgcgcatataaaaacctcagcgccagcggccattccaaccatccatacagataatgatacaatactcctctgtcatggaaaaatttttcattatagccatgaaaccaggtggattccccggcttcctctctgccgatggtcaccggtgcagtatatacccggcagccttttttaataaactccgttaaaaacaggctgtcttctccattgctgtattttgctccaccgccaaacagcagggagaacgtaataccagattgcagcaagctttctctgcgtacagcaaagctgactgctccataccgcccgcaattataccagcgtaccggtttccgttccgtaatatggtaggtgcggcgttcttcctccacctcgatattgaaaatgatcatatcggcccggggattccgttcaaactccgcaagaacagccgcctcataaccatcttcatacacaatatctgcatccgaaaaaaggcagatgtccccttccgcccgaagaatggcctcattgcggcttctgccgatgccacggtcgggaaaactgcagaaacggattcttccgttccccggagatatctgcatttcctcctgccccagccggtcgcactgattgatgatcaccgcgtccgattgcaggttcatatgttgtacggtctccggaagagaagcattcattaccgatgccagaacttctaccttcatgcctgctctcctccgtgttctgtattctgtgtctgtatggctcccggcagaaaataatagctgcgaatcagctgttcatccgcattccacaggaaggctccgtccacagagcagtcctgggtatgcagatactctaataccgcttccagtctctttcctacccgttctccggccggcaccgccagcagaaatgcatctgccttacgaagtgtctctccactctccgggcataacaacggactgggaaccgctacatattccaccggtattcccttccggatcttacctgtcttagccagcttctgcaaatcctccacgacttccttcggatccgcttccggcagtgccacacatactgccacacggcagatttccgcattttcggactcctttgcctgctttttatcgtacactttctccagcgtatacatcagattttccgcaaatcccacactgcgcaccgttcccagactgttcagtccgtagcgtctgcgaagtgttgccggcagccagatgctgtcctgcgagatctccaccagcaaaaagaggactactgcaaaaaacagagacaataccgccgccagaatgactgcccgcaccgggcgcacatccggtaccacgacttctgcaaaatctccgtgatccagcactttgatccggtcgatctccacgatactctctgcaaattcgtcacacatggtatcctccactgcatgggccagagcaatactcatctccggatcctgagttgccgcctgtgtcaccggaacactgaaatccgagggaagtgttgccgagaggtctgcgatccactgatctctgcccagagacagtgcttccgaagctccattgtctccccgttccacagcctcctgcagatgcttctccacaccatccaggaattctcccgtatggatcatggtgttccatgtagcctcgttaatgtagtacgcacccgccgcattggggttctctttatattctaccttataagtggaagaagccgcataccctggatcgggctgcagcaccacattttttacataataaccgccaccgaacagtaatgttcccactactgtcacagccagtattttccacagattgcggcatagccgcagacacataagtctcaggtcgaagggctcttttccgtagcttacttccatgcgtctacctcctgccttctcagtcgtcatccttctcggcacgaccatcgtaggttgccttgaaagccgttacctgttcgctctccacaccctcggtactgtccggccagaacaataccttcagtgtcagaagcatcaatttaagatccagccacacagaataattctcgatatatgttaaatccagttttaatttatcatacggagaagtattgtactttccgtatacctgtgcgaaaccggccagtcccgctttcaccttcatacggaatgcgaactccggcatgacttccatgtactgtgcaataatctccgggcgctccggtctggggccgatgaaagacatatctccccgcagaatattgatcagctggggcagttcatccagtcggcatttgcggatcaccttacccacgggagtgatacgcttatcccctttctgtgccagacgtgccacgccgtccttctcggcatcagtgcgcatactgcggaacttcataatatagaattccctctgtcctgtggtgcagcgcacctgcttgtacaatacaggtccgccgtcataaagcttgatggcaagcgctgtcagaagcatcagcggtgaagtcaccaccaacaggatcaacgagcagatcacatcgatagatcgcttgatgaaccgctgctccatgctcagggagtactctctggtcagcaggataggcgtgtcaaatacatgcagttcctcggagccaactaaaataacatctgatattttaggcatgacatagacacggatggaatgagcatagcagaatttcagaataatattacgatccttttcattaatatcccagattactaccgcattgatctcaccgttccggtaattatccagaatctcacgacacagctctgttgtaccctttttgatgtgctcgcattttgtgatcttatatttgtccttacggctttcaaatttgttgacaatgtcttcgatgggacgatcgccgtggatcagcagaagctctctgggcgggaatgctgtacgatagatcttgttggcaatattggcatagatgatcaccgctatgatctgtaaaaataccatcaacaggaacatatccgccggaaaaatgctacgggccatcatacacagttccgcatagatcagcacatccgccatcagggttgcaaacacctgggagaaaataatctccgtgtttttcatgtatcccagacgcatgccgccgtaggtcacggagaaaaatatcaggattgcactgtagataccgttttccagcagaaagccacgataccagatcttctgcaggggatctaccagctggaactggaaatggaactgccacatgtaggcaaacaggctgatctccagcaacagacagatcatcgacaaccctatattgatcagacgcttaaaggattcccttttccgcagtcggttttcataataattaccgtttgtattcaaaacaaactcctcctatactctgcgttttacggcgcgtaccgcccagaagcagaaatgccaggcactgttcggcactgacatgccttccgccttacggtacagattccagatcctccgcaaagcttccagcttattcgatgacagggatttccctgctctccgatattttaccaaattttggtccaaaccacaagctacataaccctcccgcagtattctccaccacagggcagtgtcctcactcttgatctggggcatctgcagttgttctttcgacagctgttccatatcgaacatcacggtactggtaaagattgtggtatttttcaaagcttctttataagtaatcgtggccggcacacggacaatctttccgatacccttgccattctcatcggcgaattcatagccggtaaacacaaaggctgcctgtttctctttcagaaaagccagctctttttccagcttgtccggtgtccacaggtcatctgcatccagataggccagataccggccttttgcttcgttgactcccagattacgtgctctcgccgcccccagattcgtagagtgagtcagcagacggattctcgtgtctccggttctctgaatatattgttctatgatctccctgctgcgatccgggccgcaatcctccaccagcagcagttcccagtgtggatacgtctgtgcccggacgcagtccatcgtttcttctatataacgttctgcccggtacaccggcaccacaatactgatcagttcctgttccattttgctttcctgttcctaattcttacaaatcgttataattttccctatctttccgcaagatgcttacttacatcacgatcaggaaatatccgccaaaggaccgcagtctgccgtccgcagcctcttgcaattccttctgtacatcctccgacaagtcctccggcaataaaatgtagtctataccggccttcccggcgctgtcaaggcacgcagcaaaatctattttcctgccaccggcttctgtcgtggtattttcatctgtccgcagatattccgtctccccggtagtctccaggtggctcatccacagatacatatcttcctgccaggtctcataggtatcataggagtagctgcccagcgatgcatcccagatgcttctgccgtataccgggtggatctcagcgctgtaggctctggcagcctccatgacctccttcggcgcccacagactgtattcccgtgagtttcctttttccgcattgtatacagaaagctgctccagaatttccctggtgggagttccctgttgctgtccgggcattcccgtcagtgccggtatctgcgttgtctgtgccacggtccattccgacaccgggtttccacccaggaacaggatgcccagcaggatcagcacagccatcccgtttcgcaggcttttctcttttaataggttacacagaaagtccgttgctgcccatgcgatcaatgctgtctggggtaccgccgcccagatccatacataagagtaaaaggcggtctggtattttaacaggatcagtgccgttacgggacagatacagccaaatgtcaccagcgctccgtaaagatacagccgtttccgtgctttttccgccccggatgcattggcttcctttccggaaccatagaggacaaatcccagatacaggatcgccagcagcaaaagtgccgcaaattttccatgttgtgtatagtcggtccagcctgtcagggcggactgcagaagtgtcatcattctgtagcctcctctcctgacctgccatgtgcatcagtcattttccgtttttcccatcgtttccggaactgggaaaccaacgctccaagtatcagccatgccacagtaacaagcaggcagactcccgcgccatacagggtccagactatgcaggcctccgccaggatacaaaggatcacgcccgtatattttctgtccatcagacaggacagcagatacggaagcaacaccgccgcccggatcgtcacaccgcggaatcctccgtaaaacacatcaaatccatccactccgggcatataggcccctgtactgaacagtattcccacgatcagcaaaaacgtccgtcttttcacagaattttccggaaaaagtgctttccccaggcttccgtaagctacataagacaacagcagcgtaatgcaggggatcagacgatacaccacgtctacgggtgccatacccgtaaaacggctgatggccccgtacagagtgggcaggcacaatattttcaaccgtaaggacatccccatcgaatatgccgtccccgtgagaggattcacggtataaacagcattttccctgagaaatgtgttcacggtctccaccgtcatatctccggtcagccacatgcggttccccgtcagtatccgcagaatctgcagcaggatcagaaatgccaggatgcctgtgagaatctgtgtgcttttttcctttgccgtgtctgtcccgctgttttgatccgcaaccggatcatttttaccggctgtggcccgttttcgtgtctgtctggatattacagacaataatattgccgccagaagaacgattcccacctctgccagcagtagatccgttacagtcaaaaaagaccaccctaacaggcagcctgccaaatgggcgatctctgtcagcccgataatgatcaggctccccccgatcaaaatatccgatgtgcgaaaagtcatttcatctcccatacccgcctttttcttacacgggcttttgtacatcttaccatatttatatggacttgacaaatataacagcatttccatacaacaaaaaaccgcgtaccggaaacttccccattccgatacgcggtctttctcagtctgcagaggagaatactgcatctgcttaattaacaaactctccctgttccaaataattaaaattaatatgttacatagccttataatccagtcggatgttgtcggcgatacgtgcgatgtactcgctgttcgtaggtcttgtccttccggaggctacagaatagccaaaaatcttttcgaatgtctccacatttcctctggaccaggacacttcaatggcgttcctgatcgcgcgttccactttctgatctgtggtcttgaaatgtttcgcgatggtgggatataacagcttggtaacgctgcttactacctccatgtctttccctgacaaaatgattgcatcacgcaaatagtgataacccttcaaatgcgccggcacccctatctccaacatgattttggttacatatctctctaactctgaatcttttactgcaacaatatccaaaacaagtccccctttttacttgtcgagtattgctcctctgcagtgactgatagagaaatcatatcatagctgtcgatatttgaaaagacatttttccgttaaaatatagttaagaaactaaaaatgttacattttacccctattttgtaacatttttacgtacataaaaaacggatatttatgcggtttttcttaaatttcctcttttaccaggtaaatcggacggcgttttacttccatgtatgcctttgccagatactgccccagaatacccgtacagaaaaactgtacgccgctggtcatcaggatgatgcacaccagagaaggccagccggacaccggatctccgaagatcagcttccgcacgatgataaatatgatcatcaaaaaggcaatgatgcagaacagcacgcccacaaaggaagcgatcagaagcggtgccgtggaaaatgcggtgataccgtcaagggaatataccaggagcttccagaaattccacttggtctcgcccttggcgcgctctacattctcatattccagccatttggtcttaaagccgacccagccgaagattcctttggtaaaacgattatattcccgcatggacaggatggcatccaccatctgtctggtcatcaggcgataatctctcgctccgtccatcatttccgtctgggaaatcttcttcatcagatggtaaaatcttctggcaaaaaagctgcggatcggcggttcgcccttgcgggtcacgcggcgggtcgctacagaatcatacccctgccagatccattcaaacatctccggcagcaaggaaggcggatcctgcagatccacatccatcataaccacgtaatcgcccttcgacttttccagtccggcaaacatcgccgcttccttcccgaaatttctggagaaagagacaatatgcacacgggaatcctgttcgatcagctttttcacttctctcacagtgccgtctttggaaccgtcatcaatatagagaagctccagttctatttccttttccttgaaaaagggatcatttttcgtcaattcctgataaaacagggcaacgctttcttcttcattatagcagggaacgatcacgctcaataagctcattttgtaatctccttatgttttcctgtcgctttttcaggcttatctgcgccactgtgcgacaggtaacagctatattatactatccttcgatgcatcatttcaaggtcaacactgtactttttccgctttttggattatactggatttatatatgtctgttctgcaaactacagcatataggaaacgaggttatttatgactttttttgaacagtttttcagcaataccattttcctgactgcagccttcggctggctggtggcacaggttctgaagacgctgatccatttgatcgtctccaagaaattcgttgcggagcgtctggtcggcagcggcggtatgcccagttctcactctgctaccgtatgtgccctggtaacagcggtctgctacgaatacggtgcgggaagctttgaatttgccatttccctgatcctggcgatcattgtaatgtatgatgctatgggagtacgcagagagaccggtattcaggcacaggtattgaacgaaatgctgagggtcttcgaagatatgggccgcagtgagatttccgcccatgataaattaaaggaattcgtgggacatactcccctgcaggtgttgatgggtgcgctgttaggcattttatgcggcgtggtcatttacagcttcttactctgataaccgatcgaggtgtgattatatgtgtaaatataaatttcgacggcagtttctgcagactgcggtgcctcttctgctgactgtctccatgatgcttaccggatgtggacagacgggtaactccgattccccggtccgtccgatcctcccggataacagcccggattcctccacggtttcttccggggaaaagcttccggatcccgtaacgatcgttgtagaggatgattccactcctcccgctgagggcatggtccgcagccgtcttacgaacgaatgggtggatgccgatgtggctgccacacgccccattgccgtaatgattcctaatgaggcctctgcgatcccacaatacagtctgtccgatgcttctattatttatgaggcgaatgtagagaaccgtatgacccggatgatggcaatctacgaagactggcagaatctggacaagatcggcaatatacgcagtcttcgtgattattatgcttactgggcattcgaatgggatgcttttatcgtacatttcggcggtccgtttttcatcaatgagctgctggcgcagccggatactcaggatgtagacggtacctccggcagtgatgaggctgcctttttccgtactaccgaccgtaacaagccccacaatgcttatgcttccggtgaaggtctgcagaaggtgatcgagaaaaagggctacagcctgggataccgcggactcagcgatgagaatcatttcaggtttgccaccaaggcggaaccgaacacccttgggcagtacggtgccaaagcaaaggatgccacctatatcgatatgtccgggtgttatccgctgacaaggtgttattttgaatttaacgaggatgacggcctctattaccgttcccagcatctgtccggcagcacagacggccctcatatagatgccgccaccggagagcagctgactttcaaaaatattctggtacagaatacgtttcacgaggaactgggcgaggggtatctggcttttcagtgtcatgacaccacccgggacggctggttcttcaccaatggcagaggaatacatgtgaattgggagaagacttccgattacagtgccaccagatattacgatgacaacggggacgagatcatcctcaataccggcaagaccatgatctgtattatcgaagatggagattcctttacgttccattaatgtaaatggaaagttagtaaagaaatgctatcaaatccccgtagcccttggcaagg

SEQ ID NO: 598 - DNA, 37808 bp, unidentified
  source 1..37808: mol_type = unassigned DNA
agaagctcctcttctgtcaggcttgcacaatactcttccgtccagtttccggcgcagacggcgcggcgtccctccgcaaacagctttgccgcagcggcaaactgttcttccgtcttgacgaggcggacattctcgccccgcttccacttgggcagctcggtgatggggtggctctcgcaccactgctcatacagctccgggcggcgcagacgggtgcgctcccggctcttttcgccccgccatgcgtcgatcttctggtggtcgccgcccagcagaacgtcgggtacagcgcggccctcccagacctcggggcgggtgtactgggggtattccagcaggccgtcccagtagctctcttcctcgtagcccttctgctcggccagaacgccgggcttgaggcggaggacgctgtcggccaccacaaggctggccagctcgccgccggtgaggatatagtcgccgatcgagatctcttcgtccgcaaacgcttcaatgacgcgctcgtcgatgccctcatagtggccgcagaccagcgtcaggttatcgtactgggccagcctgcgggcgtgctcttcggtgtagcgctgaccgcccgccgtcaagaacacgatatgcggggccgggcgtccctgttccgctacctctttctggacggcgcgcaggcagtcggcgatgggctgggcatagagcaccataccgcagccgccgccgtaggggtagtcgtcggtctgcttctgcttgttgagggtgtagtcccggatctgatggcagtgggtctcgatgcagccgcgcctggctgcgcggccgatgatgctggcgtccagcacctgctggcacatctcagggaaaagggtcacgatgtccacacgcattcccatcgctcactcctcctcccgctcactgtcgaaatcgtcgtccagcaggcccgggatgggggtgacgaggatatagccttccggcgggttgcgctctttgagaaaggcgtccacgccggggaacatatattccttgccgctgggggacttgaccgtatagatgtcctgtgcgccggggtggtccacgctggtgacgacgccgtacaccttgccggtgtcggcgtcccgcacctcgcagccgatgaggtcggccacataccaccggccctcgggcagggtggcgtcgctgcggtcgaagtagaacacctgaccccgcagggcgcgggcggcgtccatatcgttcacgccctccagctggagcagtgccatctgcccctgcgggcggatggaggtgatgttatagcacttgccgccctttgccgacgcatagagacggcccgtctttttgaggaaatccacgccgtcgcaccacagctccagcttcatttcgccgcgcacaccatgggtggtgacgaccttgcctgcttccagatattgctgcataaatttgctcctgtattataggttcgtgtgtaggtgcgccctccggcagctgcctgctatcggcgatagcagcgcactaccgtttacggcagcaagagcttccctcgtccagcgtaggcctgaccggcacgccagtgcctctccctttgggagaggtgtcaccgaaggtgacggagagggcaagcccgttcataaatcaaaaaggccctttgccattacagcaaagggcctgtagggtgcttagtcgatctcaacaaggaccttttcatcgacccgcacagcagccgcgcgcatcaccacacgaatggcttttgcgatccggccctgcttgccgatgacacggcccatatctccctctgccacgctcaggtggtagacgatggtgccgtcctcacggggggcgtccaccgtgaccttgacggcgtccttatcctccacgaggccgcgggcaactgccagcaacagctcctgcatgagtcagccctccaccttacagaatgttggacttcttcagcagcacacgaacagtgtcggtgggctgagcgccgttggcgatccaggccttagccttctcgccgtcgatgctcacgacagagggctcctgattggggtcgtaagtgccgatctcctcgatgaaacggccatcgcgggggaagcggctgtcagcaacaacaacacgatagaagggagccttcttggcgccgacgcggcgcagacgaatcttaactgccatggtaatatcctccaaaaatttcttgttccccggtttgcggggattaaatctatctgtacaaccccacagcggggtgtataccggaattatttcatgcctctgaaggcgcccgggttgcccatcaggccgcccagcttgcgggcaaagcccttggggctcttcttgaactgcttcatcatcttctgcatcatctcaaactgcttgagcagcttgttgacatcagacacctgcgtgccgctgcccgctgcgatgcggcgcttgcgcttggggttgatgatggaggggtcttcgcgctcggccctggtcatcgagtagatcatggcctcgatgcggtcgaaggctttctcgtcgatctggctggcgtcgatgccggacattccgggcatcatgctcagcatggcacccgcgccgcccatcttgcggatctgggcgaactgggccagcatatcgttcatatcgaacttgttttccatcatccgcttggcggtctcttcggccagcttctcgtcggcggcatcctgtgcgcgctcgatgaggctcagcacatcgcccatgccgaggatccggcttgccatgcgggagggatggaagacttcgaggtcatccagcttttcgccggtaccctggaacttgatgggcttgccggtgacggacagcaccgagagggctgcgccgccgcgggtatcgccgtcggtcttggtgaggatgatgccgtcgatgccgaccgtttcgttgaaggtcttggcgacgttcacggcgtcctgaccggccatggcgtccacgaccagcagagtctcgtccacggggacagcctctttgatctggaccagctcctgcatcagcacttcgtcgatctgcaggcggcctgcagtatcgaggatgatgatgtcattgccgtagtccttggcgtgggccagtgcctttttggcgatggcaggcggcttttcgccgggcagggtgaagaccggcgcaccggcctgtttgcccaccacctgcagctggtcgatcgcggccggacggtagatgtcgcaggccaccagcatcgggcggcggccctgcttgatgtagtattttgcaagctttgctgcgtgggtcgtcttaccgttgccctgcaggccgcagagcatgatgatggtctggcccttgttcttgatgaccagacgaggcgcttcctcgccgcccatcagggcgaccagctcctcgttgacgatcttgacgacctgctgggcaggggtcaggctctccatgacctcctggcccatggcgcgctcggagacctttgcgcagaaatccttcgccaccttgtagttgacgtcggcttccagcagggccatccggacctcgcgcatggcggctttgatgtccgcctcgctcagtttgccgtggccgcgcagctttttgaacacaccggcaaggcggtcggtcaaagattcaaatgccattgttcggtgctcctctcaaatccgttttcagctctcattcacttcgtcgatggagcggatgagccccagcatcttgttcagagtggcggcatactcggtggtggtcagccgggcgttcgggccggtgcattcaaaccgggcgtcgatgaccagctgctccagctcttccagtgtctgctgcacccggcggtaccgggccgcgaagccgaccttttcttccagctccttgagggccgtttcgccatgcttgatggcgtcccgcgccccctgccgggtgatgccgaagttttctccgatctcgctgagggagaggtcatcgttgtaatactggcgcagcatctcgcgctgtttgggcgtgagcacttcgccgtaaaaatcgagcagatagcccatttcaaagtcttttgccatgttctgtcctgctctgacctccgctgtttgtaaagtttttttgctttacatacggagtatagcagacggggtgtcccttgtcaaggactttttgcgtcattttgccaaattttctcccgatttttctcttttctgcccaagccccgcttgacgctttctctcctttgcgttaaagttataggcgtaagctttcccccggacgcgaaaggagaccgcccgtgcctatctaccccaacatctaccagaccctgctgcccggccccatcgtcgagctgcggggctatcttgcggcctgcgggctgcgggggcggctgtacgcctatctgaactacaacggccccaccggcacggcgcgggacgagctggctgaggggatgctggcgctggcccttgagcgcggggcgctgacccccggccagaccatcgtggaggccgtgtcagggccttttgccacagcgctgacgctggcggggctgaccgcgggccacccggtgacgctggtcatgccggaggacgcccccgccatgcggcaggagagcctgctccgcctcggagcgcagatcatccataccccggcccaggcgggccctgcaggcgcacgggcgctggcaaaagccaccgccgccgaaaagggctggtactatatggactggctcaacaacgacgacaaccccacctatcaccgccgggtgacggggcctgcactggtgcgctccatcgcgcgggagggttccagcatcgtggacagcatcgtcatcggcgtgggcagcggcggcaccatcaccggcgtgggcgaaacggtcaaggcgtggacgaatgacgtccgcatcgtagccgtagagccttacgagagtcaggctctgagcagcggcctcaccggctcccacggcatcccggacatcggcttcggcctcgttcccggcaactacaactcctatgtagtggacaacatcgctgccgtcaccaccgccgacgccgtccgggcggcgcagcgggtcctgcgcaccgatgccatcccggcctcccccagcgcaggtgccgcccttcacgcagcggcccagcttatcgcaaacggcaaaagccgttcggcactggccgtgttcagcgcacgccagaacatactataaaaaggaaacgagaaggaatccatgacaaaagacatgacgaccggagccatcacgccccttctggtcaaattcaccatcccgctggtgctgggcaacctgttccagctcacttataacgccgccgacagcatcatcgtgggcaaatttgtcggcgaagacgcccttgccgccgtcggcacctccaacccgctgatgacgctggccatcctcttcatcaacggtctctgcctcggtgccggcatccttgtcagcacggcctatggtgccggagacacccagcgcgtggagcgtcaggtctccaccactgccatcgcaggcacggtgttctcgctggtcttttcggccctctgcgtcctgctggcgacgccgctgctccggctgatgcaggtgccggaagagatcctgcccatcgcggtgcagtacctccgcatcgtctttgcgggcctcatcttcaccttcttttacaacttcctcgccgccaccatgcgggcgctgggcgacagcaagagcgccctttactttctgatgataagctcggtgctgaacatcggcggcgacctcttctttgtcgaggcgctgggctggggcagcgaaggctgcgccctctccaccgtcctcagcgaggcgctctgctgtgtgctctgcgtcgtctatatccagctcaaagttcccgtccttcagctggggcggcgctggttcgtctttgacggctctctgctgcgcagcaccgtccagtacggctggaccagtgccatgcagcaggccaccgtccagctgggcaagatcgccgtgcaggccatcgtcaacactctgggcatcaacgcaatggccgctttcaccgccgccagccgggtggacgacttcacctatatgccccagcagaacatcgcccacgctatgaccaccctgatggcccagaaccacggtgccggcaaaaaggagcgggtgcgtcagggctttttctgcggcctgcgcatcgagctcatctacggcttctgcctgatgaccgtctgcctgctcttcgcccgccccatcatctccctcttcgtggatgaccccgccgtcatcgacctgggcgtcaagttcctgcggtgcgcctccctcttctacctgatgcccggcgtgaccaacggcatccagggcggcttccgcggcctcggcgatttgaagatcaccctgaacagcagtatgctcaacatgggcttccgcgtggccgccgccgctgtgctggtgctggtgctcaaggtcgatctgcagatcatgcccgtgagctacggcatcggctggctgtccatgctggtctatgagctgcccctgctcatccgctgcatgaaagaagacaaactttaactccggcaaaaaagagcagggcgtgcagccatatagccgcacgccctgctctttttcgctttcaggctatttacaagaagttacttattcttgtacatttcctcatagtatttctgatagttgccgctggtgatgtgctccatccactcctcgtggtcgaggtaccagtcaatggtcaggacgatgcccttctcgaagggagtctcgggataccagccaaggtcgttcctgattttggtggggtcgatgccatagcggcggtcatggcccagacggtccgcgacgtgcttgatgaggtcttcgctgatgccgtcgtccttcaggcggtcgtgcagctgctcgatgatggtcttgacgatgaagatgttggggcgctcgttgtggccgccgacattgtagacctcgcccaccttgccgccgttgcagaccatatcaatggccttgcagtggtcctcaacgtacagccagtcgcggatctgcataccgtcaccgtagacgggcagctgcttgtggtgcttgacgttgttgatcatcagcgggatgagcttctcggggaactggtaagggccgtagttgttggagcagcgggtgatgttgatgggcataccgtaggtgtcgtggaatgccatgacgaacatatcagcgctggccttggaggaagaataggggctgtgggggcagagcggggtggtctccatgaagaagccctcagcgcccagagcgccgtagacctcatcggtggacacctgcaggtacttcttgccctctttccaggtcttggcgtcggcgtcataccaggcttccttggcgcgctgcagcaggttgacggtacccatcacgttgctctggacgaaaatttcggggttcttgatggagcggtcaacatggctctcagcggcaaagttgatgacgtaatcgaaatcgtactttgcaaacaggctctcgaccagctccttgtcgcagatgtcgccctgcacgaagacgtggcgggggtcgccctcaacgtccttcaggttctcgaggttgccggcgtaggtcagcttgtcgaggttgaccagcaggatctcggggtacttcttgagcatataatgcacaaagttggaaccgataaaaccggcgcagccggtgataagatattttttcatatttttatccttaaattattctcttgttttatttgtgcgcagggcccggcactttgcatttttccgcaaaacctgcccggcttgccaagggtgcttcgcacccgggttgcggctcccagcatccgcaacgctttgcgtgcgtcttgctggccgctgccccaacaactcctccctgcttccgccactggcggcggtcggcgttgttgccccctccgggagagctggacgcgaagcggcctgagagggtcatttcatcccattgtcgccgtcccagtgctcgaagaagcaggccagcgcgtccttccagtcgcggacgtcgttgccgacggtgcagcggagcatccggttgtccagagcgctccacttggggcggtcggcgctgtccgggtgctttgccttgtactcttcgctggtgcagggagccacggtggcgtccacgccggacaggcggatgatctccgatgcaaaatcataccaggagcagatgccctcgccggtgcagtggtagaggccgtactcgtgggtcacgcagagctgcaggatctcgtgggccagatcgacggcgttggtcgggttgccgcactggtcgttgacgacctccagcttgccgaactttttgccggcgttcacgatggtcttgacgaagtttttgccgtagtagctgtagagccatgccgtgcggacgatgaagtggcggtggcagaactgctccacatacttctcacccatgagcttggtggagccgtaggcgctgatggggccgggaatggtggcctcatcctgcgggatgccgccgttctcgcggccggagaagacgtaatccgtagagacgtgtaccagacgggcgccggtcttggtggcggcctgtgccagattgcgggggccgatggcgttggccctgaaggcagtgtcatggttcacctcgcagccgtccacgttggtgaaagcggcgcagttgatgatgacgtccgggcgctgacggcggatgaagtcatccaccatcttgtagttggtgatgtccagctccggcaggtccaccggaatgaccgtggcgctcaccagcttctcggggatggggccaagctcactgcggccttcccggagctgcttgatgatctcggtgccaagctggcctctgcagccggtaacaatgattttcatgcggataccgcctctcttaatacttcagtttgccgtcggccacattcttgaggtgctggccgtaggggctcttgccgtagcgctctgcgctttccagcagggtgtcgcggtcgatccagccgtacttgaatgcgatctcctcgggggcgctgatcttgatgccctgacgcttctcgatcatccgcacaaagtcggctgcctccacgaggctgtccatcgtgccggtgtccagccatgcaaagccgcggcccagcagctggacatccagctcatcctgcttgaggtacatatcgttcagggtcgtgatctccagctcaccgcgggccgagggcttgacctgctttgccatcctgacgacttccttgttgtagaagtacaggccggtgatggcgtaattgctcttgggatgctggggcttttcctcgacgctcagtaccttgccgtttgcgtcgaactccacgatgccgaagcgctcggggtccggcacatagtagccgaagacggtgcagcggcccttgttctcggcgttggagacagcattcttcagaatcttggagaagccgttgccatagaagatgttgtcgcccaggatcattgcgcagcagtcgtcgccgatgaactcttcaccgaggatgaaagcctgagccaggccgtccggggacggctggaccttatattgcagatggatgccgtactggctgccatcgcccagcagcgcctcgaagcggggcgtgtcggtgggggtcgagatgatgaggatgtcctggatgcccgccagcatgagggtggacagaggataatagatcatcggcttgtcgtagacgggcagcagctgtttgctggtgaccatcgtcagcggatagagccgggtgccggcaccgccggccagaatgatacctttcatttttgtgcactccttatattatgaaataaaaaagttgtgcagcttgtacaaggcccggcagcgtatccgccgggtcctgtatggattcaaagcggagctgcgtccgctgtaaacaatgttggtggtaatacgccgccagccgccgggcttcccgcgccacgcgcgctggcaggatctcgctgtgcaccactggcaggcttgcgatagtattacaccttattctactatcaaatcgaaaaaaaagcaaggaaagagcgccctccgcaaaaatttttgcggagggcgctcttttgtttcatcagcaaaggctcagaacttgaacccccacttgtggaagtaccgcagcagactcccggtctgccacaaaaagggcttgaggctgcggtgggccgcacgatgccacgcatggatggcggtgtactgcggcacgaggtaggctttgccggtggtgcgcatcttttgggtcaggtcggcatcctccacatacatgaagtagtgctcatcgaagccgcccacggccttgaactctgccgtccgcacggcggaaaagctgccggtgcagaactcgatctcaacgggagcggacagatcctccccctccatcaaatacgcacggttatatttctcccagaatttcaaaaacggcagctggcggtagaccatgggccgcagcgcacagcgccgcagcggcaggctctgggaacggccatccgggaagcgcagccccggccgggccatcacagcatccgggtgggcggccatccagtcggccaaatcgctgagggtatcggcggtgagctggatgtccgggttcaggatgaagtgatagtcgctcgtcagctccggcaggacggtgttgtgtccggtgccgaaaccgccgttctccctgcggcagcgcacctcgaccttctggccgggctgagtgctcaaagcgccgcccttcacggcggcttcgagacgtgcgccgctgccgtcggggctggcgttgtccaccagatagagggtcagcgggtggcggcgggtgtattgcagcaccgtctgcgccgccttgagggcttcgtcgcagccgttatagacaacgatacaggcagagagttccaagttttatgctcctcatttttatagctcagacctttccgccatgccaagggctcccctttttaggggcaacaatgacgaccgccgccagtggcggaagcagggagtcattgttggggcagcggccagcaatacgcaagcaaagtgaagcggatgctgggtgccgcaacccggtcttggcgagcgaagcgagactgagaggttgttcctcttttatttattccagcggtaatatcttcaggctgaaatcttcgcgctggatgtcgaagttggggttggtacaggggtcgcccgcagccagcaggtcgccccagcgggcctgaaaacgcagcacctcgccctgaaaacgcttctgcttttcggggttgtcctccatgccgcggctcttgctctcgtagtggtagagctgggcaaacggagtgaagacgttggtgtagcctgcctgacggacgcggacgcagaagtccacatcgttgaaggccacggcatagctctcgtccagaccgcccacttcgtcgtagatctccttgcggatgagcaggcaggcggcggtgtcggcgtagacgtcctgcacatagttcaggcggcccatatagccgtcggagctggcgggatagtacttgtgcagatggcccgccacgccgccgatgccgaagccgacaccggcgtgctggatggtgtcatccgggtagagcagcttggcacccacgcagcccacccgcttctgctgggcgtacatgaccatctcttccagccaggcggcggtgatgacctcggtgtcgttgttgagcagaagcagatactcaccggtggcgaacttctcgccgaagttgttcagggcgctgtagttgaagcccttgccctcccaggtgacgaccttgaggttatcggggtgctccttctgcatccgctcgtaggtgcggaaggtctcgggggccttgctgttgttctcgatgaggatgatctcaaaatccgggtaggtggtgcgggcgtagatggactccacgcaggtcaccaagtcgcagatgtggtcgcaggtggggatgaggatgctcacccggcccggatggtcgatggtgtagtcggtcttgtagtagcccggcgtatccgggatgagggacacatcgtccacggccacgccgcagcgggcgtaatgagccttgagggcggcaatacccgcgtcgatgcagtaggtcttggcggagatgtcgctggccgtgctgccggggctggaacgccagtaatagagggcgtgggggatgtggacgatcttccgggccgtctcggtcaggcggaggaagagctcgtaatcctgactgccgttgtactccatccgctccgggccgcctgcggcgtccatcagccggcggctgaagagggtcaggtggcagatatagttgttggagcggaggttgtccagcatgaagtccggcttgaagtggtagagcaccacattctccaccttgccctcgaaggtcgcctcatcggtatagacgaagtcggctccctgctctgcgatggccttggccgcgtaccagagggcgcagggatggaggatgtcgtcgtggtccagcagggcgatgaagtcgccggtggccatctcgatgcctttgttggtgttgccggggatgagctcattcttctccagcttcctgtagcggatacgagggtccacagcggcgcgctgctgcaccatctcgcccacacccggggcagtgccggcgtccacacagcagagctcccagttgcggtaggtctggttcacgacggaatccagcagctcttcgaggaagtccagcggggtgttgtagagcggcaccacgatgctgatcttggggcctgcgggctgattgcctgcctgccgcaccagcagttccaccggtgcgaaccggtcggcgcgcatgactttgcccgggaagagggcggcgtactcgcggcgggcgcgggccagttcccgcacaccctcgatgccgccgctgcgcagctcccgcaggagcacgaagaaaggcagagtgtgccagagctggcggctcttgctgacgacatagcgcatgggccaggtcatcttccagaacttcgagccggtcacctcgcccagtgccttttccagctgctgctcgtggctgcggctgagcgaaaggtcgctgcgcagccgggcgatgagctcggcttcctcgccgctggtgcgctcggcgcgcaccatccggtcacgcaggatgtccatttccatctcgtagccccgcaccatcttcagctgggtgggctggctggtgcagaacagcgccgactgctgagcgcggcccttgctgcgccagccaaaatcgcggaaataccctctctgggccagctgctcggcccagcccgccataacggtgctctcatcgctcaccagcagcacccgggcgggcagggtctcgggcagcgtttcccacgcggggtctgccaccaccagaagctctgcctcagagccctctgtccactcttctgcctccacacctgcacggtgcagggcttccgtcagcagggacatctgctctcccagcagggccgccgaggcggggtttgcctcctccgcgatgcgctgcgccagtgcgcggcagcgctcccgctcccgcttttctttcttttccttctccaactgcattccgttctctccacctgttattctttatcgtatcgctcccgctttggagcgtgaaacgcgaaatcgtctgtctcttgtgtacaagcgtgtacagtataccaaatcacgtcccatttgagaagtattttgcgcaattccttttgattttttacatgcccagcaggcggcgcagccagctgaacagaccgccgccggagctcgtgccgctgcccaccgtccggatggaaacgccggagtagtagtgcttcaggatgtcgcggtagcccatcccctcctcggcggcgtagcccacggcgccgcactggctcatgcccacgccgtggccgaagccgtagtagtacatacagggtacacccgctgcatccgtgctgaaatcgaagcagtagcgggaggacacgaactggccgatatagcggtagctgcggccattggacaccagcgtattgtactggacgaagccgccgaggtctttgtgggtggtgtcggcgctctggtagggctcaccggtgcggctgtcgttgtactcgacatagtcataatccttgccgatgatgcggcgcatcttctcgtggtactggcgctcataggggctttccacgctcttgagatacggcacatccgagccccaggcgtcgaggctggagcaggtgccgtagacgccggtctgggtgttgtagcctgcgctggccgaccagacggcgtcgatgacgctgccgttgcaggtcagcacctcatccttcacagcctccaccgccttgcggatggccgaccgggccgaggacgggatgtcctccacgggggtgtagatgagggcgttggccgaggagccgtactgcttatggtactcgaggtaggagtggatggccacggcctgggccttccacgcctcctgcgcggcactggcgctgacatagctgccgatggagccaagctcggtgtaggtgatgcccaccaggcagtccacaaggtccagcgacacgttccggcgcaggcccttgcccttgatgttcagatagggcagtgtaattttatctttggagccgaagagccagctcagacaattttcttcttcctcagggataagggtggtgtttgcaccgccaatggtggtggcaccgggtgcggcatcctcggcgaacgccgccgggacagccacgcacagcatcacagctgccagcaccagcgccgtcagacggcgcgcgaaactcagactctgcttcacggtcatttcctcctgtggtttctggatctttccatagttgttatcagtgtaacacactgcgcccccgacggcaaggacggaagttgtgcaaaaatgtgaaaagacgcctttgcaagccgccggaattatgatacagtatagcatgagatgatatgccccctttggcgggcatgacagggagggccggaatggacagcagagagttatatcccagcgacgagcagcggcgccgcatcatggactttatcatggcggcgggcgagacactgctggaaaacggagcagaggtcttccgggtggagcagacgatggagatcatggcccgcagcttccatctgcgggagttccacgtctacgtgctgaccaacggcatcttcgccagcgccggcacggcagagatcgccgaagtgcggaacgtgccggtgcggacgactcacttaggccgggtggccgcggtgaacgccctttcccgcgagatagcagccgggggcatcacactggacgaggctgaacaccgcttggccgaggcccggcgcatccccttccccaagggcaagacccagctcctcgccgggatgagcggcacagcctgttttgcgctcatcttcggcggcacgatacgctcggcgctggcggcagcggcagcgggtctcatcgtcagcggctatctgctgctctgtgaaaatcggaggctttccaacggcttccgcaagatctcggcggcagcgctcattaccttggtctgcattctggggtgccatctgctggacactgaggccagccacgccatcatcggcgccctgatgatattgacccccggcatcgccttcaccatgggcatccgggacttcgtgcagggcgactacctctccggcaccatccggatgatagacgccctgctcatcgcggccagcatcgccatcggcaccggccttgttctgagccttacttcgatcctgacgggggtgacgggggtgacggtggtatgatgaccttgacaagcacacagatcggccagctggcggcgcagttctttctggccggggcggggacgctgagtttcgccgtcctcttcgcctgccctaagcgcaccctcccctgctgtgcactggtgggcgcggtgggctggttcatctatgagctggcggtcttgtatggggccgatgccgcggcagcctccctcatcgcagtcatcccgctgacgctggtgtcccggctcttcgccatcctgctcaaaacgccggtaacggtctttctgctgaccggcatcttcccgctggtccccggcgcgggcatctactacaccgcctactatttcatccagggcgagaatgccctttctctggccaacggcatctccaccttcaaggtcgccgtcacgctggctgcaggcatcgcgctggtgctgggcctgcccatgccgaaggggcatgggtggaagagcaaataagctgtagcaacaaaaagcacccgcagcgctgtttccccatgatatggaaacatgctgcgggtgtttctttgttcaaaaatgcgctttatcgcgcagtttcaattatgcagtgaccatctcaatttccgcaaccggcttttctgccgtccagtcaacgtcaaactctgtcagctcctcgttcttcagcttaaaggttttatttgtacgaatatctttcagagtcttctcgatctgctccttcttgaccttgccgcgctttacgacactgacggtttctgtatacgagccgccgtcaacctgcgtccgacccaaaatattgctttcataccagtactggacttcaacatctgccatcacagggtttttgctgctatcgcagccagagagaacacccgctgctgccacagccagagtcatcacaccagcgctcttcaggaaattacgacgagtcatattagtcattttcttgcacctcgtaaactgttttgtttcttcttgttttcctttgcgcgtctccgcaaaaggcggttagtttgccataactaatggtagggcatctcctgctttttgtcaatatttttccagtatgttagcgttcattaacattatatcatcattttttatttccggtttatggatttttctctcatttcttcatctcgcagacgtgtcttgtccgtgtttgccgccgcatccaaattccttgcactgctcctgctcctatgctataatcaggctgtacttatatagtaaaggagtgtctgccgatgtctgttatggaaacgctcaacacccgccgcacctaccgccgcttcgcccagaagccggtgccgcaggatgtggtggacgatatggtggaggccctgcgcctgtcgtcctgcggcgcgaaccgtcaggccgtgaagctggtggttgtgcagagccccgagatggtgaaaaaggtccatccgctggtcaagtgggccgcctatctgccgccggagcagggtgctcccaaagccgacgagcagcctgtgatgtatctggccgtcgtgcaggacagctccatccccggcgacctgaacaccgacaccggcatcgcgctggcgaacatcaccctcgccgcatgggccaagggcgtgggcagctgcatcatgggcgccatcaacaagcccgccctgagcgagctgctgggcatcgccgcgccggacaagctggcgttcatggtcgctcttggctgccccactcacgccgccagggtcgtaccgatgacggaggagaccggcatcaagtattacctcgatgagaacggtgactactgcgtgccgaagcggagcgtggaagagctggcgcggacggtttaacctctccgtcagcgctggcgcgctgccacctcccctatcgaggggaggctctggcgaaccgggccactctgcgctgactgctgaaagctttcggtggcgcaaaatgccgggcctcgctgctgcttctggatgaacggattttgtcaggctgccgtagatccaggcagcagggcactacagctcccgataaatcaagccctgctcgtccagcgtaagcctgaccgacatgccaagggctcccctgataggggagctgtctgcgaagcagactgagaggttctgcatatatacatcgctctcaagctttattctgcataattgtttgcaattcggtttcaatttgatggaatttttgcacaacacttgacttttcaaattgtacaacctatactaaacacgctctctgatttttcgatgaatcgcatcgcagcagagagatgcaaacgatatgcacataaagaggagtgtttgaatatgaaaaagatctctcgccgcagcttcctggctgccgccgctgtttccgctgctgctctggccctgaccgcctgcggcggctctgcctccaccgcttcttccgctgctgcaagctctgttgctgcttcttctgaggctgcttccaccagcgctgccgctgctgagctgaccaccgttgaggccggcaagctgaccatggccaccaacgccaccttccctccctacgagatgaccaccgacgccggcaccattgagggcatcgatgtggacaccgcacaggccattgccgagaagctgggcctggagctgcagatcgacgacatggattttgacgccgctctgctcagcgtgcagcagggcaaggccgacatcgccatggcaggcatcactgtcaccgacgagcggatggctgtgatgtccttctccgacagctacgccaccggcatccagtccgtcatcgtgcccgagggctccgacattgcctctgtggacgatctggccggcaagaagatcggcacccagcgcggcaccaccggctacctgtactgctccgacgactttggcgaggacgccgtggtggcctacgacaacggcctgaccgctgtacaggccctgaacaacggccaggtggacgctgtggtcatcgacaacgagcccgccaaggcctatgtggagtccaaccccggcctgaagatcctggacaccagctacgccgaggaggactacgccattggcatgaacaagagcaacaccgctctgctggaggctgtgaacgccgctctggaggagctgaaggccgacggcaccctgcagtccatcgtggacaagtacatcaaggctgagtaaacagacccctcaaggggaggcggcccaccgggcacctccccttttttaagggatataggttacaaaattctgacaagatcacaacagacgaaaagaaagtgaggatgcgaatggccgcacaatacgaactgttgagccagctgctgaaaagcggcggccggctggacatggggcaggagctgttctacaaattttatcaggcctttgtcctgaaggaccgctggctccagtacatcgggggcgtaggcaccaccctgctggtcactgccattgctctggccatgggcgtcctgctgggcagcgtggtggcgctggtgcgtgtggcccacgaccagcagcgccccggccgccgcaacccggtgctgggggtctttaacgccgtgtgccaggtgtacaccaccgtgatccggggcacccccatgatggtgcagctgctgatcatgagcatggtcatcttcaacaacagccgcaactttaccatggtaggcgcgctggcgctgggcatcaactccggcgcttacgtctccgagatcatccggggcggcctgatggctgtggacccgggccagatggaggccggccgcagcctgggcctgaactacatcaccaccatggtggtcatcatcatcccccaggccatccgggcggtgctgcccgccctgggcaacgagttcatcatgctgctgaaggatacctcccttatcaccgtcatcggcggcaaggagctgctgtatgcggcccagggcatcatgaaccgcacctacgaggccatgttccccctgtttggcgtggcactgatctatctggtgctggtgatgatctttacctggctgcttgcaaaatttgagaggaggctggcacaaagtgaccgataagatcctggaagtccggggcctgaccaagacctacggcggcgaaaagcgcaagggcgcaaagcaggctgcccccactctggacgtgctgcggggcatcgacatcgacatctaccgcggcgacgtggtctgcctcatcggcccctcgggctgcggcaaatccaccttcctgcgctgcctgaaccggctggagatccccaccggcggcagcatcaaatttgagggcgtggaggtggacgacgaccacatcgactctgtccgccagaagatgggcatggtgttccagcacttcaacctcttcccccacctgaccgtcaagaaaaaccttgagctggcccccagcctgctcaagctcaaggacaaagaggccatctccaagcgcgccgacgagcttctggcccgcgtaggtctggccgataaggccaacgtctaccccaagagcctttcgggcggccagcagcagcgcatcgccatcgcacgcgcactggcaatggacccggacgtcatcctcttcgatgagcctaccagcgccctcgaccccgagatggtcggtgaagtgcttgagctgatgaaagagctggcccataccggcatcaccatgctggtggtcacccatgagatgggctttgcccgcgaagtctccaaccgcgtcatcttcattgacgagggccgcattcaggaggatgagccgccgcaggagctgttcaccaaccccaagcacccgcgtctgaaggcattcctctccaagatgctgtaaccatagtttttgatacaaaggcttctgccatgctttgcatggcggaggctttttttgttttctgtcgcagaggcggcttttctcttcctcatttcccacaaaatcttctacagatttttgggagatttactaattgaatatttttaagggggggggggtatactcaatttaacagcagaatgcacaatctgttctgcatcattgattttcacaatgttaggaggcatcttatgaaaatgctcaaacgaatccttgccgccgttgcggccagtgcagtctccctgtgtatctttacagcgtgcggctccgaccccaaatacgacacttccgtctttatcaaaacagccagcgcaaagaccggctacgacctgaaggagagcaagagcctcgataatgctcttcaagcaggtctggacgcactcagctctgacaaaaagtatgccaagggtgacaatccgggctatgaacagatcgcctacgattccatcaagaaagctctgggcgacccggatcaaaccaagtatcggtacatcaaatctgcaatattaggcagtaatcttgccgctctcaagatcgacgaatctcccgttgccgcctacactttttatagtgcccccattcaggatttcggtggaaaaacgtataaagatttgaactcggcgcagctttatgcagcatccactactttcctgaacaatcagcacaagctgttccgtcctgagtataataccaagcagcccaataacatccgcactcagaccgcctcttacgtcccggaagagatttccgtcagcatcaagaccatcacggtcgatggcaagacctctccctacgtctttgtcctgctgaagggcaccatgtccattgattcctgatatttccaatttgaattttcatggtattccaatccaacatcacataaaaatcccccctcgctgcgagataacagcgaggggggattttttgttgttgcaacagggccagcctctctctttgggagagctgttttgcagcagtctttcttcttattctcagttgttggcttccaccttgctcaggaggatgcggtcattgtcgagagccttgccggcgttctcgcggaacttctcgagcaggtcgtccacggtcatcttgctgcgggcctcgcccttgacatcgaagacgatgcggcccgcgtccatcatgagggtgcggttgcccagctccaatgcctgatgcatattgtgggtgaccatcaggcaggtgatcttcttttcggccacgatgctcttggtgaggtccagcaccttttcggcagtggcagggtcgagagcggcggtgtgctcgtccagaagcaggagcttcggggtgacgagggtggccatcagcagggtcagcgcctgacgctgaccgcccgacagcaggcccaccggctgcttcatccggtcttcgaggcccatatccagcagggccagcttctcacggaagatctccttatccttgcgggagatgcgtgagaagatggcgttgggggcggtcccggcgcgaaggtaggccagcgccagattctcctcgatggtcatgttgggggccgtacccttgagcgggtcctggaacaggtggccgatgacccggctgcgctgatattccggcgcgaaggtgatgtcctcgccgcccagcgtgatgctgccctcgtcggcgatgaagccgccggtgatggcgttgaagagggtggatttgcccgcgccgttggagccgacgatggtggcgaagtctcccgcttccatggtcaggctgacgccgttcagggccactttctcgttgacggtgccggggttgaaggtcttgtgcaggtcacgaagttcgagcatctccattttacacacgctccttccgtgcctgacgggccgcactgcggcgcttctcaaaggcgatcttctcccggatggcgggcatcgagatggccaccgccacgatgatggcgctgaccagtttcatggcagcagccgggacgttgaagcggagggccaccgccacgataaaacggtagaggcagctgccgaacacgacgcccagcacacggcgcaccatcgtccgcttgcccaccagcgtttcgccgatgatgagggaagccagcgcgatggtcaccatgccggtgcctacgttgatgtcgcagctcttctggtactgagccagcaggccgccggaaagggccgtcaatgcgcccgagatgcagaggcccaccgtgatggtgaaggcggggttgatgctggaagcacgcaccatggcagcgttatcgccggtggcacgaatcgaaaggccgaggcgggttccgaggaagcccaccatggcggcaccggccagcgcgatgactgccgccgccagcaccagcttatacccgccgcccgtgaagctcagggcgctcttggcgatggaaaagacggtatcggtcttgaccagcgacatggtggacgagaagcccatcacggccaggttgatggtgtagaggccggtgttgacgatgatgccggccatgatgctctcgacgccgaggcgggtctgcaaaaaggctgttacaaaaccggagcacacaccggccgccatcgccgccagcagggcgaggaaggggtggccggtcagcgccacctgacaggcgacagcgcagccaagggtgaagcagccgtccgtggacaggtccgcgatattcaggatagaatagctcagaaacagagccagcgcaacgagggcgtagatgcagcccagctcgagcgcggtctggatgacgttgagcgaaaagatactcgccagcatggtgtgctccttaaataaatattagttgaagttctcggccgtggtcacttccacgacctcggtgcagtagggtgcaaaggccttcttcacggtgtcgaggtcgaggcccagagcctcgcaggtctcggtgttgatggtggcaatgccgttgtcgaaggtctggaaaggcaggtctgcaggggtcttgccgtcgcagagcagttccgccaccatatcggcggtggcctcgcccagctggacataatcgacgccgtagcctacgaaggcaccgttcagggcaaagctgtcagcgccggtgtagtgctggacgcctgcctcggtgaaggtctcgtagatggaaagctcggcggtcatgacggtgttatcggtgggggtgaagacggccttgacaccggcggcgatgagggcctcagcggccatctgaacttcggcggtggtggtgccgttcttctcgatgtacttgatgcccttgctgtcgcagaaagccttggcgtctgcaatggcctgtgtagaagcatcctggctcagatcatacagcaggccgatggtgtcgatgtcggggttgacggccaggatgaggttcatgatggcgtcggtgttcagggcatcggaagtgccggtgatgttcggctcggtgtcaaagcctgcggcggcggggtcagtgacggcggagtagacgacggggatgtcggtatcctccacagcggccagcatggtagcggcggtgggggtagccacagccacgatgacgtccacgccgtcggccacgaggtcggcgccgatctggttcaggttggtctggtcggcctgtgcgttggcgtagtagtcggcgtagtcgaaggtgacgcccttctccttgcccacctcgtccagacgctcttccaccgacgcaacgatctggttcagagaagcgtggtcaacatagttgacaatgcccaccttgaaggtctggcctgcctcgctggcggcggcagaagatgctgctgcactggaagcggtgccggatgcagtgctcgaagcggacgaaccgcagccggtcagacccagagcggaaacagtggcggcggccatagcggctttcagaaagctgcggcgggagatcatcttcatggttttcatagcggttgctccttccctggagcgggcggcatgtaaaataaaaacccgctccacttgcgggacgggcttttgttctcagtataacaaaacgaccctgtccctgtgtgttcatccacaaggacagagtcgagaaattcgaatctgcggtgccaccttgcttgccttgctcgctttcctcttgaaagccgcaaagcccctcacggagagccaacactcccctgccctgtaacggaggcttccgtcccaagctactggaggctctgcctcgtttgcccggccctcggcggcccacgaatctctgccccgctctcgcccgttttcactgtccggactcactgaagatgcgctttgcaggttctcttccgcctcatcggtttgattgcattatacactttatccgtgtaaagtcaagagggaatttcaaaattttccgtcagattttttcacgtttcatcactcgaggttgagtttgtttcgcatcagccagaccgtcagcccgaaccagaagacgccgaacgccgccgcgacgcccagcgtgaccatcgcgcttcccatgtagcccagagccgagacggtagtctcgatgctgcccacatcgcctacgatgctatagatggccgtctcgtagacgccggtgccgatctggagcagcttttcgagccagccctgcacatactgcatgacaaagaagctcaggatgcccgccagcgcggggtggttcttgaactgatgtcccaccatgcaggcagcatagatgcaggcgatggcgctgaccatccgcacgaagccgacgacgacgctgaaagccagcgccccccagaactccatgttatagcgggcgaatgcctcccggatgatcgaccacatccgcggcagctgcccaagcaggtccatatccgccatcatcaggacagccagaatgccgaaggaaaggcaggctgcgaggatgctgcacaggctccacacggtactggagatgagcttcgaggtcacaagctgtgtttccgtcaccggcagggtgtgcatcagatagccctcccggcccagcaggttgcggtagaaccgctgcacgatggtcatgatggtgacgaccacggtgccgatgatgacggcggtgtagacaaggctcagcaggcccacgagagtcgaataggcgtcactattggtgctgttccatctccagacggagccgccaaagagcaccgacgccgccagcagggccagatacattccgccgtaggtgcgggcggtggccttgaactcatatttcagtaactttttcagcatttgaatacctcccggaaatatgcatccacactcatgccctcggtctcgcggagctcatccaccgagcggtgggcgaaaattctgccgttcttcaggaacacggcttcatccagcaccggctccacatcctcgatgaggtgggtggagatgatgaccgaggcgtcccggctgtagttggtgaggatggtgttcaggatgtagtcccgcgccgccgggtccacgccgccgatgggttcatccagcaggtagagccgggcgttccggctcatggcaaggatgagctggactttctccttgttgcccttggaaaggctcttgaggggtgctttgggcgaaagctccagcttttccagcatctcattcgccttggcggggtcgaagtcggcgtagaaatcccggaacatctccaccagctgctccacccgcatccagtcgggcagccatgcggcatccggcaggtaggagacgatggccttcgtgtcggggccggggtccatgcccgcgattcggatgctgcccgccgtgggctgcaagaggccgttcgccagtttgatgagggtggtcttgccgctgccgttggggccaagcaggcccacgatgcggccaaagccgatgtgcagctcgatgtcatcgagggcgtttgtccccttctggtaggatttcgtcaggccctcacaagttaaaagctccttcatttgaatcactctcctttgtttcccagcccgtcataagctttgcggcctctgccgggccgtagccgatgccgcgcattttctcgagatattcggcggtcatagcgcgggctgtctcgtcccgcagctgttccaaaagggctgtatcttcggtgacgaagcggcccgtggtccgctcggtgtagacgagcccttccgcttccagctgggccagcgcccgctgcatggtgttggggttgacgcctgccgctgcggccatgtcgcgtaccgagtccagatgtccgccgggcgggtagacgcccgccaggatttttgccttgagccgttccacgatctgtgcgtagatggggcggctcatatcgaatcgttcgcccatcgtctcatctccttgtgttgctgtgctaagtgcttaatacaataatactcaaatcatcttttttgtcaagagggaattttcaatctcttcaaaatatgttatactgtcttttgtatgctagaagaaaatgcgcaggagcacagaatctatgaaagcgaccatcatcatccccaacatcaacggcaaaggctggctcaaggactccctcgagtcggtctacgcccagacggagcaggacttcgagcttatcgtggtggataacggctccaccgacgagagccttgagcaggcccgcagctattgcagccgcccgaacttccagctcatcgagaacggctccaacaccggcttctcccacgccgtcaatcagggcatcgcccgggcgaaaagcgagttcgtggtgctgttcaacaacgacgcctttgcagagccccagtggctggccgagctcatccgcgtggctgagagcgaccccaagattttcgccgtccagagccttatgatccgccacttcgaccgggagcttgccgacgacgccggcgattacgtcacatggatgggctttgcctgcaagaccggcgacggccgccgggccagccgctacacaaagcagaagcgcatcttctcggcctgcggcggcgcggccctctaccgcaaaagcatcctcgacgagatcggcgtcttcgatgaaaacttttttgcctacttcgaggacgtggacctcagctggcgcgccaacaacgccggttacaaaaacgtcctctgccccacggcaaagtgctaccacatctgcggcgccagcaccggcgcggtgcggtacaacgccttcaagagccagcagagcggccgcaacagcatccttctccccctcaagaacgagcccctgctgatgctcatcctcaacttcattccgctggcgctgggctatctgctcaaacgctgcaagttccacaaacagggcttcggcgaggcgtgggacaagggaatgcacgaagccttcgccctgctcaaaaacggccagctgggcaagcgccccttccgtctccgcgatttgccgaattatgttctcatggagctgtggatgatatggaacatggtgccgtatctctggtatcggctggtggtcgtgcggtttgatttgaagtaattccggatatgcaaaaaccgggaagctctgggagcttcccggtttttgtttgtgattcgttttacgccgccgcgctggccgcgctttcggcctgcggctctgcgtccgaggcggcttcgctttcggcggtgctgtcagcttcctcgctggcggctgcagcctccgaggacgcggcgtcggagtcagcgggcgtttcgccgccggtggcgaggatggcgtcctgcacctcgctgtctgccatcatggcaggctcggaggcagtggacgccgccgtcgactcgggcttcgtctcgctctcggtcaggccggtgagataccagctgccgctctggcggctgaacagatagtccatgtacttgaccggcgtatccgaggtggcggtgaggatgctgtccgttgcgttctggttggggatgtagcccacggtgacgtggaggaggccgtccttcttgaacagcttggtgacggtggcgcggtaactgcccacgctgccggtgacggggatcttatagcactgggtggtgtcgtcgaactcgatggtcatatcctccatctcgaaggtcttgtgggtcatgcggaagctggggccgacaagctttgcgaggtaggcgtccacgtccaccgaggggatgagcagctgctcggtatcggggtcggtgttgtagccgtcgaagccgccctgagtctcctggatgctgtacacacagccccagacagcggcctcgcggagggtcaggtcgtcgatgttctcgatgccctcaaaaggcacagggtcgaacagcaccagaccttccagcttgtcctcgtattcctgcttctgggccgtatcgtcaaacagctttgccacggcgttcacgcctgcgtgcagcacggtcagcgtgccgatgagcaccagcaccgcgatgaccagcccgagggcctgccgaccgcggcggcggtggagccgggcgtgttcttccggggtcatttctatcttcatatcgttatcgtctcctgcgttgtttcacttttcagataaaaacagtataccacaatcatgggcagggtgcaaaaccctgcccgtgttattttggtgaaagccgttcattcccagttcttccagacgtcgggctggtagccgacggtggcctgacggccattgcggacgatgggggtgcggaacagctgctggttctcgaagagcttgtcttccttctgccagtccaccagcgcgtccagcagagcgagggtctgcttgtccttggcgttgggattcaccagcgcctgccagccgcccagagcgcgggacacgttctcgaattcgccccggctcatctctttttctttcaaatcgatcatctggaacttgatgccgcgctccttgaaatagcgctgagcctttttggtatcgaagcacttggtggtgccgaatatctggatgttcatactcttgccctcctgttcattctgctctattgtaacatatctgcgcccgaaagcctatagcatattttctgctccgccgggccacactgctctcagcgcctttttctcattttgaatggaggtagtaccaacatgaaagcattcgtagaccctgaactctgcatcggctgcacccagtgtgccgggctctgccccgaggtataccagatggaggggactctggccgtcgccatccccggcgacattccgcccgaccaggtgccgctggccgtggacgccgccaacgcctgcccggtgggggcgataagggtggagtgaccgccgcaaaaggctctccctttgggagagctggcgcgcaagcgcctgagagggcaaggctgctgacggagacacccaaacacagcgataataccgctctgtcaaaggccctgctcatcgctgtgcagcagctgtttggcaacgggcttgccctctccgtcaccttcggtgacacctctcccaaagggagaggctttttttgtgcaaaccctcccccatccgctctattttgtggtatactatagaatgtgaaattatggaatggaggaccacaagctatgcgtttactggtcattgacggcaacagcatcgccaaccgtgccttttacggcatcaagctgctgaccaccaaagacggccgctataccaacgccattttcggctttctgaatatcctgctctccctgctcaaagagtctgagcccgacgaggtggctgtggctttcgacctcaaagcccccaccttccgccacaagatgtacgacggctacaaggccacccgccataagatgcccgacgaactggctgcccagctgcccgtcatccggcagcttctggccctgctgggctatcgtgaagtgaccgccgagggctgggaagccgacgacatcctcggcacgctggccgccgcctgcgccgcccgcagcgacgactgcttccttgccaccggagaccgggacagcttacagctggtcagcgacaccaccaccgttctgctggctaccacggcgttgggccgcagcaagaccgtcaccatggatgtggacgccgtgaaggagaaatacggcgtcacgccccgccagctcatcgacgtgaagagcctgatgggcgacacctccgacaacatcccgggcgtgaagggcatcggcgagaagagtgcctttaccctcatccagaaatacggcagtctcgagggggtctacgcccacctcgacgacaccactgacaagaccatcaagcccaagcagcgggagcatctggccgaagaccgcgccatggcagagctgagctacacgctgggcaccatccgcaccgacgcccccatcgacaccgccgagggcgcctatgccgtgggcgagggcaacaaggccgaagccgtccggctgatgcaggagctggagctccactccctcatcgcccgcttcggcctgagcgacatcacccccgccgccgacccggaaagagcgccggcagagcctctgccggaagccgaacttgccgctctgcccgctgagccgaagggccattacctcgtggccgcgcggcccgctgtcatgggcaagcagggcgtccgcatcgtggagctgcagcccgccgcgtggtatgccgtgcaggacaagaccgtctttccactggaatccgaagacctgctccgcctgctggacaacaaagacgtcacccttgacgtcttcgacagcgcgccgctctacgcccgcgccatggctgcgggcggctggggcagcagcatcgtctgggacggcaagctggcggcctatctgctggacgcctcggcttccaagtacaacctctcggagctcatcatcagctaccgcgccgacgccgctttcacctgtgagaagtggccggacgccggtgcactggccgacctgttcgccaagatgaaggcagagatcaccgcgctggaggaagactccctctacaacgacatcgagttcccgctggcgcaggtgctggccgacatgacccgcatcggcatcctcgtggacaaagagggcatcgagaagttcggcgtgaagatgcgctcggagctggaagacgtcctcacccgcatccacatggagacgggcagcgccagcttcaaccccaacagccccaagcagctgggcgagatgctcttcgacaccatgggcctgccccacggcaaaaagacccagcgcggctggtctaccgacgccgagacgctggaagccctgcgggactacccgctggtggaggacattctgcagtaccgcgcctaccagaagctgaactccacctacgtcgagggcctgctgaaggtcatcgcggaggatggccgcatccacacccgcttcaaccagaccgaagcccgcaccggacggctttcctccgacaaccccaacctgcagaacatccccatccgcaccgagctgggcagccagctccgcgcttactttgtggcgcggcccggctgcgttctggtggacgccgactacagccagatcgagctgcgcatcctcgcccatgtcaccggcgacgagcatatgcagcaggccttcctcaccggcgaggacatccaccgcagcactgccgccaagatctacggtctgcccctcgagcaggtcacgccccgcctgcgctcttcggcaaaagccatcaacttcggcatcatgtacggcaagggcgcttacagcctctcgaaggacatcggcgtgagcgtcaaagaagcagacgccttcctgaaaaactatctggccaccttcccgaaagtcagcggctacatggacaagaccatctccgacgcccggaactgcggctatgtgtccaccctcttcggacgccgccgctccctgccggagctggccagcaacaatcacaacatccgggccagcggcgagcggatggcccgcaacacgccgatccaaggcaccgccgccgacgtcatcaagctggcgatggtgcgggtctggcggcgtctgcgggacgagaagatggagagccgcctcatcctgaccgtccacgacgagctcatcgtcgaggccccggaggcagaagccgcgaaagccgccgccatcctgcaggaagagatggaaggctgtgtcaattatgctgtccccctgagcaccgaagtgcatcagggcaaaaactggctggaggcccactaaaaccatgatcatcttaggaatcgaatccacctgcgacgagaccgccgcatctctggtggaagatggccggcacctgctgagcaacgtcatctccaccagcgtcaaggagcaggcgctttacggcggcgtcgtgccggagatcgccagccgccgccactgcgagttcatcagcgccaccgtcaaaaaggctctgctggacgcaggcaagaccatcgacgacgtggacgccgtggctgtcaccttcgcgcccggcctcatcggcgcagtgctggtgggcgtcaactttgccaagggcctcgcctactcggcgggcaagccgctggtgccggtccaccatctgcggggccacattgcggccctctacctgacccacccggagctgaagccgcccttcctctgcctcgtggcgtccggcggacacagccacatcgtggaggtgcaggactacacccattaccacatcctcggccacacggtggacgacgccgccggcgaagccttcgacaaggtggcccggacgctgggcctgccctatcccggtggtcccagcgtcgccaacgccgccaagaccggcgacccgaaagcctaccgtctgccggtgcctcacgtggaaggcaggtacaacgtcagcttctccggcctcaagaccgctgtgctgaacgaggtgaatcaggcccagatgaagggtaccgacatcaacgtccccgacctcgcggccagcttccaggagcgcatcgcgggcatcctcgcagaaaagctccttctcgctgccgccgacaccggcgcaaagcaggtctgtctggcgggcggcgtcgcggccaatggccgtctgcgccagctggtcaacgacggcgcccagaagctgggggccagggtctacctgcccgagctgaaattctgcggcgacaacggcgcaatgatcgcggctcagggctactatcagtacatcgcgggccataccgccgggctggagctgaacggtctgccgactctgcccattgattacgaataaccgagatagaaaacggaatggccgcgcacagctgtgcgcggccattccgtttatttcatatcacgtccgaagtaaagctccacttcactgagcttctttttccgcagcaggaacgccgtggggatgaggtagaccgcgatagacgtcagcatggtgatatcataggtgctgatgctgtcggctactgtctcggtgccgtacaggccgccgatgagcatggacgtgatgtccatcgcggcgtggatgaacaccgtcacccagatgtttccggtgcggaaatagaccgccgccagcagcgtacccagcgaggccgcaaagacgcactgcatcagaacgcccagcggcgcactgccggtgaggttggtcaggtgggccgcaccgaagtaaagacccgacagcaggcaggctttccagacgccggcccggctggtgccgaaatgctccagaagcgtctgggcgatgacgccccggaacagaaactcttctgccacaccgacgctggtcatgccgataaggaaccacacgacatgccacgcgggcagcatatcgccctccggcctgccaaacagcagggtgttgtaggcgttgtagctgatgagcgcgatggggtacaggcccaccagcagaccgttgaaaaagccgctgccccggcggcggagcaggccgctcttcccggtgcgcgccagaaagcgccacgccaccagcacgcctactgcctcctgcatgaaggtcagcatataatcatcgacggcatcaatatcccgcacgacgaacaagatgagcagaagcgacagcagcgatgccacgaacagcatccccagaaacagcacctcggccacaaggcagtagagcatcgggtgggcgctgcgcagacgtttgagcatagaaagacctcctgtgtcgtagtggtactattttagcatatttcagaagaaagagatagggatttgtgtgaatagttcaatcccgcgcccgactaaataaaaaagcaagtacacgaatgtgtaccggcacatcccgcgcccgaatcgaagcggtagtcaccaactgttgacattcctgaagattgggacccgcgggctaagcaacagcccactgggctgattgcttgccctgctgcgcagggccgccctgttcaaatcccgcgcccgactaaataaaaaagcaagtacacgaatgtgtacttgcttttttaagtcggagcagcgggatttgaacccacggcctcctcgtcccgaacgaggcgcgctaccaactgcgctatgccccgaaaataccgcaacccaatgggctgcggtctggttggggatgagagaatcgaactcccacaagtagagtcagagtctaccgcactaccactatgcaaatccccactattcggtttcgccctcagcaccgaagcgccgctgacgaagaatattatacagcctccgcctccatttgtcaaccactttttttgatttttccgtccatgttttttctgtcttccctgcctctgcgttttcacgccttttttcgttcccggctcttgacacccgccccctttgggaatactcttatagtatcattcacctgccccctctgagggagaacggaagaaacgagggttgttcgatatgaaaaaacgtgttggtatcctgacctccggcggcgactgtcccggcctgaacgccaccatccgcggcgtggccaaagccctgtatgcacggttcggcgagaacgtcgagatcgtgggcatcctgaatggctaccacggcctcatcaccggcgaatacaaggagatgtgcgaggacgatttccgcggcatcctgacgctgggcggcaccatcctcggcaccaagcgcacccccttcaagctgatgcgcgtggtggaagaagacaagatcgacaaggtcgcggccatgaaaaagacctacaaggacgccaagctcgactgtctgctctgcctcggcggcaacggcacccacaagacggccaacctcctctcccaggagggtctgaacatcatcggcctgcccaagaccatcgacaacgacatctacggcaccgacgtcaccttcggctttcacaccgccgtggacatcgccactgaggtcatcgaccgcatccacaccaccgccggcagccacagccgcgtcatgtgcatcgagatcatgggcaacaaggccggctggctgaccctctactccggcatcgccggcggagctgacatcatcctgctgcccgagcagccctacgacatcgaccgcgtctgcgccgctgtggagcgccgcgcccgcaaaggctccaatttctccatcatcgccgtggccgagggtgccatcaacaccgaagaggccaagatgaagcggaaagagtggatggcaaagcgcgccgaagccggttacggcatcaccgccaccaaccgcatcgccgccgccgtccagaaaaagaccggcatggagacccgcgtctgcatcccgggccacatgcagcgcggcggcagccccagcgcttacgaccgtgtgctggccaccgagttcggcagctacgccgccaagctggtggaagtggagcgctacggcgtcaccgtcgccatggtcaacaaccgcgtcgtcgccaaccgcctcgaggacatcgccggtaagacccgcaacatccccgagggctgtgagctgctcaccgtcgcccgccggatgggcgtgagcctcggctgagaccctgaagataaaaacaccccgctgtgtcatgcagcgaggtgtttttgtttttatgcttcagaacgagccgcccgacgaacctccgaagccgtcggaatcgacggacgaaccgccggaggagttggactccttctggggcgggtcataggtgcgctcccgggtggtgtgggtgtagcggtcacgcttgacccgcagggtgaagccgggcatatactcgtcggcctccattttctgccgggccgtcttcatccggcggtagaggatgaagcagatgaacgccgaaatgccgagagggaagatcatggcaatgagcaggtcttccaggccgatgtcgttatccacatcgatgggctcgccatggtcggcatagtagtccagtgcatcgtcgcacatatcgatgtaggtataggcggcatctgcccattcctcatcggagagctgcggaacgatctcgtcctcctgctgctcgatgcggtagtcggtgaaagccgtgacgccctcgccgtaggtgatggtgacgtacttgcgggagccgaccgccagcaggaagaggatgccgctctgctcgtcgccgtagccgaggccgttggagatgtaataatttttcgcgtagtcgcgctggtcggcatcgccgatgtcgtccaccacgaggaagtagacatccacgtcgtggccgtcggaggcgctttcggcctgctcctcaaggtcggccagcgtgtcggcgtcaaagacgccgcactcgtcccgcaccagcggggccgctgccccggccggcagggtcagggccatgcagagcagggccgcagccagaagggcaaacagttttttgcagtatttcatattcccgtctccccctctcacagcagcatgatgagcgccgtcagtatcatcagcgggatgctgatgccggcaaaccatgcagctaccctgcccttatccacgggcaggtcaccgatgagcttgccggtctggccgttcatcgcaaagaggaagtcctgctccttccagcgggtatggagcatccagaccggcagcagggcgtagtggggttccagcgtccgcgggtcgagctgctccgagagggtctggacgccggtgtagccgcccagcgtatcgtggagggccgcagcggtgctgttcttcatccgggtcaggacgcgggcagcacacttcttgtcgtcctcgtcgtaccggtccgccagaaagccgggcaggtaggccgtggagaagggcttgaggtcgctgtaatcgaagggctcgatggcgtccatatgggcgtccggcatcttgctggagccgtccaccggcacccggacaaagtcggcgtcgcccacgcgggccacgtcgaagtgcctggtggtggtgacaatgtagtcgccctcacggtggctctcgctgatctcggccttgtaagcgccccgggcctccatccggccatcgtagagccagaacggcacatacacgccctggatctcctcgatgtggttggactctttgaaggctttggggaggaaggctttgcccttataatacttcttcaggttctcgatggcggtctttttgtccatccggaaggggatgatgtactccggcttgagcttgccggaaagctgtccgcccagcacggtggggttgccgcagtaggggcaggtggtggcggctgtttcggggccgcagaccag

SEQ ID NO: 599 - DNA, 8464 bp, unidentified
  source 1..8464: mol_type = unassigned DNA
ttattttatagcgtcgagtgcgtttgagatatctgcaatcaaatccaccttgtcctcaagacctaagcttattctgataagctctgccggcactcctgcttccttaagctgctcatcattcatctgacgatgcgtgcttgttgccggatttaagcagcaggttctcgcatctgccacatgtgtctcgattgctccaagccttaatgccttcataaatgcagacgctgcctctctgccgccctttaagccaaatgatacgactccgcagcctccgtttggaagatacttctgtgctctctcatagtatttgtttgaaggaagccctgagtagtttacataggcaacctttggatgattttccaaaaattcagccactgcctgtccattttccacatgctttggcatacgcacatgaagtgactcaaggccaagattcagcataaatgcattctgtggtgactgcatagaaccaaaatcgcgcataagctgtgctgtacatttggtaatgaacgcaccttccttgccaaatttctctgcatatgtgatgccatgatagctgtcgtcaggtgtgcacagtcccggatatttatctgcatgtgccatccagtcgaatttgccgctgtctacgattgctccgccgagtgtggctccgtgtccgtccatgtactttgtggtagagtgtgtgacaatatctgcgccccactcaatcggtctgcagtttacaggtgtcgggaaggtattgtccactataagcggtactccgtgctcgtgtgccacctttgcaaaaagctctatatcaagcaccgtaagcgcaggattggcaatagtctcaccaaacataagctttgtgtttggtctgaatgctgcattcagctcctcctctgtagcatcaggagatacgaatgtagctgtaatacccatcttcgccatagttaccgcgatgaggttgaaggtgcctccatagatggatgatgatgccacgatatggtctccgcactcacatatgttgaacatggcatagaaattggctgcctgtcctgatgatgtgagcatggcagcagtgccaccctccatagctgcgatttttcttgctaccgtatcacaggttggattctgcagtctgctgtagaaatagccctctgcctcaaggtcaaaaagctttcccatgtcctcgcttgtgtcatatttgaatgtagttgactgaataatcggaatctgtctcggctctccgtttccggctgcatagcctgcctgtacacactttgtacctatactgtattctttcattgtgcttctcctttattatgttaatgtttcagatggatatagtatattacatttggcgcgttttgacaaattcttcaaatcgtggaagtgtgagagtaattttaccgtactcagaggtatctataaccccctttcttttgagccggtctctatataccgagaataatcctgaattcatatccagtttttctctgatttcttttaccttttcttcaccacttactgatatttccaacaatatttttttatcaagctctgacagctccgaccagattttactgtacacatactcatcaaggcactgatcatattccggtaaaatatcttctatcgtgtgatcatccctgttttcccagtaaagatatcccaatacctggaatgcaaaaggatatccctttgtaagagctgccattttgtctgcctctctttgatccagttcaaaaatatccatatagtgtttcctgactgctgtaaagctaagtggctcaagcattatcttaggcgccctgtacaaaaatgtaagtgccttgtcgttctgcagatcatatatattttcaaacagccccgtcataagcagaaaaataggataatcctgtctcagaaatatctgaaatgaactgacaaatacttttacaaattcacagttcataacctcatcaactgaaatgagtaaccgcttattatgtttctttatattttcaagcatcaattccagcacattttctatatccgtaaccggtgctgcattttctatggaaacgcccagtccaaacgctgaaaaatccagttttgcattgacaaatattttattcatctgaggcatactgtaaatcttagctgcaaggctctgaagcatatctctcgtagggttaagctcaactgtcagccattcctcatccttctttatctctgatactatattggtcatcataaccgttttgcccgatccccttaccccggttatcataaaaagctggtttgcaggattttctgacctaaatgtctctactatctgattggtctgtgagattcttgatatatattgcagtggttttttcccgaatgataatgtaaatggattttgcattttgttttccccttatataactttatataactttttgtttcgtatataagtttatataaccttatataactttgcatttattatataactttatataacttttgtcaccataaattcttaatctttaaaagcatctttataagatattttatctaccagcgcttcataactgctatcatcagcttgtactatctctctcacattgtgctgctctaatgctgctgttgttttttcacctattgagtatgctgtttccacgtatgcattctccggcagcatatgaaaaaatctttccacatttgatgcgcttgtaaaaacagcttcacttaccatgtttccaatgctttcaggaatactctcatatgcctgctcatttacatatgcatcaattttttctaattgacatatttctttaagccctgcctcaaggtcaggtgaagcctcctttgccgagaaaatgcagactttgatttcatcattatcgcccatatatgaactcaattctcctgcaagttcttttccggtctgttctgccggaataatatctgcatttatgtgatgctttgcaagctctttttctgtagcttttcccaccactgcaaaccttgcatttgctataagcctgatgtctgcccctgccagctccagattatagaaaaatgatcttacaccatttttgcttgtaaaaactatccagtcagctgatcttaccttatcaacaaatttaggaattataactggtttaattatgcctgtcttaaccggtgtgacatctgctccaagctgctgtaattttgctatcaattcgtttgttttgatatacggtactgtgatttttcttccaaacagcggccttttttcaaaaaaatcaagcctgtcattcagtgaaaccacatctcccacaacgattatagccggtgatgtcagctttgcttcctcaatcttttctccgatatccgcaagcgttcctatacatttgcgctgcgcggcaagtgtaccgttcgatatcactgctgccggagtatccgctcttcgtcctgctttcataagccctgctgcaatgctttttacatgcgcaagtcccatcaaaaatacgcaggtgattgtctcatctgtaagaagggaatagtctatatctgcctcctcatcctttctgctgtgcgcagtgatgacctgaaagccttttgctatgcctctgtgtgtgataggtattcccgcagccgcaagcgctgcaaccgatgaactgacacccggtaccacttctacctccacatttctatctaccaggtagagagcttcctctccgcctcttccaaatacatacggatctccgccctttaaacggactacaagctcatgatattttgatttctcgtacaaaagctcgtttatggcatcctgcttcatgacatgcttgtgattttccttgcccacataaataagctcacagcctgcctttgccattgaaaggaactctggtgatgacagcctgtcatacaccagacaatccgcctgttttatatatttttctccttttaaagtgagcaggcccgtatctcccggtcctgctccaactaatactacttttcctgtgttttctctcatgattttcctaattattttccaatttataccgaatatcgtgcaccgcacgctccacaatattgtttctgtctgatgtcatatcccatacctgctctgtccttgcaagctgttttccatcctctgagccaaacatcgcaagaagctttagcctgttatttttgtcgctgtcattaccgcggtctttttcacttacaatatcacagtatgcagccacaggcagatggcagtttccaccgattcgctttaaaaattctctctcaatacctgcgcacagattggttttctcatctgacaaagcatcaagctttgccatcagcttagcattgtcagcacgtagctcaagcgccagtgtgccctgtgccggagccggaatcatatcatcctctgaaaagtactgtgtgatctcagaatctcttccgatacgctttattcccgccgctgcaagtacgattccatccagcctgtattcgttatacttattctgtttttcgttagctatctcattgttatttacagtattatcggcaacctcttcatatataatttcaccatcatatagcttacgaagcctcgtatcgatatttccgcgtatgccaaccaccttaaggtcagggcgcagctttaaaagctgatactttctgcgcttgcttccggttcctatcacggcaccatgaggaagctcatccagtgaagcggcattttttagcaccaaaacatcccttggatcttcacgcttccatgcctttgcaaatgtaagccctgctgccggttcatcaggcatgtctttcatggaatggactgccatatgaatctttcccgataaaagctcgtcctctatctcctttacaaagataccctttgagccaatcttatcgagtgcctttttctgctctaaatcgcctgttgtctttatgataacagccttaaaatcatcatccggatatgctctttttaacttatctatcacgtaatcagtctgaacaagagctagctttgagcctctcgttcctattaaatacttcattttactctcctacggatcatgccattttccatttataatttataaatgaacaacaacttaaaatctgtaataccatactttaaactatatttccggaatccttccattatcaatagctgcacacaatatttctttaaacacacgctttctctcggcttgagtgtcatattgcgctattactttttcgcggatctgtcccatgtattcgttcagctcaccaagaaacggagtaagaatctcctgctctttgcctttcagatactgagtcagcacagggctgtttcctccgctcgaaaatgccgccacaagattcttttcctttatgtatgacggaaaaataaagctgcaatcagccttctgatcgaccgcattgaccatgatgcccttagctttgcaatactctgcaatctcatgatttaaagcattgtcatcagtggcagcgataaccatttccatgccgtcacagtcttttcgttcaaaccttctttttatgaacgtaattctatctgctgcatttgagtccgtctgattgttttctatatttgccgtatatgagccctttttatcctctcttgctatatcatcaattgtaagctttctcagctcatcacatatatcctctgccacaaccgtgaccttcgcaccaaaatccagcattacgatcaccttgcggtatgccacatttccaccgccgacgatcagacactctctttccgtcatatccacaaacatcggaaaatacgccatttttatctccctgtaataccatatccatactttatttcatatattatttcatgccttattttatactttattatacgctttatgctttattttttgccttatgcttcacactgtatccattgagcattcctgcaaaaacaggacgaagcttggcagaaaacactgctgccgatacgcataatataaagtccggtgcaacagttatcagacagtaatccactattactatgccccagctgacaggtgttgccgcatagaaattcttcatgcagtaaaagtatattgctccaactgtataatatgccacaagtccgaccgttgccggaagaatgagtgtaaacgcattggtctttttaagcttttctgtgatggctccgattaaaaatgctgcaagcacaaagcctaagaggaacccaaagcccggtcttaaaatgtatgtaggaccaccgcctgccgcaaatacaggcactcccaccagtccgatgcacagatatactatcacgctaagcgatgccagctttgcccccagcagaaatcccgccatcagcacaaaaaaccactgtaatgtaaaatgcatggtgtacataggaagcggaatatcaatcttgataaatgctccaactgcaataagtgccgcaaaaagtgcacatgttgtaagttccttcgtttttaatttcattttcgcgcgctctttcgttttattaaatatacatgctataataacatctttctctaaaaaagaaaagccatcttcgatgaagctgacttttctttgcagctttcgctgcgactcaaaacattaacatatgatttagaagtaatattcatcagaatatattcgtaaatcctctttcgtgacctgtcctccctcgatatgaaacgagttgattacaggattttctgccataagcgacattatcatgtagctcgcacttggatcgtatgcaagctttatatcctcatccgatggccttgaagggctagacgggtgtgaatgccagttgccaagcggcttaagaccgtttgctctcatgtcctttatggctgccagctgctcctttggatccattgtgaaatggtcctcggcatggtctgtattcgtcaggtaatatacctttgtgatgagacgaccgttttcgtcctcactgcctgctatcagaccgcacgcctcctccggcagatgctctttagcatattttgctatttcatccagaaacggatatttcattcttatgatactcatatcgttcctttccttactgtctttttattcctgtgtacgaggtgcatcaaatctgcccgctgtctcctcgcagacctcctgctcgtagtcgattggctcgagaatggtcggatggtcgccacagactgcacagttgtgtgtatcctttggaagcttaatcttgtggaactccatggtgagtgcatcatatgtaagcagatatcctgtgagcagctctccaacaccgattaaatacttgatagcctccatagcctgaagcgaaccgattactccgcccatagctccgataacgcctgcctgcttacatgtaggcactgcatcctttggtggcggattcttgaatacacatctgtaacaaggtccctctcccggcacatatgtcatgagctgacccttgaaacggatgattcctgcatgtgaaaacggctttttctcaagcacacatgcatcgttgattaagaactttgccgggaaattgtcagttccatcgatgatgaaatcataatccctgataagctctctgatgtttgacgcatctacaaacatacggtatgtattgacctgaacatccgggttcatggcgttcattgtctcttttgctgactttaccttggcttttcccacatcggctgttccgtggataatctgtctctgcaggttggataaatctacctcatccgcatccacaataccgattgtaccaactcctgctgctgcaagatacatggctgccggagctccgagtccgccggcaccgataataagcaccttgccctttaataatttcttctgacctttaacgcccacctcattaaggataatgtggcgtgaatagcgttcaatctgctcatcagtcattgccattagcatccacctcccatgaagtaaaggaactctacattgtcgccatccttaagcactgtctttggcttatcctctgtggcaacaaattcctcatttattgaaactgttacatactcaggcatatctacattctcaagctcgataagctccggtaatgtaagtccatccttatattctttcttctctcctgctactgtgatagtcattttatttcctcctgtgtcacagattgtggtatctgtatgtgttattatcctgtatcagactgctttatataataatctaaaaactataataattcttcaacccatgctttcaaatcggcaggcttttgtgcgccgacctttctgtctaagacctctgcgttttttacaaaaagcagtgtcgggtttgcagtcacctcatactcatcagcgagctctccgtcaaagtttgtgttgaccttgtatacgtgaagcttatcctcataatcatcctcgatatctccgagaaccggtgccagcttcttgcaggccacacatgaatccgagtaaaaatcaacaattaccggaagcttgctttttaatactttttcatcgaaatccgcctttgaaattcttgctgccat

SEQ ID NO: 600 - DNA, 16261 bp, unidentified
  source 1..16261: mol_type = unassigned DNA
  misc_difference 8070: note = a, c, g, or t
  misc_difference 8071: note = a, c, g, or t
  misc_difference 8072: note = a, c, g, or t
  misc_difference 8073: note = a, c, g, or t
  misc_difference 8074: note = a, c, g, or t
  misc_difference 8075: note = a, c, g, or t
  misc_difference 8076: note = a, c, g, or t
  misc_difference 8077: note = a, c, g, or t
  misc_difference 8078: note = a, c, g, or t
  misc_difference 8079: note = a, c, g, or t
tggtctgctgttaatgtaattccggcttcaccacgaaaaccatctgttccaaaatactttcccattttaaatcttcctcctaatattattcttctaatttaaacgtatagtatctcatgcactaatatcaacgagtgcctcgtattcactaatctacaaatattcagtttttcaataacacaccacccttcctcagtcattgattacccgctaattgttgttccccatacactgtcatcataatcttcttaatcgttccttgtacatccagataattcgtattatggcttgcatgagactcatttgcttcgcccttgaccacgaacttgtcgcagtataaattgcggttgtcagtagccgcgcgtaaatagtgacccatattctcaccacgcaagcgctcatcacgtgttatcaaagtctcaaacaaatcatcttcatgacgagcgccaatgatattcgttcaaatatcatcaaagagctactgaatagcctttgcaagatcgcctatggtaaaagcatccaccttctggacaaacaaaacgctaaggtttgcatgctggaacttaaacacaaatatactcacattgggggccgacccccgagagttctcggcaagacttgaattgttatttttttgtgttctaggctcaaattgactctactagttatttttcatttttttcaaagccgctaacgcaatttttattcctgcaatcatcccaatgcaaattaatgtataccttaacacagtataacgatacaatactaaaccgaacaacgcagctatgatcgttaatattgccataaacaagactgccttatcattatataccgatttatttccagtttcttcgagatgaacctttcttgcgaatataacttgtgcacctgctaacactatatatgctaccagtgtagtatatgcagctgccatatagccaaaaatatttatacatatgaaattcagtataagatttacaatagctgcgatagtcgaagaatacattatataattagtttttttatggtatatgagtaaattagagtacatatttgatacagaagtcaaaaacactcctgctgcaataggcggcataatataaattgcttcataatattccttagtagctaatattctaactatttctggcgctaaaaaagtaagcataactgcaataatagcatacgatcccattaaagctaatgataattctctaattttattatcttttttactcatattctgatataaatacggtataaatgatgaattaattgcactccaaactaatagtgaaattgagcttacagtatataaagtactatatattccaaccgcatcattccccaccattttgcttatcatcattcgatcagaaacacttaaaatctgtgctgcaaaagcataaccaataagaggagcgctcagcttcaaagagtatttccaatactttatatttactatcgttttcccttttgcatatattttaatccatataaccgccgaaatcgccattgttgctatgttagttgcatacaatcggcccaccacaacttgatccgatcccgctttatttaaatataaaacaactatcacggagaatattgttgatgctaaagctgatcccattgtcaatgcaccagctaatttatatttatattcatatctttgtcttaacagccaaaaatcctgcgccggtgcaaagaaaaacattactagcatcaaaattatcagcacagaaggcaaccctataattctattccaaatatcaggtatgaggaaataaatacatcctagaacaattgccatcattgatgttaatgtcaaaacagccgattgatattgatccctttccccctcaaagtctttcatcgctgcctgaaatccacccgatgttaatgatagcgttgcaattacactcaacaaagaataccaggagttatataaattaaccattccaatttcgcttgtagacattattctcgtgaaaattggaactgtaatcattgataatcctcgtgaaaaaacagatgccatggtataaaccactgctgcttttacacccaaaggaatattttgtagcctttcctttagcattttattctcctacaatgtatttgcgggtaaccccacagcatcctgccgtgttgctatccaacttattgcctaagctgtagaataagaacgttgtggcctgacaccattttatctgggcttacacgttcactaaggagtcagtcagccatagagttctaattcgcagcattcgatttacgcaggtatctggaattccagccagaaccatatttctgttcatctcaaacgtaaaaaaggaaaaagcatagcaaaaaacatctaatatcaagagtacttctgtagcatgatttctggattcttataagaatcctcctctccagacccttccttcaatctcttcttcctgattttctgtttggacaaagagcagtccctagatgtttcacattcagtactagactttataacactatttacattcaaacgcagactcacttacacttattcaaaaatgcattaaattgttctatatatttatcaggcgtaaacagttcatttgctgttgtcaatgcattattttttatttcttcaatttgttctcttgacaaatcgataatactaagcaatgtggtttctaatgtattcaggtcattatttctaacaaggaatccattatatttatcttttacaaatagatccgtgcctcctacagatgtgcaaatactaggaacccctaacatcattgcctcgcaaaactttgtcgaaactcctgctttcgcatatcttttattcatccgtaatagaaccgacaaatctgccttttccactatacttagcgtcttatcatgtgacaatcttccatgacagtaaattccatatttttctaattcatcgttccctaccaatttctgcacttgcatcttatcagggccaattatatcaatgacaacacgtacttcatcagtatttaatcgaattatcgcatgtaatagagtatcaatataatcctttgaagccaatgcgcctgcataaacaattttcagcacttttctattatctgaattttctcttattaattttttctttttatcagcttctgggaaaattggcggtaacaaaatagtattacagttttgctctaaataatgttgatacaaatatttgcttattgctataacattgccaacttttttatcgatatattttttttgtaagtctttttctgtattaataactctcggaataattccccgataatctttagggtttctccattccgtagtttctattaccaacttaaatccttcttttttagaaagatttaacatttttaaaacatataatatcgaattcggctcatataaaatgattatatcaggttttattttatcaagaaattttagtgtttgcttaaaataaaatttcccaaatacttggtctaaattccaaaaagcgcctcttacctttctccgccccggataaggatccatatattggtatgccacctcatctacttcttccattcttttgccatcagaagccaactcacataacacatgaacttcatgtccacaagatttcataaatatagctctattcctaacatgaattgatggagcagtgtctggatatccgacatttccaatatataatattatcatgaattgccatcctctcttttctaattgtttctcatgataagatttacaatgcacctaatttaacttaatcttcaaataatttctcccattcctttgctattttctttatatttagctgttctctcaactcacttgcttgctttcccagtctttttgctttttccggattttttagtaatcctattatttcatccgcaaatattctatcatcaccgacaggtgtaagtatgccattaatattattttttataaccattctagcgccacctatcggacaatctgtacataccacaggaagtcctatcgccatagcttccagcattgaattagacattccctcaaaatctgatgatgatacaaaaacactagcattcactatatatgtttgaacatttgctttttgtcccataaatttaacattatcagaaatatttagttctttagcgtatttttccaattcctcctgttgttcgcctttaccatatatttctaatacatattccgggaacacatcaaggactcttttcattgccctgagaagcatgaatatatttttttgttgactcaatctatttacagctacaattcttttttctctttctccatcatatggatccggaattgacgaggtaataggatttgcaattacttttgactttttctctaggctcttaccataatactgttttgcatcttcggtttggaaaacaactctatatgctttttcgtaactatactttacataaatcttctgataccaattgtaataatactgcggagcatttctttccgataaaataaatctatatttatttagcaaattccccaatatcagatattgatatcccaagcccaacgaaatcacataatctggcgcttgatttttcaatagtttttttaattcttttattctaaaaaatattgcacatttccctgtattctcaggcaaataatcaattttaattttcggattaatcctataattattatttgcctttgaaaatacaataaagaaaacttcataaccgctttcacaaaaataatcggctaaggcaactgtaactctctcagcaccgcctccacctaagctacctattaaaaatgatatctttttcatcagcctatgatctcccgtaatatttttctcttaatgcttttccaacaagcatcattacaataacgccactatatcccaactcaatctgataatatgtagaaacgcccatatacgctagtaatacaaaaaatccgacaaattttgctgctcgaattactattctactttgctcattataaatcttactgccttttaaagtagatgcatatgcacacaaccatgcaatcactgggaagattccataatggaacataacaaacataaactgattatcgaaataagtatagttcttatttcccaagtagctataagaagcattgatacccaatccaaagatcaaatcctcccatgaatgctgcgcaaaaaagattacgtattgtccacttctggtatcttccattcctctattgaataaatttcctgtaatctctggaaaaatataagaaactcccaataccgtaataataatcagcaaaaatcccattaaaatcttaacagatctattcctatcacccagaacagcaacaaatataaataatagtattaatgtctgtaatacccatgctcttgactgtgtaataaatgcagcagcgataataagcaacaaattacagtatatcagctttcttttatccttttgggggaaatccaaaaatgtcataatgcaagcagatgtaaaccaacatgaaaatattcctttatatgacgcattcataggccattttattccataattagcccaaaaagaaaaaacagcaatataaaaacaacagcagaagagtatatttatatatggcaatttgttttccaatatattccatatattgtcatcaaaaccaagtagcgctgccactggcaacaaaatcactgatgtagaaatcgattcaaaaaaaacagattgagcaggcgctttatctaaagctaatacagtccatatcaaataatataaaatcgaacttataatcaaaatccttattcctgcatggactttttttatatattgtataaaacatctaaatatcagcacaagaataataatacttgaaaaacttaaaaagaaagttccccatcttcctttactaacaaacctgtatgtatcatatatcggctcccattcacccaacatatttcttagcaaagaccctaaaatcacgcatatcaaatatatcttaaataaaagttcattgattgtgtattttgttctcatattaaaatcaccatttggatttttcttgcaatatatttatatgattttctaattcttcgttcgtaaatctttcagaaacacgtctaccgggtactcctacatatatgccatagggatgagtacttttagttaacacagtccccgctccaataacacatccctctgctacagttactcccttaagaattgttacattagcccctatccaaacatccttctcaataatgacatcctgatcgttttcgtcatctttttcttcatctgttacatcagccatgtactttcctactacatttatcttgtgatcgcctgtgatgatactaagtcctgggccaataattactttctctttaatgataatgtttgctcgtgttgtccacaacaatgcatgagggccaatcgcaacatcatctcctatactaatgttgccaattcccttaatatcgcttttttcagcaatatgtacatttttaccacagcttccaaaagaagatttaattacactttctcggagaatcttataaaaaaccttacgcacaaattcttctgatctgtatacgaggcttccgattttattgattccaataccccccccccaatttttatataggtttcttctgtcatagcttgtcatctctcaatctctccacttccgtataaactctttcaagtttatcaatgttttgctgtagagaatatgattctcttataatatcaacactttcctgtccagcttttaatctcttttcatcatctgtaagatactcaataattgcacaagccatgcttttactatcacctggtttatacaaatatccgttaattccttgtcttacaattttaggaattcctccaacatctgtactcacaattggaagaccacaccccatagcgtccaatattgccataggcattccctcattgtacgaagggagaagaaaaatgtctgcctctctcaaatattgtcttttttgctcatttcggatccatcccggaaattccacattatctttatatttcgcactgagtttctgcttgactttttcgatttcaccacttcccccaagaataaaccgagcatccggtattttgctgcatacttggtctacaatagctggaatatcaaagcatccttttctttcacatataaatcctagaaaaagaatcagcttattattcggttttgtaagcttctctttgatcaaatcttcttgcaaaataccataattctctacaactctaattgtctgttctggcacaatttctgcaagattcttcttccattcttctgacagtgcgatggttctaatgcatttattgtaaatcttttctatggttttcttctttttctgagatttttttcgatagaactcatcaaaatccgcaccatgaacatgattgacaaccggaattttagagagagaggcaatctcaattattaaagcctttctataaaaacttcctccaaaagagctatggacatgaacaagatttggtttccaaaacaaagctgtataaataaatttcaaatacgcgcttaatgctttagaagttttttgaattacacttccatcgcaataggtctctataaatcgcacatcgtaatcttctgtcaattgagagttccggtaaccattgactacagatgtaattccaccctttgctgtgaagctcggaactaccatgcagacctttttcttcattcctttttttcaaccttttctcttatcagataaaaaacaaacttcgaattagtttctacataccgcttaaataatctctttggttccttactccaccgatacagccattctaaactgtgatcctgcatccactgcggtgcacgtggaatcactccagaaataacattaaatgctccaccaacagctatccaaacggcctttgtatttttgctgagttttgcacagaacttttcttgacgtggcgcaccgagtgcaacccatacaaaatccgctttcgattcgttgattctatcgcacagttctgtttcttcttgtatcgtcaacggcctaaacaatgatggctnnnnnnnnnngctcacaaccgacaatggataattgtggataattcgcctttaagtattcaagtaatgcattcagatttttttgcgttgttccataaaaatagtgacgagcatcacttttttctgtggctgcaatcacttgctccataaaatcaggcccggtcactcgccccatttccgaatacccgcgacgaactccaacgctagataagggctttccgtctggcaaagtcataaatgaattgttttgaaccgcttgatagtccaaattctcatgtgctgttacggtagtatgaacattacaagcacaaatatattttcctcttgctttgtccatgttttctaataaatattgaatcgcagtttctttgttaacagccgaaatttcaacacctaatatattcactcgtcgcatagctttctcactttataactcagtatttcctccacaccatcttattgaccacgtttacataaccctgaatgatgcgaaccaccttcatggacacggtctcgtccacatagtccgggcagggcttgcccagaacgcccttctgcttcatcttaatggccatatcggtggcgttgagaagttcccgagtggtaataccagccaaaatgaagtcaccggcttccagcgcctcgggacgttccgtactggtacggatgcacacggcggcgatgggatgaccaatggacagatagaagctgctctcctcgggcagagtgccagagtcggagacgattgccaaagcgttcatttgcagcttgttgtagtcgttgaagcccagcggctcattgacccggacacgaggatccagtttgaagccactcttttccagacggtgcttgcttctgggatggcaggagtacaggatgggcatatcgtacttctctgccagtgcgttgatagcagtaaacaggctcaggaagttcttttcggaatcgatgttctcctcacggtgggcggacagcagaatatacttatccttttccagccccagacgctccaacacatcgcttttctgaatcttctccagattcatgtgcagcacctctgccataggagaacctgtctggtaggtacgctccttgggcagacccgtatccgccagatacttccgggcgaattcggaatagcacatattcacgtcggaaatcacatccacgatacggcgattggtctcctcgggcagacactcgtccttgcagcggttgcctgcctccatgtgaaacagcgggatgtgcagtcgttttgcactgatggcagaaaggcaggagttggtatcgcccagcaccagatagccctccggctgcaattcagagaggagttcatagctgcggcccataatgttgccgcaggtaacaccaagattctcgccaaccaccggcaccaaaatgtccgggccatactccccgaaggtgtttttcaactcgaaatcctcccagaaaacggtggaaaggtttctgtcccagttttgattgtaatagaccacgcagcagtcaaagtattcacggcaacgcttgataacggcagccagccgaatgatctcaggacgggtgccacagccaatcatgaccttggtgcgcccgtcatttttccatttaaaattgtgttccataatattctcctaacgtcaaccagtatcttttcttacaccggctcgaaaaaggtgtccgggtggttcgggttaaagatctcattacaggtcatcaccgtcaccagattctccgttttcgacagattgatgatattgtgagtccagccgggaatcatgtggactgcctcgatcttatcgccagaaacctcaaactccaccgtttctccggtgttgatgttccgctcctgaatcagtccgtgaccggcaaccacgatgaacagctcccacttagagttgtgccagtgctgccccttggtgatacctgggcggctgatgttgatgctcacctgcccacagtcagcggtatgaaccaattccgtgaaagaaccacggttgtccacgttcatcttcagggcatacttgaacttgtccgtcggcagataggtcaggtacagggaatacaacttcttagcaaaggaaccgtctggcatcttgggcatcatgagcgtagtcggctgttccttgaactcctgcagcagatctacgatctcgcccagtgttaccttgtgtgtcacggggacgcagcagtaacggccatcttctttcagaatagtctctacaccgtcaaattcgcagtgctgttccttgccttccagcagatcaaacattccttctactaggtcgtcaatgtacagcagctccagctcggtgctgcggtcattgacagtgaaaggctcatcgttggcaaccgcccagcagaaggtactgacggcgctgttgtacttggggcggctatgccccatcaggttcacgaagcgatagactgcaaccttagccccagtttcttcagcatactggaagaacagctcctcgccagcctttttgctacgaccatactcactattaccgaagcggccagccaacgtagcttgaatggaggaggacagcataatggttgccttgttgttgtgctttttcaagcagttcagcaggtcagatgcaaagccgaagttgcccttcatgaaatcctccgggttttctggacgatttacccctgccagattgaacacgaagtctgccctgcggcagtactcgtccagttcctccgaggtagaatccagatcatactcgtagatttctttaatatccagtgccggacgggtcttgtttttcccatcacgaatgtttttcaggttgttacaaagggcggttcccaccatacccttggcacctgtgactagaatgttcattctttcacctcttaatgtactgcagtgcagtccgaaacatctgcactatccagcacagttgcattattgcaaatggtgcagttgctgccgatgcgggcaaatttccccacagttgcacctgtgcgaatcacgctgctggtgtagatcaaggcgtagtcccctaccgttgcatcacagtggacttccgttccggcattcagcaaaacaccgcttccgacagaggctccattttggatacaagcgttttgcagaaccacacagccacagccaacttcagcaaacggactgacataggcactgggagcaatgatgtttgggaacgcatagccaagtgattttgctttctcatacacctgtgcccggaactgattgttgccgatgcctaccaccagcaagctgtactctttccgcagctccgacaaatcggcaaggccgccaaccaccggaatgccacagatctcagtacccacagactgtccatcatccacaaaagcgcaatcgtattggagcatcgcctgctccgccaccatgcgcccgaagccaccggcaccaaccagcagcagcttttccttagacattcgggatacccttcagtgcgttctggacatactcggtggtcaggatcttcttaacagtgccttccacatccagacgagtagtattatggctggtgtaggactcgtccgccatagtatgtacctcgccgttgacgacaaacttatcgtagttcaggtcacggttatccgcagcaacacggaaataatggcccatatcctggctgcgcagacgctcctcacgggtcatcagggtctcaaacagcttctcgccgtggcgggtgccgatgatgttcgtgccggtatcgccgaacagttgctggacagccttagccaaatcgccaatagtagaggcatcagacttctggatgaacagatcgccggggttagcgtgctggaaggcgaacaagaccagatccacagcctcgtccaggttcatcagaaagcgggtcatgttggggtcggtgatagtgatggggttgcctgccttgatctggtcgatgaacagagggataacggaaccgcggctgcacataacgttgccgtaacgggtgcagcagatggtagtgccaccacgctcagcagctacacgggcattggcgtagatgacgtgctccatcatggccttggagatacccatagcgttgatggggtaagcagctttgtcggtggacaggcagacaacacgcttgacgccagcgtcaatagcggcgtgcaacacattatcagtaccgatgatgttggtctggacggcctgcatggggaagaactcgcaggaaggaacctgcttcagagcagcagcatggaagatgtaatcaacaccgggcattgcgtcacggatagactgaggattgcggacatcgccgatatagaacttcaccttcttggcgttctccgggtgcttggcctgaagctcatggcgcatatcatcctgcttcttttcatcacgagagaagatacggatctccttcaggtcagaatccaggaagtgcttcagaacggtagaaccaaaagaaccagtaccaccagtgatcataagggttgcgttatcaaatgcagacataattattctccttttaaataaaaattttatattaatcacgctggaaaatatcgcgtgaataaaccttattcttcacatcatccagacacttgtcatagcggtttgcgatgatggcctggctctgttttttgaactcttctaaatcattaacaacacggctaccaaagaatgtgtccccatccttcagtgtaggctcataaataatgaccgtagcaccttttgccttgatgcgcttcataactccctgaatggaactctggcggaagttatcgctgttgctcttcatcgtcagacggtaaacgccaaccacaacttctttttccttgctctcatcccagctatcatttgcttcataagcaccagcaatttcaagcacccgatccgcaataaaatctttacgagtgcggttgctctcaacgattgcttcaatcaagttttccggtacatcggcataatttgcgagcagctgtttagtgtccttgggcaagcagtacccgccgtaaccgaagctgggattgttgtaatgagtaccgatacgcggatcaaggcagacgccgttgataatctgctgagtattcagccccttcatctctgcataggtatccagttcattgaagtagctaacacgcagagccagataagtattagcaaacaacttaaccgcttctgcttcggtaaaacccatgaacagagtgtcaatgttttccttgattgcaccttcctgaagcaattcagcaaaagtatgtgcagcttttaccagccgagcgttttctacatccgtaccaacgatgatacgggaagggtaaaggttatcatacagagccttgctctcacgcagaaattccgggctgaagataatattgtcgcagtgatatttttcgcggacacttgctgtgaagccaacaggaatcgtggactttatcaccataattgcttccgggttatactcaattaccagtttgataaccgcttcaactgcagaggtatcaaagaaatttttcttgctgtcatagttggtaggagctgcaatgacaacaaaatcagcatcagaatacgcttccttggcatccagagttgcagtcagatccagctccttttctgccagatacttctcaatgtattcgtcccgaatcggagatttcttgttattgatcatctccaccttctcaggaacgatatccaaagccgttacctgatggtgctgtgccagcaacactgccagcgaaagcccaacatatcccgtaccggccacggcaattttcaaatctttaaactccttcattattactttctcccttgtatacttatcttgagaacacactcttcacatactcatagctgttaatatcgccaatgtcataccgtttgcccggcataacgtaagcgtgcattggggtctgtttgctcagccatgcggcaaagctacctggtgcgtcataaccgcagccattgtccagtgcttcctgaatccgctttacatcacaggcacggtagcaatagaacggcggcacagccagatttcctttcggctctttcggcttttcctcatagctggtaatcaggtcattgccatccaacgtgataatcgccgttttctgctgctttttcagttcattttccacatggcacatcacacaggaagtatccttttcctttgcgaactccacgaacttggaaagactgaaatccagcacattgtcgccagccataaccagcaaatcatcagcaaaattcagcttttccaccgccagctgaatatctttgactgctcccagacgagtttcattggtgcttgtgccatcgtcgattacagtaatctcataaggccgcgtcttttgcttattgcttttccaatcctcaaaatgctgcgcgaacttgtggttggaaattaccacaaattcgtcaatatcggtggtatccactaaatcatccaccagccaatcgaggatggacttttctcccactttcaggagcggcttcggaaaattctccgtcagcggataaagccgtgtagcgtagcccgctgctaaaatcaaacatttcatctatgtattctccttacagttccacaccatcggcactctcgcacagatggaaactgtacttacattccaatgccgggaacgctttcagatactctgctgtgacctttgcttcaatatcttcggccttgtctgggtcaatcagcgccatgcagcagcctttgaatcccgcaccggagaagcggccaccgtagataccatcagtgtcagccataatttcatacagttttttcaattcatcgcagccacactcgtaattataaatggaagatttgccactctcgaaaaccagctgaccgtagccttccaaatcacctttacgccacagttctgcacccttttcggcacgagcaaactcgctgtaatagtgttctgcgcgtctacgccacaattctggcagacggtctttataggcttcaaacacctcatacggcacatcgcgcagccgggtatttgcaaaggtgtcatagtccatccctgcatagcccattagtgcataggccgctgccttgcactcgtcctgccgcagattgtacttagagtttttcaaagaacgctccaagccggagaagaagattgccaccttataaggcttcattttctcactggtagggatcagttcatagctgtcatctttcgtatcgaggtacagtagatggtttttcttagaaagaacttcgcagctctggtcgagcttgccgcaagcaacaccaacatactggttttctgcggccttcgccgtgagaatcatctccatcggctctagatggataccattcactttgcacagtgcagacaaaaagcaaataatgaccgaagccgacgaggacaaaccgccaatcggcaggctaccctcgataatgccagacagaccaactttcaggcggtacttttctcccagcatctttgccgcaccacgcagatgatcagcccagtctccctgcttttcttccggcactgcatttacaaagaactgggcacgcttcgggaagttcagcgactgcaactccaccacaccattctgtttcgggtggtaggccatgtggattcccttgtcgattgccaaaccattgatttttccgtactgatggtcgatatgcgcacccagcggactgatgcggtacgggcagaacgccacatcaaacggttcctgatgatataattccttgtaaacctcaacacacttcatcggtttattttcctattcttcattatttgtagaactttgcgtaccactcagcgaacttccgcaacccctcgcgcaaactggtagagggcttatatccgaagtcacgctccagcgcactggtatctgcataggtcacaggtacatcaccaggctgcatcggaaccaattttttgtgtgcttcaaaatcataatcttccggcagaacaccagcacgaatcagttcttcttgcaaaatctgtacaaagtccagcagattttccgggttctggttgccgatgttataaactgcatacggaggaacgggcagaccatcttcaccatttttacgttccggcgcaccctgcatcacacggacaacgccctcgacaatatcatccacataagtaaagtcacgcttgcagttaccgtagttgaaaatctgaatcgtttcgcctttcagcagcttgttagtaaagccgaagtacgccatatccgggcgaccagcagggccgtata

SEQ ID NO: 601 - DNA, 31618 bp, unidentified
  source 1..31618: mol_type = unassigned DNA
ttatcttcaaacgctttttgtgtttttgagctttcattttccatagaaagctccatatatgatacccatacaccacgcatttcttcatcactttcgggtgtgtcggcagttgcctttgatgataaagctgcaatgttgttgatatcattctgctttttgggcggtttttctcttgtaaatgagcttatgcagataacgcttaacattgctattacagatactataatcggaacaatctttttgtttttcaatcaaatcatcctttggagttctcatggaaattttcatcatatacatttgcatcatcagcctgatatcaattatcgtaacagtctgtgacaaatactttgcaattcaccgcaaatggagagtacgagaaagcacattgctgattttctccgcactcggaggaagtgttgcaatgtacactacaatgcaattaatcagacacaaaacaagacacattaaatttatgctcggcataccgataatatttattattcagctgataattctgttttttgtttggaggatgatttatgtctgacagactgtattttcccgtacccgacgaatgtgacaatatgcttgctcaaagatttctgcgtgataaatgcgggctttctgcaagaataataacacgactgaaaagagaaaaagacggtattttgatggacgggaaaattttaagaacaattgactgtgtgcaaagcggaaaaaccgtttcaattgcaattcccgatgaaaaatgtgaaattgaaccgacaaaggggacacttgatataagatatgaggatgaacattttcttgtggtaaacaaaccgcattccatgcctgttcatcctgtaaagcagcaccaaagcgatacgcttgcaaatattgtttcgtactattgcagtcaaaatggcaagccatttgtatttcgtgcaattaatcgacttgacaaggatacctcagggcttgttcttatagccaaaaaccgttttacagccaatgctgtaaaaaataaaacgcataaagtctattacgctttatgcgagggcaaaataaataccgaaggtgtagttgataagcctatggatttgcgtgatgattccaaaatggtgcgaattgtccgtgatgacggaatgaaagcagttacgcactataaaccgcttgttgcaacaaaagattttacattgcttgaattgtggcttgaaaccggcagaacacatcaaattcgctgtcatatggcttatttagggcatccgcttatgggtgatgacttgtacggcggaaagcttgataaaatatcaaggcaggcacttcattgtgcaagacttgaattttatcatccgataaaaaatgaatacattacggttactgccgaaattcccgaagatatgcggtctgtaataaacaacaaagaggattgaacaataaaaagttcaatcctctttaaatttacaaacttttatcgacaatgcccggacaaaaaatctatgtgcgttcctcacacttgcaatgacagcaacattatttgccggttgtttaggaaattccgattcataggattgtactactatctttcaaacggtttgcaacagtgggcttttgtatatcttatatttggtctgtttgtaccgatattaattagcattattttaaataaaatctgtcatattgcacaaaaacatatagtgaaattttgtaacaaataatatctaaaaatcattgcgtttatatatttgatatgttaaaattgtcttacaagatagataaattgattaataaatgtaattacaataccaaagctatattgcaaatataaaatattggaaactgcttaattttaaattacagaagtagcgaattgatttaaaaatataaaatcaattttaaaacttatttcagtatgttgtgtttaaatgacagttaaagtattaatatttttaaataaaatttttagcaattaaaataagtatgaaaggaggtaagtccaatggtttaatgtcttaatcgttgtttcaactgaaaattatattaataatattttaacataacaaaggaggaactctttatgaaacacaagataagaaaaataacaacaacaatgttagctacaatatgtgctttttcatcagttgcggctataagcgctagcgcagcttccagtacaagatatgcagaaatgagtaatggttatacagtatcatcaacggcttcatattccggtaacacaactagtggaaaaggaagtgttactaatggcggaccgtgttcaataaaggtttgggtgtatggatattacaaatccggtagttatgtgaagttatcgtgcaattcgtatgatagcgttgataataacaagagccttacggttactacaaacggttattatactttagtaggctcaaaatgtatttctcaatttgatagtgcaacaactgtatctgctacagtcggcaaaacagcataagtttgtgagcccacccgaatgtagcgggtgggctctgaggtgtttatatgaaaattatgattaaaaaatacactgcatttttgtttctgatttcatttgtttttttgtgcggatgtaatcaaaaaatgagtatcgacagttctgatacatatgttcctaatcaggacagtcaggagaattttataaggtacggcagtcagctctattttgcagatactcatacgggcatttactttttaaattcagataacggatttttgtatgtgattgataaggaaacgcatagttgtcaacctttgtgcaatcgaagtgattgtatgcatgacaaagaaacctcgtttgagaaaaagaaagagtgtacagcatttttaaatacatatttcagaagtcttgtttactacaatgactgcatttattttcaatcggtcgaggataaaaccgacaaagacggtgtaacttatgaattaaatgaaatttgcaaaatttcaactgacggaacaaatcgtgaggttttatattcgacaagggattatacaatttgggactttaaaattcacagaggatatatttattttgacggaagtaaaaaagataacgaaggagcggcagaaggcagtaatatggcactttacaaggtttctgccgatggtaaaggaaacacagatgagttactgccgtactataaatacgatatacttaatggtatgagtgtatgtgacaccagattctacggcaatcatctttttttatggataacaaagcttgacggtaccaaggaaaacagctacttgataaactatgatttacagaccgataaatgggaaaatctcagtgaaaagttggaagtaaatataaattcaatgtttacaattttcaatgataagcttattttcgcaaacggaagtaaggtgtatgagtgcggttttaacggagaaaatcaaaagaaaattcttgattgttctgatttgattgcaggttatcaatactacactccttttacaaatgacggtgaaaatctgataatttcagctgctaatgatgataatgaggctgataagttgattttctgtgataaaagctataaggcaactttaaagaaaatgccgtttgaatttactgccgaaataggttttgacagcagttgttttattgattacaacgaagaagaaaaaacactttattatattgataaaaataacacagaaaatgccgatgaaatttatacttttgagtaacagatgaatttatgaaactctttatttatgaactgaaaaagatacttaataaaaaaatattttttgtttttttattgctctgccttgcaatcaacggctttttattatattcatcgcaaaataccgaagaaaacagcattagaatcacttattccaatgagtatgctaaaatgctcaatagttattcttcaatgtctttgaatgacgctgaaaagcagattgacaatgaactgcttgcatatgaaatttttagcagacttgaaaatcttgcacagactgataacgaggaacttattgaaaattacacatatgaacttgatgagtatcgaaagagtaatccggatgcgtatcaaaaggctgttgaaatgagtgaaaaaggcggagataacttttggaaaaacagttttctctatgatatttcgcagcagattgagtatataaattcctatccggattttattgacaaaatgtatgacagggcaaaggcgcagtcgtcctcttcaatttttggcgataaaaattctttttcatataaaaatctttacaaaacatccaacgattattcagggttaaaaaacaccaagctaagccttgtaaattctgatgcttttattgcaacaacagaatacagcttaaccgatatttttataatcgccattgtgtttttgctttgcgtttatctttttcaatatgagcgtgaaaaaggactgtattcgttggtacgatgtacaaaattcggcagattcaaaactataatttcaaaattcatgttgctttttgtactgtcagctgttgtatcaatattattcattttttgcaattttatcataaacactttcctgtatggcagtaccgatttaagcgtaaatattcaatcaatttccgagtttcgcaactgtacccttacagttacagcaggtcaatttttgattttgtttgcatttgcaaaaataatggggacttttgttatttcatcgtttttggctcttgtatttattatcttttcaagttctgcaacgatgtatcttacagggctcgtaataattggtgcagagtatttgctctataccttgattggacagaactcttttttgaaccttttaaagtacattaatattttctatattcttgacggcggggaattttttggaagttatctgaatcttaatattttttcaaatgcagtaacttcgattccgattgcatttgccgtttttggtacagtatttcttttgtgtacggtgttttcctgcatattattttgcaaacgcaatcaacagaagactgccggcattttttcaagactgcttgaaaagtttaaatcaagattttttacattaaacggcagtaccggcgtttttaaaggcgaagtttttaaatttactattcaaaataaaatggctgttatgattgttttgtttgtgctttttgcaattatttcatcgttcggaacggttcgttacccttattcagaaaattcggatgctgactacaaagcgtatatggaatatcttgagggtgacataacttcggaaaaggaaaactatattttgaaacagcaaaattattttaacaacttgcaacaacgcatgggcgaaattgctgaaaatagtgagctttccgaaaatgcaaaacaggctatgtccaagtcgattgaaaatattttaaacagcaaagggattgcatttgaaagagtaatcgaacaatacaatcgactccttgaactagataaaaagggcatagatgcaaaatttattgatgaaaacatctataaaagttttgtttcaagtaaaacaagggaatggaacgattttgctttgctttgccttgttcttgtgataggtgttccttatgtattttcacccgagtataaaaatggtatgatcaaccttattcgtactactgaaaacggtaaaacaaaactgttttttggaaaaatagtagtggagtgtatatatttgttaatagcatttacagctctgtatgtgccgtattttgtaagatttataaatacatacggtgcgaacagtttgaatacgcccttagtatgtatttttgaaaatgttcaagaaacatcttttagtgtgataaatgcggtagttgtcaatctcatttgttactttttgcttgcaacagcagtaacatttgttattacagcagtttcaatttttacccgtagcagtatgtttacaatggtggtttcaactgttttagttatattaccattgcttgctttgtattcgattgaaaatgtaagaataggttattgggttgtaaattcccatattatagctatcgttatgacttgcttgctgagtatcttaattgcaattgtcacacttgaaatttctaaattaaaatttaccgaaacaagaatatggaggcgaataaatgccaaagcttgaggttaaaggtattacaaaagtctataaaaaaggagcggtaaaagcacttgatgattttaccgttacgcttactccgggtgtgtatggacttcttggtcctaacggtgcaggtaaatcaacacttatgaatatcattaccgataatctgaattcagataaaggtgaagtgttgtatgacggagaaaatattaaaaaattaggtaaaaattatcggagcgttctcggttatatgccgcagcaacaaggtctgtatgatgattttactcttaaccgatttttgtggtatatggcggcattaaagggattaaaaaagaaggaggctaaggaaaaaataacctcacttcttgatacggtaaatctcactaatgcggcacataaaaaactcggcggattttcgggaggtatgaaacaaagagccttgattgctcaggcacttttgaatgacccgaaaattttgattcttgatgaaccgactgcgggccttgacccaaaagagagaattcgtatccgcaattttataagtgaaattgcagaagataaaatcgtgctcatttctactcatgttgtgtccgatattgagttcattgctaaagagattatacttctaaagcagggaaaacttgtgtcacacgatacctgccaaaatcttgtaaatgaaattgcaaataaggtagttgagacggaaatcgaaaaagaagaattaaaatattttcaggataattaccgagtttcaaatctctgtcataatgatgataaaatcgtagtaagattagtaacagataatccccctgaaaatcataaaataacaattgcaaacccaacccttgaagatttgtacctctatatttttgaacaaggaatgtgatattaaaattattgccgacaagtaatggcgttctatgctaatacttgtcggtatttttatgcactttttacataaaatcggaatggtataacggaatgtaaatacaaaaatcctcatatgccgatagtgtggataggctttgcaatatttatgttgctatgaaaaggctttacaacacagcttgtatcaatatggtttgttctcggctcggtttatgtttacggatttaagcgatattgatgaaacagctcaggcaaaggtcggtgccgaaatatggacagtaaagtccgacaaagctccgcattcaaaaggaacaaaaagcaaggcaactgtacttacataactttctctccgaaaagcctttatgtgttcatagtgataattactaatttcttgatatcttagtgtacaataataaattagtcacacaaactttgtcaatagtggaaaaaagtaaaatattgttgttgaaataaattggatattggtttataatagtaatcaataatgcagaaaacgaattaatatgtaaaacggaggtagttctatggaagaaaaggacgaaattgttatttcattgtcagatgtatggaatattattaagaaaaatgcagcttttattatcgtagttacgcttatttgtgctatcggaagcttttttataacaagatattttattccaaagtcatacacatcttcaattcagttatatgttgatacgtcaaatgatgatgaaaataaaaacaacctcaatatactttctgagcaaacctatgcacagaatcttgttgctacatatattaaaatgctgaacacaaatactttttacacagagctttccgagcgtataaacaacaaatataccgctaaacagcttagcgaaatggtttctttcagcagtgacgaaaagacagagatatttgacgctaaggttactactccttctccaaatgattcaaagcttatagctgatgcggttggaaaggttgcacctgaggctatttcaagacttaaatccaaagcaacgctaaaaatagttgattatgctcaactgcctactactccttcatctccaaatgaaataaagaacgtaataattgcaatgatagtaggacttgttatatctgtcggaatttcattgctcagagcgttccttgataaaaagatgagatacaacgaggaaatgactatgattggagatattccgattcttgcagctattccaaaatttgacgcagtaaataaatctaacaaaaaaaaagataagagggagtcagtatgaaaaagtatccaaaaagaggctcttttcaagatgtaaaactcaatgcagaggcagtcggctttcagattaaagagtcttataaaaaagcaagaacaaatattgcttattcaattgtaaaaaaaggctgtaaaatggtgtctattacaagctcttcaaaatccgaaggaaagactattactgcagttaatatagctattgcacttgcacagcaggttgataccagggtactgattattgattgtgatttgagaagacctcgaattcaatcggtgcttgaaatacctgttgacaagggaattacaaattacctcaattttgaatgtgaggtatctgatatagtttacacttctaaattggacaatcttgacgctatctgttgcggtactattcctccgaacccgtcggagcttttatcaagtgacaatatgaaagaattaatcaaagagctttcaaaacaatatgattatattatatttgatactacgccaattggcgtagtaattgacgctttacctataataaagcaaactgacggtgttgttgttatagtcagagataatgttaccgacatcagggactacaaaaaaacaattgatattctcaaacgctccgaagctaatattatcggtgttatatttaatgatgttgagcctgtcggtaaacgcaaatacggcggaggatacaaatacggttactacggcgaatacggctattaatttttttgttagaggggtgtagttttggcgaaaagaatgtatgcaaatgaaagaaaaaacaatattttcgaaaaaaaggttatgcctgaaaataatatttattatgcaaccttaaaaacaagacacggttaccggtggctaagaagatttcaggatattttgttctctctgatagctattattgttctttctcccgttatgctgattacagttatttctatcattattgatgatcccaaaggaggtcctgttttttcgcagataagagtgggaaaaaacggtaaagagtttaaaatgtataaatttcgctcaatggttgttgatgcggaagacaggcttaaggaactgctagaagaaaatgaaatggatggacctgtttttaaaattgccgatgatccgagaattacaagagtcggaaaatttataagaaaaacaagtattgatgagcttccacagctttttaatattctaaaaggagatatgagcattgtgggacctcgtcctgctttgcccagagaggttgagcaatattctgcttatcaagcccagcgattgtttattacacctggtcttacgtgttattggcaaattcagccaaacagaaatgacatttcttttgatgaatgggtcgagatggatatacagtatatccgtgaacgcagttttcttgtggattggaaaatcatatttaaaacaattatcgcagttcttactaaacaaggaagatgatttgggaggtacatatgaaaggcataattttagcagacgggtcgggtacccgactttatccgccatgtggcaggtaagccgacaaagtgatattactgattttgaagaagttgtaaaaccggattgaatgatatatacagttttaacaagattcatgcactgacagtgttcgattcaacaatccaacacttagaaaaaacatcattgcagggtatacagggttcgactgtataaaacagcacttcggttattgagaaatagatgcgagtgtacttaactgatattttatggagtagaaaacaagggcaatatgattgtcgggttaattggatacgacagcataagaaaacacttagctgcgtgcggttattacacagctgaaattagagagaaatactatctgcgaatagctgatgcgtacatagatataaaggagcagaggggacaatattggttggagaacattatgaaagatagatttgcagtgtctatgttcggacaaaaacgactgtcctgtgagggtgggatagagattgttgtaaaagaattatgcaccagaatggcaagagatggatgtcaggttacctgctacaacagatccggtcatcacgtgagtggtgcagagtatgacaataaaattgaatatgatggaatccgacagaaatttgttccaaccattgaaagaaaaggtcttgcagcggttagctcctctttttttgcggctctgtacagtgcttttggaaaatatgatgtggttcatattcatgcagaaggtccggcttttttttcatggcttccaaagatgtttaggaagagggttgtggttaccattcatggtatagactggcaacgggaaaaatggaagtcaggatttggttctaaattcatccggcagggtgaaaagaatgcagtaaagtatgcagatgaaatcatcgttctgagtaaaggtgttcaggattacttcaaagatacctatggtagggagacacatttcattccgaatggtgtgaacagaccggaaacccgagaagccggtttaataacagaaaaatttggactgacgaaagattcctacatattatttcttggtcgactggtaccggaaaaaggtatcaggtatttggttaaagcgttcaagaatgtcaaaacagataaaaaattggttattgccggtggctctagcgatacggattcttttatgatggaactgaaagagctggcaaaggatgatgatagaatcatttttatcggatttgttcaggggcagttgcttgatgaattatatagcaatgcgtatatctacacattaccttctgatctggagggaatgacgttgagtttgctggaagctatgagttatggcaattgctgtttggtttctgatatttcagagtgcactgaggtcgtggaaaataaggcgttgattttcaaaaaatcggatgtggacgaacttagagaaaagttacaagatgcttgtgatcatccagaaaaagttatggagatgaaggcacaggcaactgactttatctgcaaaaaatataactgggatgaagtagtaaaggaaacgatgaaactgtacatgagaaaataaaaaacattatattcaatagaagtacggcctgtacccggacaacgcacaactgttatgttgataggtagttcaaaataaaaacatagaaaagaggaaacagttatgaagggtattattctagcaggaggatcaggcactcgtctgtatccattaacgaaagttacgagcaagcagctcctacccatttttgataaaccgatgatttattatccgatgtccgttctgatgaacgctggcatccgtgacattttgattatttccacgccgcaggatactcctcgctttgagaacctgctgggtgatggacaccagtttggtgtgaacctgacctatgctgttcagccttctccggatggactggcacaggcctttatcattggtgctgactttattggcgatgattctgtggcaatggtgttgggcgacaacatctttgccggccacggtttgaaaaaaagattgaccgccgcagtagaaaacgctgagagtggcaagggtgcaacagtatttggctactatgtggatgatccggagcgtttcggtattgttgagtttgacaagaacggtaaggctgtttctatcgaagaaaagccagagcacccgaagagcaattactgcgtcactggcctgtacttctatgataaccgtgtggtcgagtttgccaagaacctgaaaccttctgcgcgtggtgagttggaaatcactgacctgaaccgcatctatctggaagacggttccttaaatgtagaactgctgggtcagggctttacatggttggataccggtacacacgagagccttgttgatgctactaacttcataaagaccgtagaacagcatcagcatcgtaagattgcttgcctggaagaaattgcatacttgaacggctggatcagcaaggatgagttgatggaggtctatgaggttatgaagaagaaccagtatggtcagtatctgaaagatgttatggacggcaagtatcaagaacatttgtattaattagaaaatgagaacaaaatacatagataagtgtagaggagattaaatcatgaatattattgttaccggtggcgctggttttattggtagtaactttgtgtttcacatgctgaagaagtatccggattaccggatcatctgtctggacaagctaacatatgcaggcaacctgtctacactggcacctgtgatggacaattcgaatttccgcttcgtgaaggcagacatctgtgaccgcgaagctgtggataagctgtttgaagaagaacacccagacatcgtggtcaactttgcggcagaatctcatgttgaccgttccatcgaagatccgggtatcttcctccagaccaatattatcggtaccagtgtgctgatggatgcttgccgcaagtacggtatccagcgttatcatcaggtttctaccgatgaagtttacggtgacctgccgctggatcgtcctgatctgttcttcaccgaggaaactccgatccacaccagctctccgtatagcagttccaaagcagccgctgacctgctggttctggcttaccaccgtacctacggcctgcctgtgaccatttctcgttgctctaacaactatggtccgtatcacttcccggagaagctgattccgctgatgattgctaatgctctggctgacaagccgctgcctgtttacggcgagggtctgaacatccgtgactggctgtatgtggaagatcactgcaaggccattgatctgattatccacaagggtcgtgttggtgaagtctacaacgtcggcggtcacaacgagaagcagaatattgaaatcgtgaagattatatgcaaggaactgggcaagccggagagcctgatcactcacgttggcgatcgtaagggccatgatatgcgttatgctattgatccgaccaagatccacaatgagctgggctggttgccggagaccaagtttgaggacggcattaaaaagaccatccagtggtatctcgataatcgtgagtggtgggagaccatcatcagcggtgagtatcagaactactacgagaaaatgtacagcaaccgctaaaagccagaggaggaaagaacatgaagttttttgtaacaggcgttggcggtcagttgggccatgatgtgatgaatgagctgctgaagcgcggtcatgaaggtgttggttctgatattcaggaaaactacagcggtgtagcagatggttctgcggtaacaaaagcaccgtatgtagcactggacattaccgacaaagatgctgttgagaaagttattacagaagtaaatccggatgctgtaattcactgtgcagcatggactgctgtggatatggcagaggatgacgataaagtggcaaaagtccgtgctatcaatgcgggcggcacgcagaatattgcaaatgtatgcaagaaactggattgtaagatgacctatatcagcacggactatgtgtttgatggtcagggcacagagccctggcagccagattgcaaggattataagcctttgaatgtatacggtcagacaaagctggaaggtgagttggcagtcagccagacgctggagaagtatttcattgtccgcattgcttgggtattcggtctgaacggtaagaactttatcaagaccatgctgaatgtcggaaagacacacgacactgttcgcgtggtcaatgatcagatcggcacaccgacctatacatatgatttggctcgactgctcgttgatatgaatgaaactgaaaagtacggctattaccatgcgaccaacgagggcggctacatcagctggtacgatttcacgaaagaaatctaccgtcaggctgggtataggacggaagtgcttccggtaagcacagaggaatacggtctgagcaaggctgcccgtccgttcaacagccgtttggataagagcaagctggtggaagttggatttactccgcttccgacttggcaggacgctctgagccgttacctgaaagaaatcgagcagtaagaggagatagagaagatgggacagattaaagttgagaaaaatgtaggtggcattgagggactttgtgttattgagcctgctgttcacggtgatgcccgtggctatttcatggaaacctacaacgaaaaagatatgaaggaagctggtattgatatccactttgtgcaggacaaccagtctatgtctacaaagggtgtgctgcgtggtctgcattttcagaagcagtatccgcagtgcaagctggtgcgcgccgtgcgtggcactgtgtttgatgttgcggttgacctgagaagcaattcggaaacctatggcaagtggtatggcgtaacgctgtctgctgaaaataagaagcagttccttatccctgaaggctttgctcatggatttctggtattgagtgatgaggcagaattctgctataaggtcaacgacttctggcatccgaatgatgaaggtggtatggcttggaacgacccggaaatcggcattgagtggccgcagttgaaaggtgagtacaaaggcagtgcgagtgcagatggttatcaattagaggacggcactgcgttgaatctgagtgataaggaccagaattggctgggattgaaagatacttttaaattttaagatgttacatagtcatttctaatagagcgactgcatttgaaacaaaaagacagctacgatttgaaaaatgtctttgatagtgaggaaaataatgtctgaatatctgataaaaattataaatcgagttatcgggattcttaaaattctgtgctggaaaattttatatgggagtcgcttccattttggcaaaatgactttcttttatccgggatgtcatttgatgattgaaaagacaggaagcattaatattggagataattgtttttttaatcgtaattgttcaatgacatctctgggcgaaattaatataggaaatgattgtatatttggggaaaatgtcaagatatacgaccataaccataaaaccgattttacaaatggactctttagaaaacaaggttatgttgtaggacgagttgaaattggatctaatgtctggataggaagcgatgtcttaattcttcccaatgttaggattggaaataataccgttattgcggctggtgcaataattacaaagaatattccggacaatgtgacttacatacaaaaaagaaacagtgtggaggtgcaaaatggataaaaatctccggtttagtattgttgtaccaatctataatgttgaaaaatttcttgatcagtgcataacaagtgttctgagccagagctacgataactatgagctaattcttgtggatgatggagcaactgataatagcggtaaaatttgtgacgcttatgctttgaagaatgatcacattcgggttatacataaagcaaatggcggattagttagtgctcgaagagctggtgtaatggctgcaaagggcgagtatgttggctatgtagatggagatgattgggtttcagataattggcttgctgaagttaataaagtgattacggaagctcatccagatgttgtggaatataatgcattcaaaagcatagatggaaaaaatgttgaaatgaaaacctcgcattttagaggattctttggcgagaaagaagttaaagaaaagattgttccatgcatgctttgtgataggaatcaaagattttacacattcggtgttttgccagcagtatggtctaaaatgattaagaccgaaattctaagagatagtctttgttctgaagacaagattacttttggtgaagatgtcgcatgtatatacaatagcatattagaatgcaagtctttttatggaattgatattccactatattattatcggcaaaacagtcagtctatgacaaaagcgtatgatgcgcggcgatttgaaagattaggagttttatttgcttatctgaataaggaactgttacggaataatcaacagttgaaaagtcagtatgatagatatgttttgttctgtattttttatgcgtcccttaatgaagctaagaatactgctagtttcaaagaaatgggcaagaaatttgaagatgggttaaaaaaacttgatttagaaaacttcgtcaataaaacaaccataaagattggtataccgtggaatatgatgctttacctcataaagaagaaaaagtatagaatgctaatggtgttatgcagggtgattgttaaagtcaagtattcatataaagcataaggaaaagattatgaaaaaaatttgttttataacacgccatgcgattgtaaattatggctcttttttgcagacgtatgctacacaaaaactatttgaagactacggatataatgcagaagttttggattatgttcgagaagatgaagaatatcataatgtgacagaactgctgttgaaaaaatctaaaaaatggaactggaatatttttactagacttatatatagaatcgttcaatggccggatcactacatttgtggaagagcatttgaaaaggaaagggcaaaatatctgaatttgagtgagcgcattacaaatccagctgcagatgcaagcaaaataccgatagctgatatctattgtacaggtagtgatcaagtttggggagaaattgctcaggatgatgtagatcccatgtatttcttgagttttgctccgcacgatgcgaaaaaggtagctttctctgcaagttttggaaaagagaattatccgaaagaaagaattgataagttcagaaaattattacatggatatgactgcataactgttcgggaagatagtgcggttaatatagtaaatagagcgggatatgaggcaacacagattcttgatccaacaatgatttttggcggagatagatggaaagaacaattgctgcctatacatgaaaaagggtatgtgttgctttatcaacttaatgccaatcatgaaatggatgaatatgcgaagcaatttgcagataaagcggggctaaaattgcttagagtttctgttgaggcgcataactgtatgcgggtaggaaaatttaagctgtgtttatcaccgtttaaatttttatcatatattgcaaatgcagaatatatgattactgattcttttcatggtactgcttttgcaataatgtttaacaggcagtttgtcgaagtattaccgaaagaaaaaattgcgagaaatttgagtgttttgaaacagttcgggctagaggatagaatattaaatagtcatagtgacttttcttatattgatcaaaagattgactacaagattgtaaatgatattttagaaaagtatcggaggcaatcgaatgaactgttaaagaaaatgcttatatgatggagaaatgtaaggatgattgaagtaaacatagtagggcaattgggaaatcaactttttgagtatgcgtgcgcacgacagttgcaggaaaaatatggtggaaagatttatcttaacacatatgaaatgcgacagaatacgccaaattttcgtttggctttacttgactttaatttaaatgaaaatgtggaggttgtctcagaaagaccgttaaaggaagcaaatgcagataactattcagtcaagattttaaggaaattttttccagacttgtactttaacatgatggcgaaaaaaggtgtttttgtttggaaatctgcacggatttataaacctttgcctttgttaaatgaaaaattgcagaagcgaattgtcctcaatggttactggcaaagcgaaaagtatttttctgacgtggcagagattcttcgaatggaactcactccgaaagaaccacttcaaccacagaatgaagaactatataataaaatcaaaaatacaaattctgtttgcgttactattcggcgcggagattttatgaacgaaaaaaacaaaggtactttttatatatgtgataatacatattttggaaatgctcttgcctatataaaaaaatgtctgccggattgcacattctttggcttctccgatgatatagattgggtgaaaaacaatatggaatttccaggagaagtctattatgagagcggagtggatccggtatgggaaaaattgcgtttaatgtcagcgtgcaaacattttgtactgtccaacagttcgtttagttggtgggctcagtatctatcaaatgaaaagaaaaaaattgtggttgcaccggacatctggtataagacaggaaaacatgctaaagctgatttatatcaagatgattggaaattaatacatatagggtgagagaatggaagctatttttgcgggaattgttttattcaatccggaaattagtagattaaaggaaaacattacacatattttaggtcaagtggatcgattaatattggtggataatggatctaataataaagaagaaattcagagcggaatccaaaattttaacacagacaaaatactatatatagacttacataagaataaaggaattgcagcagcacttaatgtcattgcggaatcaacggaaagttgtggtgtaaagtgggttcttacattggatcaagatactgtatgtaaggatgatataattgacaagtatagaccatatttgtctatgaaaaatgttggacagtttacatgcctctatcaagacagaaattttatagaagatgaatataaaaatgaaggctctgaatttggtaatttaaaggaagtaccttggtgtattacttcagcggcattgcttaatgtggaagcgtggaaaaaagctggaaaatttgatgagagtctttttattgatcaggttgattacgatatgtgccttacgatgagagaaaaagggtattatatatatcaggttggctttgtggggtttgttcatgagatagggcagggacacattataaaagtcggatcttggaaaataaaaacgtggaatcactcaccatttagaagatattatggaacaaggaatgctataatcgttgcaaaaaaacataacgaaatcaatatgatgcgtgctattttaggcgcggtcaaacatattgtcataatatttgtttttgaaaacgataaatggaataaattatcagcaggtgttaaaggattaagagatggattttgtattgcctggaatcgggaaagaggaatgtgactaatgcaaaatagagtacttatattaatgtcgacatataatgcagaaaagtacttagtcgaacagataaaaagtttaagagaacagagaaatgtttgcgtaagtattttatgtagagatgatggctcaactgataatacaattcatattttaaaaagtttgggaatagactattatacaggcggtaatctcggcccagcaagaagctttatggatttagttgaaaaatgttccgagacatatgagtattacgcgttctgtgatcaagatgattattggtatccagataaattgaaaactgcaatcgagtatattgataatgaaaaagaaagcccggtactgtattactcagctgtcaatgttacggatgaaaaacttaaagtgatgtataaatcctttaagacaatgccaaatgcgctttcggaaattgcattatcctgtggtattatgcaaggctgtacacaggtgtttaatagacaactacttttacaattgaagagacataagcctaattcgatagcaatgcatgatttttatattacgcttgtctgtaaatttattgggggaaaatttgtgatggacagtactccgcagatatcctataggcaacatagcgcaaatacattgggcattacagcgaaaaaaagagcttcattttaccaacaatacagctacacaattaaagatgcggagttctataaagatagctctacattatcagacgaggatgaaaaatttgttgatgcgattaatgattatctggctgatggaagttcccgcatagatttaataaatattgtgataaaaacgacattttcactaaaatggaaactaactttagtgaaaaatttgttattaaaaagattttgaaaacttaatagtggacaatgaatatataaaatagaagataacgactttaacagataaatatagcactatatcaaaaaataccagagtcaacttaaagtgatttgagattaaattttgcttccaattgcttcagcgtgatttcagagtaataatcgtttaacagtagtctggttactaaagtgaaaggagcaggatgatgaaaaaaatactattagtctctcatcgaggatatatggatgggggagctatgttggctttttgcgatgtaattacttatttaaaagagcgatatcaggtaaccgttcttattccatgcaagggcgatttttctgaatggctcgaaaaaaataaaatagaatatattattttgaaaagtcatccgtgtgtagttgacaggtctatcagtataaagggtaaagctaaatttatgattaatggtctttctgattatttggaagtactgcgtcacaaaaatagattttcagattatgacctgatttatactaatacgcgtgcaactctgattggatgttatttatcaaaacttctacatgttcctcatgtattgcattgccgagaaatgatatcgataggcaatgactggcttacattaccgtggacagctaaaatgcttaataattataccaataaagttcttgtgatatccaaggccatgttgaataacacaaaagatattgataaagaaaaaatgaagttgatatatgatggtgtatcctataagggagaactagattgtattagcgattttacaaataaatcaaagtttagaattttgatggccggatcagtgacgccagcaaaaaatcaaatggatattatttgcgcagtaggtcaactaaaaaaaagaaatatacaggttgacctaatagtcgcaggtcagatttcgagttcatatcaaaagtattacaataagcttcaaaaccagattaaaaaagacgatatagagggtagtgtaaaatttcttggagttgttaaggatatgaaaagccttagaaagacagtcgattttgaagtaatgtgttcgaaatttgaagcgtttggtagggtaacggtagaagcacttaggagcggaaaactttttataggcgctaatacgggagctacatctgaaattgtagaagatggtataacaggatatgtatatcctgtaggaaattataaaaagcttgcagatattatcgaatattgtattaataacagtgagaagtcaaatcaaatctgcaataatgcatatgaaattttgaataagaagtttaaaaatgagcagatgctcgctggtattgaaaatgtaatcaaacaggaaatataatttgtcaatagttggagaaatgtaatggagactgtatgcagtaataataaatgtaatgggtgtatgtcttgtttggacatatgccccagagaggctatccatattgaaaaatcattaaaatcttataatgcacatattgatatggaaaagtgtatcgcatgtggtttgtgtcataatgtttgccctaacaacgcaagttgtttagcacatccaccacaaatgtggtgtcaaggatggtcaaatgatttagaaataaggaaaaatggatcatctggtggggtggctactgcactaagtttgaattttattagaaacggtgggtatgtatgcagttgtgtttttaatgatggaaaatttggctttgtaattaccgcagatgaaaaggatttggctaatttttcaggatcaaaatatattaagagcgatgctatcggcatttactcaaaggttttcacactattacagagaggagaaaaagttctatttattggattaccgtgtcaggtagctgggatggtgaattatgctaaatttaagaggaatgataaaaacttatatacggttgatttaatatgccatggaacaccatcaccgatgtttcttgacatgttcttaagccaatacggagttttagcaaaaaattgtgataatattggttttagagttaaagattcatttcaaatcaatgataactcaagaacattttcttctgtgggagtatgtgaccgttatatgaccgcatttttgtcggcgttgaattacacagataattgttataggtgtcagtttgctaaaaaagaaagagtatcagatattaccttaggggattcgtggggaagcaattgcgacagcaatgaatggaaaaaaggggtttctcttattttgtgtcaaagcgataaaggagaggaattattgtctcaatcgaatctgcatctttttgatgttgatctggacaatgctattgcgcataatcatcaactttctacgccttctattgcaccaaagtcacgtgcaaaattttttagagacattgaaaaaggcatgaattttaatggagctgtaaaaagggctttgccaaaagaatgtattaaacaggatttcaaagcacttttaataaaattacatatccttcctagagctgctgggggggggcagagtgacttatcaagttattataaggaaagcaaaaaatgagtgaatcatagggaggacttagttttgcatgaaaaattgacaataagaattaaaaaaccgacaataaaaattaaaagtatgcaactatttatttgcgcttttatcttcttactttatgcttttactgtgggattgcaggataaaatatatccgtttgcaacatattctgtaccgctattttttgcaataggaatttattttctgtacaagtatgcgccaaaaaaaggatggaaaatcagcagtatggacatgatggttatactgatgatatgcattatacttttctttaacaatgcaaatatagctcatggttcgatggttgaattagtttatacggtggctatttttttgttttatatatttggacataggtatttagattggaagccttatatgcttggcatacaaaaatacattggaattttttatgcgtgcatgactatctatacagtggttaaccctgcgttttttaataatattgtagttccattgtttaaggattacggatatatggatcaaatgagtcaactttttaagcaaggattcattaccgggtttacaccacattatagtaccaatgctatgtatttagcggtttgcttttcagtcccttttgctagctttattgcagagaagaaaaaaagtaatctgattatatgcttcctgttattaggctcagttttactaacaggcaaacgagctcatgcaatttttattctagcagcagttgtgattacttactatgtattaaattcagacaaaccgttgacacgatggggaaaaatcataattggacttgtgattggagcatgtatacttactgttgcggcagagtttgtaccatcattgcttaatgtcgtttatcggtttattgaaacatatcaaactggaagtcttgagatgggtagagatgtgcagcgggcatatgcacttgaggcatggagcacacatccgatatttggaattgggtgggattcgtttaaatattattttcagtctgttagaggaatttatattaatgtacattgtgtgtatgttcagttgttatgcgaagttggcattgttggaagtctgccattttatttgttttttgtgttttcattaattcactcaattaaaacacttaaaatcgtggcaatagaaaaaatacaagataaagaaattcgattttcacttgtgtatgcggtgtttgttcaggtgttctttctgttatattgcttgactggaaatccattgtatgatgccccgactctctttacatatatattcgggtgcgcaataggggaatattattataaaattattgtatcatataaaatgattgaatctccaatagagaaaataaaatagaggaaattagtgacatgaattgtggaatattaacgttttattttgcacataattacggtgctgttttgcaagcatatgcattgcaaacatatatctcaaaacttggacacgccacttttattgtgaagcgttatccagataaacttaagagagagtattctttgaatccattttgcgattcgaaatcaattagaaattttttgagaaaatgtaaagccattccaaagcgaatgaaacagtatacagccttcgaaaaatttataaataagaatttcaacttctctgaaggtgatttagatgctattgtatgtggtagtgaccaaatttggaatgaaaaaattacgggtgagacatctctatattatggagcaaattatgagagctgcccaattaaaatatcttacgctgcgagttttggttcaaataaactaaccctgtttgaaactaagtgtgtaaaagaataccttacagattttcaagcaatttctctaagagagaaagactgtttaacagatgttgcccgtttaaccggaaaggatgctaaattagttttagatcccgtttttttattagatgttaatttttggactaattttgctagtagagcgaaatataagataaaggaaaagtatattctctattattcgctcaaggaagatcgtgaattgattgcacagacaagaaagttgtctgagcaaaccaattgtactgtattatgcattcatccaacatgtagtaacctacatgttggatggaagcaattacatactgtaggtccatacgaatttgtttcgttgataaaaaatgcggagagcatagctactaattcttttcatgcaattgctttttcaattatttttgaaaagaaaacgctttataaatcgttttcaaaaaccgataacagagttgaatccttgttgaaatctctcaatgcttcacatttaaataagaatggcttgtatgatttttcagctaaggatgagaggaacattgaaaattatttgaacgaatcaaagaagttcttgatgaatgccttgggaaataatacggagaatgtctagatgaataggaagaaatttattcgaaatataggaacgggttttgtaggacaacttattatcataattcttgggctaattgttccaagaatcatgattaccagttatggctccgatacaaacggcctgttaagcactatttctcagatttttgcatatatggctttacttgaagctggaattggtcaagctgctaaaaatgctttatataagcccatttctcaaggagatcgtagggggatatcacatatagcatcgattgcacgaaggtatttccgtaaggttactatttattatggtatatgtgtactagttttgtcgcttgcatgtccaataatcattaaaaccgatgtcgatagttttacagtttttcttgttgttctttttgaaggactagcaggagtcatatcattttattttgttgaaactccatcgacaatattaatggcagatggtagaggctatgttaacagcacaatttctgttgttaataaaactataagctatgccgtaaaaattgtaatggctgcttttggcattaatattgcttttttacagtttgtttattttttgctgacggttattaaggtgtttttttatagatggtacttttataaaaaatatagttggattgatttttctgcggcatctgctaaagagaaactaaaagatagaaatgcgttcattgtaacagaaattgcatggactatattttcttctaccgatatgatagttttgtcggtttttgtaagcacaaaattatccagtgtttattctgtgtatagtttagtatttagtaatcttaatttacttttgaacagcgtttactccagtgtttcatatgttttaggatgtacatttcatgaggatgagaaaaaatatgttacttatcatgacgcattcacaacgattttcatgggtggaatgacgattttgatgtgtattacatatattttaattcttccatttatacgtctttataccaacggtgtgacggatgttgagtatatatatactattcttcctgttatgttttgcttagtacagattttgtcctggagtagatatgtatctggcaatttaacaggattagcaggatacgcaaaaactgtaagttacatctcaattgccgaggcaatagtgaatctttttctctcagttttatttgttcaaaagtgggggattattggcgtattgtttgcaacggtagttgctttgcctattaaggtgatatactgcacatacgtatgtgataaaaagatacttcgcagatctgtgtggaggtctatgaggatatttatacctaattatcttctttttgctattactattgtagtaaatcatgcaatcaatctaaatattaacaattatttaagttttgcagtaaatggttgtatcgtgtcaattgtttgttttgcagtaggtggaatagcgaattatatcgctaatccagaatgtataaagattgtgaaaaaaattattaaaaaaagataagccatctttatacttcggattttgaaattgaaaattacttacaaatggataaaacaacaatgtgtgataaagttgactaaatgtaaggaagggataaaatcttgagagcagagcagataatattgacattttgaaagcattatgcgctttcttaattgtctgtattcatgttccgtttccaggaaaagttggtgcatattttacgacactgaccagagtagcagttcctgttttctttatgattacagggtacttttattcggataccgttgcacggcataaggaaaagcatcaaatcaagaagatactctacttgcttgtagaagcaaatgcgcttttcttcatctggaatattgcacttaatgtcctcagaagggagaacatagtagcctatattcggtcgatttttacgggaatgaatctgctaaagttttttcttcttaatgaatctccgttggcaggacacctctggtatttaggagcaatcttttatgtgctggtgattgttttgctgatggacaagttcaactgtcgaaaggttctgtactatttaactccagctctgctaattgcagatttggtacttggaaagtattcgctgcttatttttcatcgggagttcccgtacatactggttagaaattttctttgtgtaggaataccgtatttttgtattggaacccttatcagagaaaaacgatgctctgaaacatggaataaaaaagtgcttcagatattgattgttgtttttgcgataactagtcttgcagaaagatttgctttggtgaatgctgaaatgaacgctacgagagatcattatctcagtacgactttcttggcaatctgtctatttgcctatacgctcaagagtaattggcataataaggaattggctgtgattggaagaaaatattccacatggctttatattattcatccgatttttattacggctttcccaatggtagcgggtaaacttggcataaaatcgatttacagatgtgttgcaccgattgtggtttattatgcaacacttgtattccttatcattctacagaaggttaagatggcaatgaaaagcaaataatacacaggaggaacagcttatggtggatttgatagatacaatagtatatgcaggaaggttaaaagacaaatctgccttgatgagcagttcttctggtggtgcatttacggcactttctgacttcttcctgaaaaatggcaatgctgtggtggcagcaatctataattacgagaatcatactgcagagttcaaaatgattttggacgaagaacagcgtgaaagagcaaaaggttcaaaatatatgcagagcaagcctggtgatatttacaggaaagcgtatcactggctgatggaaaatccggagaaagagttgctctttgttggcatgggatgccagtctgatggatttcggaagttcagcgaaataaaaggaatccgtgaccgggtgtacatcgtagatattatctgtcatggatctccaagtccaaagttgtggagagaatatgctgagtctattcagaagaaagatggaaagataacttatctcaccttcaaagacaagcgcaatggttggaaatccccaacggcttatgtgaaagtcaatggagcagagaagccaattaaagattatgttaaggtgttttataattggtgtgcgttgcggccatcttgctatgaatgtccttatgctaccacagaaagaaaaacagatatgaccattggcgatttctggcatattgaggagacgattccagacttctatgatcctaacggcaactcgttattcttgattcacacaaatcgaggagaagagctgtttgaaaagattcaaggtgacttggattgtagattgagtaatacaacacaatgctggcaggcgaaccttgaagcaccgaccaagaagtctgagcgaagagaagaattctggaatgattatcaaaggaaaggaattgatttcgttatgaaaaaatatggaacagttccaatgaaaacaaaaataaagaataaactcctcagaattatcgtgggggtacgaactaagtaaccttgattatgctgatcactccgaaaggagggtagcataatgaattggaagcagcctaaagtatatgcagtgaaacataaagatgaatcgacaagagcggcttccagatcgggtggtatttttacagccctgtctggtcaagtattgtccaacggcggtgtaatctatggatatcctgacggatgattccaatgccgtacatattcgcgctgatagtacggaagaacgcaatcggatgagaggctctaaatatattcagagtaggttgggcaatacattcaaaaatgtgaaggtagatcttgacgcacagagaagtgtgcttttctctggaacgtcctgtcaggtggcaggattggaaaaataccttggaaaagaatatgataaccttttctgtgtagatattgtttgtcacggagtaccgagcaaaaaagtgtgggacgcatatctacactggcaagagcagaaaaatcattctaaaatttcaagtgtggatttccgtaataaaaaagattttggatggcatgaccatgtagaaacactttattttgaaaatggaaagtctacgagcagccgggtcttcaaagagcttttttatggacatacagtgttgcgaccgagttgctatgaatgtccttataagtctgtgatgcatccgggcgatattacaattgcagattattggggtattgaaaaagtagctccagagtttgatgacaacaagggcgtttcgctggtgctggtaaataatgaagctggtaaaaaagcctttgaaatagtaaaagtaaaagaagggctgatttggaagcagacaaagctggaagatagtatgcagccacctcttaaagacccatttccgaaaccagataatagagagcagttctggagtgattttgagaataagtcgtttgagtatgttgcaaagaaatatggtggcatcgggttaaagaatgatgctaaatcatttttgagaaagattaagagaaaaatcaaaaagttggtgagtaaaggtggaaagagaaattccagtactatataaaagaaaagaagaatgctgtggatgtacagcctgttatgctatttgtccgaaagaagctatttctatggtcgaggacgaagaaggctttgaatatccaaagataaatgaaaacaaatgcgtgcggtgctaccagtgcattaaggtatgtccgataaaagcagcacgagcacagtaaggagaaattaatagggaacgagaactccatgtgctactattatcgcatggcttatgaggttgttgtgcgcattgctctgtggatggttggtaagaaaagatgagttaatagaaaaaggtgattggtaatcaagtggtacataaaatcaataattcaagatttcggacaacccgtgtcatacttgattccagccatcttcttcagtggatgcattgtatttgctgttagctggttatgtggaaagaagagtacaataaaacatagaattccatttgcctttttcttagcgtacattctcgttatttttcgcgtagctttcttatgcagggaacctgggagtagaaaggctattagcttggtcttgtttgaaacatggggacatacctttcatatgcacgctatgtttgttgaaaacattattatgtttattccgcttggtgtactgctaccgatattgttcagaaaatttagaagtggatgggcatgtgtgctgactggatttatttgctcttgtagcattgagatattgcagcatattactcaaacaggatatttacaattggatgatgtggtgacaaatacaatgggtacgctgttgggatggtttatatggtgtgcatggaaagtgaacagaaaaatatgaacacgatgatactcaattaccgatgcattaaggtatgtccgataaaagctacacgagcataggaaggagagattatgaacacaacattacttatcatggcggccggaataggcagccgatttggaacaggaattaaacagttggagccggtcgatgatgctaaccatatcatcatggattactcgattcatgatgcgattgaggctggtttcaatcatgtggtatttattatccgtaaggatattgagaaggagttcaaagatgtcatcggagatcgcattgcctcaatctccaagtcccacaatgtaactgtggactacgctttccaggatatcagcgatattccgggagaacttccggaaggccgtacaaagccgtggggaaccggacaggctgtgcttgctgctaaaaatgtgattgataccccgtttatcgttatcaacgcagatgattactatggcaaagaaggtttcaaggctgtccatgagtatctggtgaatggcggcaagtcctgcatggctggtttcgttctgaagaacacgctgtctgataatggcggtgtgacccgtggcatctgcaagatggatgatcagaacaatttgactgaggttgtggaaaccaagaacatcgtaaaaactgcagatggagcagaggcagacggtgtggttgttgatgtgaattctctggtttccatgaatatgtggggcttgactcctgattttctggatgtgctggaaaatggtttcaagaagttttttgagaaagaagtaccgagcaatcctcagaaagccgagtatctgatcccaatcttcatcggtgagctgctggagcagggcaagatgtccgtaaaggttctgaagaccaacgacacttggtacggcatgacctaccatgaagatgtcgcagcagtaaaggacagcttccggaagatgctggagaacggtgtatacaaggctgacttatttagtgatctgtaaa

SEQ ID NO: 602 - DNA, 13277 bp, unidentified
  source 1..13277: mol_type = unassigned DNA
ttacttcttatcgttttcgcgaatctccacccggcggatcttaccgctgattgtcttaggaagctcttctacaaactcgatcacacgcggatatttataaggagcagtcactttcttcacgtggttctgcaattccttaatcagttcttctccggcacgtgctttatagtctttggatagaacaatcgtagcttttactacctgaccgcgaatctcgtcgggtactccggtaatggcacattccacaacagccggatgagtcatcaacgcactttccacttcgaatgggccgatgcggtaaccggaactcttgataacgtcgtctgcacgaccgacaaaccacaggtatccgtcttcatctttccaggcaacatcgccggtgtaataaataccatcgtgccaagcttcatgagtacgttccgcatcccggtagtattctttgaaaagtccgagaggtttacctttgctggtgcggattacaatttgtccttgttcacccgcttcaacagagcgaccttcatggttgatcaagtctacatcatattgaggattcggcagccccatgcttcccggtttcggttccatccaaggcatggtggcgatggtgagggttgtttctgtttgtccgaaaccttccatcagtttgatacccgtcagcttcttgaaagtttcaaatacggcagggttcaatgcctctccggcaatggtgcaatatttaagtgaagacaagtcgtactttgtcaggtcttcgtgaatcaagaaccggaagatggtaggaggtgcacagagagaggtgacatgatattcctggattttttccagaatagctgccggggtaaacttctcgtggtcgtagacgaagatattggctccggcaatccactgtccgtagagttttccccatactgcttttccccagccggtatcggcaatggtgaggtgaaggctattttcatccaagttgtgccaaaaactaccggtaacgatatgacctaacggataagtaaagtcatgtgccaccatcttaggttcgccggtagtgccggaagtaaaatacatcagagagatgtcatcattagtattcgcatggcgcggacgtacaaacggagcagcattttcgataccctgatggaaatcttcgaagccttccgggatttccggaccgacactgactaacttttcaaccgtgggacattcgggaagagcctctttgatatgttgcaggatgattccttcgccggcagctacgatcattttgatgtcggcagcattgcagcgatagataatatccttcttggtcagcaagtgagtagccggaatgacagttgctcctagtttgtgaagagcgatggtgctataccagaactcataacggcgtttcagaatcagcatcaccatgtcgccacggccgatacccaggctctggaagtaagaagcggtcatgtccgtagatcgtttcatgtcggcaaatgagaattggcgactttcgcctttgtcatttgtccaaagtaaagcgttcttgtcaggttgttcggctgcccaggcatctactacgtcataaccgaagttgaagttctccgggacgtttattttcaaattcttgttgaagtcctcttgtgagctgaaagaggtctgtgataaaaatctttctaccatgatgttgttacataattactgccagaaaacgtaccgttttgccatcgagcgctttcatgccatgtggaagtttagagttaaaataaatactgtctccttgattgaggatgatttctttgccttcgatgttgataagcatacgtccttcgatgacaaggttgaattcctgtccattatgtttgttataatggatcggctcgtcgattgctttcggttcaacggtaacgatgaacggatcggcggtacggttcatgaatcctgaagccagtgactggtatttataagctttggtacgttcaatgctgatacctttgccggcacgagtcacaaagtagctgctcattttaggttcttcgccaaacatcagagcgtcgagggctacattatacgtacgggctattttttgtaacatgctgacagagatgtcgtaatctcctgtttccgcaagccggtattcttcagcagaaatgtcactatcgcgggcgatatcctctgcggtcagttccaatacatcacgtaatccgcggaggcgttctgctatctgtttaatttgttcattcatacaaatggttagtattttatgattaataattctatggtgttatttggaagctttcatggctttgataatagcagaggtgaagccgttgtgttctaattcattgatacccttgatggtgattccgcccggagtggttactttgtcgatttctacgctggggtgggtgtcgttgttctgaatcagtgcggccgctccttttaaggattgggctatcatctgcatggcatctttagggcggagtcccatttcgattccggcttgcatggctgcctgaatgtatttcagtacgtaagcgataccgcaggatgccaatgcggtggctgccgctattttatcttcggggataagcatcactgttcccatctcgctaaataaccggaggatgaagttgtcttgttcatcattcgtgttgcgcgcggcaacaagcgtcatgctttccagttcgctgatagcggtgttcggaatcagacggaacatgggcatttccggtgctacgacataatgagccagttcttcaaaactgatgccggcagctacggagatgagtatctgtttgctttttaatttcaactcgcgcatcaccgattccataaaccacggtttgacggcaaggatgacaatgtctgctcctgtggctgcttccagattattgttggtggtggagatacccggaaattcttttttcagtttctctagttttccggcactgggattggatacaatgatatccgaatcgtctatcagacttccttttgccaggccacgggctattgaaccgcccatgtttcctgcaccgataatggctattttcatatacgcttgtttttaatgagttgttacagacaaaggtaacagttaattacgaaaaaacaaaaagcagccagaataagaaataaatttctaataaaggctgcttttatcgttggctgtttattaatcaaatgagcggttagagtacttttttgaaccgggcgaggaactctttcgcttcctccatgctgagacagagaggaggtaacaggcgaagtacattcgtgccgcttgctccggtaaatacatgctcgtcatagatgagacggctgcgtagttccttgatcggttcttcaaattcgaggccgatcattagtccgcgtccgcgcacttctttgatttgcgggaattttttcagctcttccagtaagtaatcacctactgccttagcattttctaccagattttcctgttcaatgacatccatcacagcgagagctgccgaacatgccaggtgatttcctccaaaagtagttcccaactggccatataccggtttaaacatcgggctgattaagacacctgccattggaaagccgttaccgattcctttggctacagtgatgatatccggcttaatgtcattatattgatgagcgaagaatttaccgctacgcccgtatccgctctgaatttcatcgagaatcaggatcgttcctgtttcgctgcaagctttgcggagttcctgcataaattcggtggttggtatcttgataccgcctacaccttgtattccttcaatgataacagcgcatgtgtctcctttagacaattcctgtttcatcgcttccacatcgttgagtgggagataggtgacatgaccgttattgttgataggagcgataatagaaggattgtgagtcgcttctactgcaagagacgtccgtccgtggaatgctttattgaaagatacaatcttagtacgtccgttgtggaaagaagcaagtttcagagcattctcgtttgcttcggcaccactgttaatcagaaacaggctgtagtcttcgtaaccggaaatctttcctagtcgttcggctacctcttgttggagcttattgataacggagtttgagtagaaaccaagtttagccacctgattactgatcatcgctacatagtggggatgtgcatgtccgatggagataacggcatggcctccgtagaggtccagatattccgttccgtttttatcccatactttacagccatcacctttgacaatgttgatattgtataaaggatatacgtcgaataaattcataattcttctgtttttaaaaagctgaaggcttcaaacgtagtcctacggtttcttccagattgaacatcaggttcatattatgaacggcttgtccactggcgcctttcagcaaattgtcgatacaagagataatcaatagcttatcaccatgtttttccagatgtatcaggcacttattagtattaacgacttgtttcaagtcaatattcttgtctacgatgtgtacaaaggagtcttttgcataatattcctcatacatacgaacgatttcttccagcgctactttggtcttgactaccagcgtcgcgaagataccacgagcgaaatctccacggtacggaataaagtcgatgtccgaatcgaagctgttttgcaactgtttcagcgattgcttgatttccggaacgtgttggtggtcgaatgctttgtacacactcatattgttgtttctccaactgaaatgactggtagcacccggtttcaccccggctcccgtacttcctgtaatggcatttaccattacatcatccgtcagcatcagattcttggcaagcggaagcaaaccaagctggatgcaggttgcaaaacagccggggttggctacgtgcttcgccgtacaagtggcacgacggttcagttccggcagaccgtagataaagtcgtggtcgtcacttttgatacggtagtccatggagaggtcgataatcttcaggttttccggtatgttgtgactttccatgaatttctttgtatctccgtgggcggtacagaagaaaagaacgtcgatttcgtccagaggtaactggtcggtgaacgttaaatccgtttctccatacaagccttcgtgtacgtcggtaattctgtttccggcattactgctgctgttgataaatacgatttcagtttccggatggttgagcagcagacggattaattcgcctgctgtatatcctgcgccaccaatgattcctgctttaatcatatctcttcgtctttgtggttattatagtaaacacgtagcggagtagaagtcactttgataaagccttttgcgtcttcggctgtccagcctttctgcatttcaccgtattctccgaatttagtcttcaccagatcatcttccgattctacacctacggtagagaaggaaagagggcgaagctcgaggatagctgtaccgtttacgttgcgctggctttcctgcaacatggcttcgatgtcacgcatcaccggctccaggtattgactttcgtggaggaacataccgtaccagttagctacttgatccttccaatattgttgccatttgcttaatgtatatttctcaaggaaacggtgagcgccgataatcaacatcggggcggctgcttcgaatcctacacggcctttgataccgataattgtatcgcctacgtgcatatcacggccgataccgtatgctgcgccaatctcttccactttctggatggctttgatcgggtcgtcaaacttctcgtcgttgacagctttcagttcccctttttcgaaagtcaggcggagctgttcgctaccttctttttcaacgtgcttgaggtaagctgtttccgggagtccttgcgcggagtcgaggatttcgccaccacagatagaagtaccccataagcctacgttataagagtatttcagtttggtgaagtctgcactgaaaccatgcttgttcagatagtcgatttcttcctgacggctcaatgccatatcacgggttaatgtgatgatttccacattgggagccagtacgaggaaagtcatatcgaaacgaatctggtcgttacctgcgccggtagaaccatgtgcaatggcgtctgcaccaatttcgttagcatagcgtgcgatagccaatgcctggaaaatacgttcggaactaaccgaaataggataagtaccattacgcagcacatttccgaaaaccatgtatttcaggctcttttcgtagtattcctgggtaacgtctattgttacatatttcgtagctcccagtttataagcattttcttcgtttgttttcagttgttcttcactgaaaccacccgtattggcacaagctgcatatacttcgtaacctttttctttggcgaggtacatgacggtgaacgatgtgtccagtccgccgctgaatgccaccactacttttttcttcttttcttccatagtgctgtatcttttaaatgttatttctttcttgttcttttttgatgttccgcggctctgtcggatcgtatagcatggctgtacagatgcagaacttgcggtttttcgctaccaggatatcatggttgatacatccttcgcatcctttccagaaagcttcgtcgtctgtcagttcgttgaaggtgacaggcacataacccagttcggtattcatcttcatgacggctgcaccagaggtcagactgaatattttagctttcggccatcggagacgtgccagttggaaagaagcttgtttgatacgtttggccagtcctaatccacggaaatcgggatgaacgatcagaccggaagtagccacgtattgtttgtttccccatgattctatataggtgaatccggcgaaagtgtcaccacaaagagcaataatcgccttaccttctttcatctttgtcgctacgtattcgtgtgtgcgttccgcaattcctgttcctcgtacggcggcagcatttctgatagtttccaaaatagtgtcaacgtaaacctcatgtgaggcgtcggctaccataacatctatttgttgagtgtccatttctttattatataataataggtataattattcgatattgggaatgatgagtgacaaaagctgacgtattttactggttgcaactccttcacgcaacaccaacatgatcgtatcgtcaccggcaatggttcccagaatttcactgaattcattgttgtcgatgtcataagccatgctgctggcataaccgggacgggtgcggataacggcgatgttaccggaaaactgcaaagagataaatccgttgttgcgtaacatttcaccggcactctggtcggtagaacgtttatacataatgttgttcggcagtacatatacgtactttccattcatactggcagccttggctactttcaattgtttcaagtcgcgggaaagggtggcctgtgtcagttcgaagccttcgcggttcagctcttgcagcagttcttcctgcgaaccgacctccttgcttgagataatcattttgatggcgtctaaccgatttgctttcttcttcattgtataattattctaagaatggcgcaaaagtatgcattattttggagaaaagatgcataaaaccaaagtttttttgcataaaagtgaaaatactttagaaagggatagtgatataatcaggatatatgtgggtatatgtaacaaagttgtttctttattgcttcattttgtgctgactttttttattgtctattaaaaaagatgcaattgtttgtttagggatttttaaatatataaatttgtaaagtgaataaggagacaaatcgtatgatagatgaagatattgagctttattctctttttagaaaaggagatagaaaggcttttgatactttatttttgaagtattattccatactatgtgccttcgggaagtactatattcctatagaagatgctgaagaagttgttttggatatcatgacatggctatgggaaaacagagaattccagatcatagaaacttctttgcgaagttatttgtttatggcggtcagaaacagatgcttggatttaataagtaagaatcagacaaaaagacgttgttatgagcatatgtttgctaaagaaatgcagacaagttttgaagatcctgatttttatgtagtggaggaattgatggcgaaaatagaaaaggccgtgatgcgattgccggactcctatcgtataacttttgagatgagccgttatcaagataaaacatataaagagattgcgaaagaattaaacgtttccataaaattagtggagtatcgtatccagcaagcattgagacttttacgtgtagaactaaaagactatttaccgttgattacaatcatattcccttattttctctaaggatagccgattcgtttttgagtcttaaaataaaaatgcagcttttaattaaaaaagttgcatttttgtttaggggctaattgaagtattccgtcttcttaataaaatgaacataaaagatgatggaattacatgaaaatatagatgaggctcttttactcctttatttttccggtacactaggagagaaagaaaaagaagaggtagaaaattggatttccctctctgaagagaacagaaaaatagctaaacagatttgttacatacaccacgtaacagatataatagataccgtgaagcagatagatcctaaacaggcattggtgaagctggataagagattgtcaaaaaggaagaaaataaactggtgggaatgggggataagagcagcagctgtgttatttattcctttattcttatctttcttctattttgtatttaatcaagataaaaattatgatcgttatgtcgaaattcggtctaatccggggatgatgacaaaagtggagttaccggatggtacttgggtatggctgaattctgcttcttatctaaaatatccagtgtcttttgaaggagaatatcgaaaggttgaattgctcggagaagcttatttttcagtacaaaaggataatggacggaaattcttagtcgatgtaggaaaggggattgaattagaggttttaggtactgaatttaacgtggatgcttatccggatgataagtttgtagctgctactttggtgacaggtagagtaaaattccattgtcagcagaaaggcagggaggttacttatagtatgcaacccggacagaaggtgatttataatttattggatgagaaacttttgtgtacaactacttttgttgaatctgatattgcttggaaaagtggaaggatcatttatcgagatactcctcttgaagatgctttaagaactttgagcaagcgttttgacgtagagttccgtattgttaatccattattaaagaaatattgctttacaggtacttttattaatcaacgtctggataagatcttggaacacttcaaaatagcttcaggggtgagatacagatatcttgaatcggcattggacaacggtgttgtgaaagagaaaacaataatagaaatttattaaacaaaaaagaactatgaaaacactccctccttaaacaaaaaatatgggaaaaatatagcactattcttcccatataaaaaatcatttagccttacttgtttgccgacaagtgtagttaactttatttttaatttaaatcacaacaaatttatgcaaaaacattgtagtatccaaattcttgggattaaaaggctactgaaagcaactttaaaaggaattccattgcctatgagattattaattattatgctatgtgtttcgataggatgcattcgtgcgacaaatacttatgcgcaaaatgcgatccttgacttgaaagtcaataatcaaacgattgaaaccgtcttgaaaataatagaatcgcggactgactttgtattcttctttaacagtcagcaggttaatgtacataaacgtgtctctattaatgtcaataaacagaatatttttaaaattctagatgaggtttttaagggaagtgacgttgtttattcagtgcttgataaaagcataattttgtctagtaaaagatttgcgcctgatggaaatttgaagaagattacaggtaaggtcgttgatacgaacggtgaaccgttgattggtgttacaattgctctgaaaggaagcaatagaggaacggtgagtgatgtaaacggaaatttttctttaaacggagaagaaggaaagcttaatgtgttgaatatctcatatattggttataaagaccaacaggtaaaagttgaggatggtaaaactttgattattacattggaagaggataccaaggttttggaagaagtagttgttgtgggatatggtacacagaaaaaaatcaatttgacgggtgctgttgctgtggttgacgataaacaagtaatcggacgttcggccgataatttgtctaaactacttcaaggagctgttcctaatatgaatgttactgtttctaacggtcgtccgggacagggtggtagcataaatattcgtggtatcaattctatcagtagtagtgccacgcctttgatattagttgatggtgtagaaggtactatcgatgcagtgaatcccaatgatgtggagtctattagtgtattgaaagatgcttcttctgctgctgtatatggggctcgtgcagcttatggagtaattttggttacaacaaaatctggtaatgatgataaaacacgtgtttcttataacggacgttatagctttggctcacctacagtttccagagattttgagactcgcggttattattcggcggctatcaatgatatgttttattctacctatcaaggttctaactatacgaattataatgatgaagattattatgaaatgtggatccggcgtaatgataaaacggaaaatccggaacgaccgtgggtggttatcaaagatggtgaatataaatattatggtaactttgattggtataactacttcatggatgagtctcgtcctacatgggaacacaatattagtgtcagtggtggcaataagaaagtgcactatttcctttccggtgcttattatgatcagaaaggagttattcggaaaaatatggatagtttcactaaatacaatttccgttccaaggtaagtattgagattgctccatggttgaagataagtaataatacgtcatacaaaaaggattcttatccatttccggggccaggtgctattaacaatctttttgatgcgataagtaagcatgccttagcttctattgttccaatcaatccggatggtacatatatggggaatgcaacagttattacaggaggatatcgccctgctaatgatcttagtgcaattcttgaatacggtaaacacaagaatgaggatactaattacttttttaataccacctttgaggcggtaatgacacctgttaagaatgtaacggtgacggctaattattcgtttgctcaacatgaatatacggcaatgaatcgtagtgctaattatccatattcacgtgtacccggagaagttctttggaaaacagatggttatggccttaatactctttatgaacgttctaatcatgattggtttcattcatacaatatttatggaaattatacaaatacatttgccgatgtgcaccatgtaagtgcaactgccggtgtcaattatgaaactaaattttttaaagacatcaaaatacaacgtaatgatttattgtccgaagatttaactgattttaatttagctaatggtgatgaaatgagtattgcgggtggtaaaaatagatatgctcttttcggtcttttttatcgtttgaattatgactataaaaatagatatttatttgaatttagcggacgctatgatggtagttcacggtttgcccggggacatcgctatggcttttttccttcagtttctgccgggtggagaattaatgaagaaaagttctttgcaccattacgtaaacaaattagtaatttgaaattacgcttttctttgggagcattaggaaaccaacaagtcggatattatgactatttgcagactatatcttctggtggtacaatttcttatgcttttggtgataaaaataaagcgtcaggtgctagtatctctgctccgaatgcttctgatttcacttgggaaacggttgttacaaaaaatatcggtttggatctcggactattgaataatcgtttgaatatgacggctgatatatatgtacgtgatacgaaagatatgttgatggcttccaaggatcttccgaatgtatatggtgcttcttctccaaaaacaaatgctgctaacttacgtacgaaaggttgggaagcatcgattagttggaatgattcttttaatctaaagggaaaagcgttccattattctgtcgtactaggcttggctgataatacgactaaagtgacaaagtataacaatgataacaaaacattgggcactccatatgaaggacaacaactgggagagatttggggatatgttgttgatggtctcttcaaaactgatgaagaagctgaaaactatccggtaaatcagagttacgtaaataatatattgaatatttctgtaaaatctcaaggtctccatgcgggggatgtgaaatatgtggacttggatggcgataatattatttctcctactttatcggcaaacgatgtgaaggatcagaaagtgattggaaattctttaccaagatatacatattctgtcagattagctgcagattggaatggaattgatttttctgctttgttgcaaggcgtcggtcgccaacattggtatcccaatggtgaaactagtctgttctggggtccctatgcccgtccttattgtacttttattccgaaggatttcttgacagatgtttggtcagaagataatccggatgcttatttcccacgtccgagaggctatgtggcattggatgttaatccacgtgagttgtctaaacctaatactcgctatttgcaaaatgtggcttattgccgtcttaaaaatgtaacagtcggttactctttgccacgtacttggctaaaggctttgcatatggaacgtgtcagggtttattttagtggagagaatctttttacattcagccctttacatagtaattatattgatccggaacatgctggggcttctacgagctggaaaagtggtcatacgaacgtgacttcttatccaatgagtaagacctattcatttggaattgatgtgactttttaa

SEQ ID NO: 603 - DNA, 21364 bp, unidentified
  source 1..21364: mol_type = unassigned DNA
cattaaacgaacgtttattgaaacgtttctatcttctaaacgcttcgttttcaatactaagtaaattctaaaaagttgacggtttgaaagagagagaatgtctcgttcaagccgcgaagcgtatccggaactaaggaatttttcttccaatcatttccattaaatgtctgaacaacagcaacattggtttgccgctcgtactcgcgacaaacaagaatttgtcactcgggattctttagaaaaattgagaataaatattaatttggaatattatcttcctactcaatttgtcattcgtcaattaaaataccgtcgtaagcgtgttgaagttcctgtcataagaaacttgatatttgttcgtgccactaaacaggatgcctgtgatttatcaaataagtatggtgttcaactttattatataaaggatttttcgacccgttccatgcttattgttcccgataaacagatggaggactttaaacaaattatggatcttaatcccgataatatcagttttgataatgaagtccttactgtcggcagtaaagttcgtgtgatgaaaggcaacttgtgtggagttgaaggtgagttggctttagaggctaataaaacctatgtcatcattcgtattgaaggtgtattgacagccagcgtaaaagtggcgaaaagttatttgaaagtaatcagttaattttatgaataaaacagaagaattgcagcagcttgctcaaaaatcactctatttgggtttggatggagacccaatttatgcagagcattttagtcgtttgaataaagaaattcagattctttccgatgctctttattctgctaagggtgatactcccgaagaagaagccggtatttgcctggctttgttaatgggttacagcgctactatctatagtgataaagataaggaagcgaaaaaacagtctattctcgatcgtgcctgggaggtattagagcaacttcctccttctttattaaaatgtcagttgctgacgtattgttatggtgaagtttttgaggatgagttagcacaagaagctcatgcaatcattgacagttggcaggggcgagagctgacggccaaagagcaagagattgttgagaatcttcggaatttggaggaaaatcaatatccatatagtgattttgaataatggttctgccttatttttttacaaatataaattgaggatttcataacttatattccctttgttatataatatgactttttgatttatttctcgtagaggataatcctttttctcgtagagaatcggggtgtttctcgtagagttttttatcgttcctcgtagagaaaaaagcgctaagtgtaattgtttgataactaacgttttatataaagttataaatgtatctatatttctcgatatagaaatagcactttttttaagaaatcattgtttggtatttcttaattcgttacaaattgacttttacctatatgataactgacctgtataaaagtttatggtatatctatatattataggtcaaccccacaagatacttacttaaaatagatactcaaatgaaagcttgttttatgggcttaggctacattggccttcctactgctattatagcagctaaacacggtattcaagttaccggtgttgatattaatccgaaagttgttgagatgaccaatcaggggcaattacatatcattgaaccgggtatgcaggaacttcttcaggaagttgtttctaccaagcagttaaaagcttctactactcctgaaatcagtgacgcctattttatggtagtacccactccctttaagggtaatcacgaaccggatatttcgtatgtggaatccgcaacccgtgcagtaatacctttgttgaaggaaggtgacttatatgttatcgaatctacttcaccggtaggcacaacagataaaatggttcatttaatatttagccttcgtccagaattggaaggcaaaatatttatagcgtactgtccggaacgtgtattaccgggaaatgtaatacatgagttggtacacaacgatcgtgtgattggtggtatggatgaagcatctacagataaagcaattgagttttacagccaatttgtacaaggtacgctacatcgaactaattgtaaaacagccgagatgtgtaaactgacagagaattcctcgcgagatgtacagatagcatttgcaaatgaattatctctcatttgtgataaggcaggtattaatgtctgggaattgatcagcttagccaataaacatccgcgtgtaaacattctccagccgggttgtggagtaggaggacattgcattgctgtggatccttattttatcacagccgattttccgatagaatctcagataatatcaaaagcccgtgagatcaataactataaatccttttggtgtgcagagaaagtagaaaacgccatgttgaagtttgagttagagtaccatcgcaagccggttgtcgccatgatgggattagctttcaaaccggatattgatgatttacgtgaggcaccggcaaaatacataactacaaaggtgatgcaaagttgcaacaatgcagatatattggtagttgaaccgaatgtgacagagcataaagtgtttaaactcactgattataaagaagcttataagcaggcggatattgttgtattcttggtagctcattctgtatttaaagctttgccttatgatgacacaaaagtgatacttgatttttgtgggatctataaaaaataagtatatattattatgaaaaaaataatgttagtcttcgggactcgtcccgaagctataaagatggctccattagtgaaggagttccagaagcatccggagacattccaaaccattgtatgtgtaacaggccagcatcgtgaaatgcttgatcaggtgcttcatctttttgacattaagccggactatgatttgaatatcatgaaacaggggcaagatctttatgatgtcacctcccgagtacttttaggtatgcgtgacgtcttaaaagaagcaaatccggatgttgtcttagtacatggtgataccactacatccacagcttcagctttagctgctttttatcagcaaattcctgttggccatgtagaggcagggcttcgtacccatgatatctatagcccctggcccgaagaaatgaatcgtttgataaccggtcgtattgctacttatcatttttctccaactgcattaagcaaacaaaatttattggatgaaggaataaatgaagaatcaattaccgtgacaggcaacactgtgattgatgctctttatatggtggtagataagattaaatcggacaagcagttaggagaggagttggagaccctacttcgtgaatccggttatgacgtaaatcgtttgaatggtactcgaaagttagttctcattaccggacatcgacgagagaattttggcgaaggctttatttcaatgtgcagagcaataaaggccttgactgagaagtatccgaatgttgattttgtttatccgatgcatttgaatccaaatgttcgcaaacctattcacgaagtatttggtgaagacttatccgatttagataatatgttctttatagaaccattggaatatctttcgtttgtttatttgatggagaaatctaccattgttcttactgatagtggtggtattcaggaagaagcgccgggacttggtaaacctgttttggttatgcgtgataccacggagcgtccagaagctttagaagcgggaacagtaaaactggtgggtacggattacgataagattgtaaatgaagtttctactttactagatgatatggattattatgataggatgagtaaggcagtaaatccatatggagatgggttggcgtgtgaacgaatatgttctttatttaatttttctaaatgttagcagcgggtaagctaaaaagaaattttgtaatgctagctattgctacaatttgtagtaaatgcattggttttctgagagaaatattgtcagcacagcaatttggattatctaatgagtttgatatttatttatctgtatttgtagttcctggaataattattagtcttttaacatatgctgttcccaatattattattcctaaattaaataggaatatggatgatcctactttttatcgttatttcgcatctcatttttttactccatatgtgctgtttttgatatttattgttattgtatatcatttatttatagggtcttatattaatattttagcgttttctcatgagcaaacaatattagctttaaaattagggcgccttttatctatatatgtgtttttcgagtccttttttaatttgctgatgacactttacaattcaaaagaaaaatttatattacctgcttttttacatttgacactgcaatcaagtgtaatattatttatgcttttattttccaaaagagtaggggttgtttctatttgttatggtttagcttttggtgcagtactagaatctcttctttttttagtagtactaaaaaaacagtcgattttgaaatattttacatttaaaatgtcgtatactccaaatcttttgtctaatatatttgttgttttaataattgaagctttagggcaattttatacattttcggataggatctatgttacatatttaccacaaggatatataacaggattatattatgctaatattgtaaaggaacttccatttactgtattaggaataactttaggcggaattttactccctaaaatagtaagagtttatcaaaataatgactatattattttggatggattgatgaggaagattttgctatatgtatttctattggcgtcttttatagctttatttttaatactaggtaataattatataatatcattactatttgaacggggggctttttcatctaatgatacttccttatcatcacacttattgtctttgtttgccattggattaccatttatgtttattcaattcattattattaagttatactatacgttgaaattagaaagatatatattttacttctctatattgtctgttttgttaaaatgttttttgagtttttgttttgtgcaagtaggttattatgaggggttggcattatcaacatctattgcttatatgtttagtgctagtttatttatagttatgtattttataaaaatacatccgtacttagagggtagaagaaaaatattatgatattgtcttttttacagttttttgcttttgtttttatcataatatatgaatttaggagaaagtcagtgtcaatttttctttggggaactctctttgtaatgttctcaataccgcatttactgatgttttttgttggtagttttgaatatccatcttgggtaatagataaagtttcaatatttgtggtattattttgcatattttatatggtgggaattaaattaattccttggaataatcgaccgaatatatcgttgttagttcctgaaaataagagttatataactacatttgtttttcttttattcgttttgatcttcgtaaggactcttgtactttatagagccacaggtagtttgctaaatacttcatgggcagagaatagaaatgtatctgatgaagtcttttttatgaagttgtatgcctatttttattatgttttttcttctgtgctgctattatgctttttgtatagaacacatttgaaaatagttgttgttatagctttattagtttttggcgtaatattatcacgaaatagaatggaaattcttcctttatttatttctatatattggttttatattttaaaagagaataagtttggtggtctattttttataaaatgtttgttattattggtatgtgctgtatattctatctttgcattactaattttcaggtattatggtagcattgatatgtttttatcttctgatattaagtggggagatttcaatgaggttgtgactaatatgctttttgaaggagatggcgaacttgctttacgtaaagtattttattattttgtttatcatgataatgattttgggggatttggagaagggcatacttattttaggattttattatggtttctgccaacgagtttaagctttggaataaaacctgatgattttgccataactatggggcaagcttggattccaggaattgcgaattttagtgttcatcctacattatttggagattgctatgctaattttggaatgtgtggatgttttcttggacttttttggggaatatttattggggtattagattcgtatatacgtaaagctatgtataataatataaaaggttttctattattgattttagtatcttcaaatttagtgactatagctagaggatctgtttataatggttttatgtgcctacttgttggagttataatcttgaatataatttttaaatttctatccttccataaaagtttagattcgtaggtatatggtgttttatgttttgaccgagtcacatagatataaaaataggattaaaaaatgatatcaaattatctaaaagatagttttccaagtgtttaatattaatttgttgaactgtaataattattgaataaatatgagaatatgttttttttgtaaaataaaggatcgaaagcttttggatacgatagaattctataaaacagacattgattgtttaaaagagatagatgataaaatggtaattgctactaagtattcggaaatagattggaaagcagatattttgtttgtgtggtggtggacttatgcttttttacctgtttttatatttcgtttattacggaagaaagtattcataacaggtacgtttaattattatgttcctaaaggtgagattgattattttcgtcgtccttggtggcaaagatgtttaataaaaggagcatttaagttggctactaataatattttagtatctaaaaaggaatatgatatgataagaagagattggggatgtgaaaatatgtcttattctccacatggaatagatacagaaaaatataaattgaaacaaggggagcgaggtgatttctttttggtagtaggattaataggagggcatagtattgttagaaagtcttttatagagattgtggatgctgtaagtttgttaatctctcaaggatatgttgtaaagttgaagatagcagggcacaagggtgatgcctttgattttttttcgaattatataaaaaaattgaaattagaaaattatatatcatttttaggtagtgttagtgtagatgagaaaatctgtttaatgcaaaactgttattgttatattcaaccatctaaatatgagggatttggcttagctgtagctgaagctatggcatgtggtgcacctgttattgttagccaagagggagaattaccaaccttggtaggtaattctggttttatactaaatgatataactcctttaagtattgcaaaagtaattaaaactgttagtgagctttctaatatagaagaatattcaaaattaagccgtcagcaaattgtagataattatgatgtgaaaaggaggtttagggaattaaaaaatattatattaaaaggataattctttctcatatgaatgctataggattatatcgaatcgaacattggtgctatcttaaaaagatacctatatttccaaaactaattcactctcttattttcttgttatttaattctcatattccagcttcttgtacaattggaaaaggtacccgttttggatatggagctattggagtggtgattcattcaaatgctattattggaaaaaattgtataattggtacaaatgttactattggagggcgaggaaggccaggtgtacctattattggagataatgtttatatttctactggagcaaaagttcttggaccaatcaatataggaaacaatgtaactattggtgcaaatgctgtggttattacggatgttgttgacaatgctatagtaggaggagtacctgcaaggatattaaagtaaaactccgtatgaaatttgttatgtgttcattgacgtaaatgtacttgggtaacctaaaatttattataccatattgggataagactatattcttgaactttttttcatttctatattgtagcaattattcttttaatgtagtaatgaggaatggctattattgtactaaatagtagcactaaataaaatagaaatgttgaatattatatgtcattgatagttaattttcatctctactcccagatattgaaaaatatgggaggaagatattttttatttcgtgcctcttatgaaatgcaacgtaaatcgggcttattacggtttagatatccggtgaactatacgttgcagaagtttttttcattggaggaatggaaagagaaagcactaccgttcttctttgattcgtcaaaagaggtctcattcagcagcgtacatataaataatttggcttctgatttccattgggttgtaaaaggggagtgctgttttttttcatctgcatggtatgatttgggtactgattatgattgggtgactaatcctgatacaaattataaatatgacgtatccaagcattggacagaggtggaagacattgtacaagaagccggagatatcaagtatgtatgggagaagtcaagattctcatatctctatacggtgataagatatgaccactcaaccggcgaagatcatagtcagttcgtatttgatcagatacaggactggattgataaaaatcctctgaattgcggaccgaattataagtgtagtcaagagatttcgttaagggttctcaattggatttttgctctgtattattacaaatcatctcctcttttaacagaaagttgttttcagaagatcataaattccatatactggcagataaagcacgtctatggtaatattaatttctcaagaatagcagttcgtaataatcatgctataacagagacattaacattgtatattgtaggtttactttttccatggtttccggatgcgaagttatggaaatcgaagggaaaaaagtggttcgaaaaagaaatcgaatatcagatagcagaagatgggacttacctccagtttagtatgaattatcacagggtggcgattcaattactgacatggggcattgctcttgctcaaaggaatggagaatgttttagcgaacatgtctatcagcgcgcttatcaatctgtcaattttctatatcagtgccaggaattatcaaatggatatttacctaattatggttcgaatgatggagctctgttttttaaattaaatgattcggattatagagattaccgtcctcagcttgatgcacttcattacctgcttaccggtgaaaatctttatgatgatgtatatgaggatagaggttggtatgcaaataatcggaattgtatacatgctgaatttgctcctctcaagcagaagataggatgtatctcttttgatgtaggagggtactatttgatacgtgaacaggatacattgacttttattcgttgcggtaaatataaggatcgtccggcacatgcagataatttgcatatggatgtttggtataaaggagaaaatatattgatggatggaggtagttataagtataatacggatgcttcggatatcaattactttatggggacccaatctcacaacacaatcatgttgggcaataataaccaaatgttgaaaggggcaagatttatgtggttttattggtcgcaagctttaaaggcctctatacaggagttggatgattcttattgtttttcgggagtagtaagttgtttcaggcaattaggacacgatatagctcattcaagaaagattataaagaagaaaaatgctccggaatggatggttgaggatattgttttgaataaacctcaagggagcaaaatacgccaactgtggcatacccaatcttcaagaatagactttaaatctgtagagcataattatatttcgtctaagggtatgtgctctgaatattatggacaaaaaaaagagaataaagaaatcgaatttataagtgattcagaatctataacaacaattattcaagtgatttaaaatgaaagttctttattttcatcaacattttacggttcctactcaggctggaggtacacgatcttatgaattggcaaaacggctcgttgaacgtggacattcggtttgcatggtatgtggtgaaactgcaaagttggacttaccgcgcactcaaatgaaaaatgtgcacagagggatggtagatggaattgacgtgatacaaatagctttgccctattcgaataaggatgggatagctaaaagagcattaacgtttataaagtttggctggaaaggagtacaaatcgcattaaaagaagagtacgatttattgtttgccacttcaacgccattgacggctggtattccgggaattgtgatgaaactgttccgaaggaagaaatttatattcgaggtacgcgatttatggccggaacttcctaaagcattggggatgaagaatccgctacttttatggggaatgagtgttctggaatggttaagttatcattattcggatgcttgtgtgggactttcaccggggatttgtgaaggtattcgaaagcgtagtcaatcaggaaaacgcatagctatgatacccaacgggtgcgatttggatatatttaaacccgctccaagagagtttttgaagttaaagggtataaaatcaacagacaaagttgctgtatttacaggagcacatggaattgctaatgggttggatgcgatattggatgctgcaaatgaattaaaaaatagaggcagaaatgatattgtattggcgtttatcggggatggaaaaatgaaacctcatctacaggaacgggtggaaagagaaaaactggataattgtcggttttatgccccgatacctaagaaagaattaaatgcaattgttgcatcggcagatgtggggttaatggtattggcgaatgttcctgcattttactatggaacttcacctaataaattttttgattatatctcatcgggattagctgttttgaataattatcccggttggttggccgatatgattgaagaaaatgaattgggagtagtggtaccaccgaataatgcaaaagcttttgcggatggtttgattaagctggtagataatgataattatagaatgaatgccggacaaaatgcaaggagatttgcagaagctaatttctcaagaataaaactggctgatgattttgtatcgtttcttgaagaaatttcttcgacagattaagagcctgtttaaattttcctgaaataattttatataggctttatcgacctgttttgattttcttttcggtctattttcccgtttttattcgtcacatagcccgctatgctcctcataaaaactgaaaaataccctcgaaaacaaatctcaaaacagtatcgagcaaaatttaaacaagctctaattttttaattctggctataatatatgtatcgttcttttttgaaacgtttaattgactttagtcttgttttttgtgctttggtgatttgctttcctgtacttttcattattaccctttggttacattttgctaataaaggtgcgggtgttttcttcttgcaaaatcgtcccggcagagatggcaaaatcttcaaagttataaaattcaaaaccatgacggatgagtgtgattcaaaaggtaatcttttacctgatgaacagcgtctgacaaaagtaggtaaatttgtccgttctacttctattgacgaattaccccaattgataaatgtgctaaaaggagatatggctttgataggtcctcgtcctttattacctcaatatttacctttatacagtaaagagcaagcccgacgtcacgaggttcgtccgggtataaccggttgggcacaggtgaatggtcgtaatgccatctcttggacgaagaagtttgaattggatgtgtggtatgtggatcattgttcttttctgttggatttgaagatcttcctcttgactatcaggaaggtttttgttcgtgaaggaatcagttctgatacttctgttacaatggaaccttttactggaaataattaaacgaatgtatttatatggtgcaagtggtcatgccaaagtgatcattgatattttaaaagctaatcatgaatcgattgaagctttgtttgatgatgatgagtcgcttactcatcttcttgattatcccgtactacgtccgtcggaagtccggggaccgttgataatcagtatcggaaacaacaggatacgctctaatattgcgaagatgttgtcagtagagttcggccgggctattcatccgctttctattgtttcacaagtcgcaaacattcatttaggtagcgttgtaatgccgggtgccattattcaatcttgtgtcagtattgggaaacattgtattattaataccggtgcgtcagttgatcatgattgtacaataagtgattatgtacatatcgctccgcactctacactttgtggcaatgtatatgtgggcgaaggtacgttgattggtgccggatctacaatagctccaggtgtgaaaattggtagttggagtgtgataggcgctggctctgttgtaaccaaagatattccagatcatgtattggcggtgggtaatcgctgtaagataataaagaacttataaatatagaaataaaatgaacaagagaatctggctttcgcttgctcacatgggtggccgtgagcaagactttataaaagaggcttttgatacgaactgggttgttcctttgggacctaacgtagacgcttttgaagaatcgctaaggcaattcttagttgacaatggacaattgacaattgacagtgatagaagggttgtagcattgagtgccggtacggctgcacttcatttaggattaatacttcttggtgtaaaaccgggagatgaagtgatttgccaaagtttcacttttgctgcttctgccaatcccatttcttatctggaagcaagacctgtgtttgtggatagtgagacggatacctggaatatggaccccgtattattggaggaggctatcaaagaccgtttgagaaaaacaggaaaactgccgaaagcaattattcccgtgcatctgtatggtatgcctgccaagatggatgagattatgaagatagccgggcgttatgatatccctgtattagaagatgctgctgaagccttaggttcggaattgaacgggcggaaatgcggtacgtttggagaattggctgcactttctttcaatggcaataagatgatcactacttcgggtggtggtgctttggtgtgtaaaacggaagaggaagctaaacttacaaagttttatgctacacaggctcgtgatgcagctccgcattatcagcatacacatattggttataactatcgtatgagcaacatttgtgcgggtattggccgtggacagatgtttgtgctggaggaacatgtggcacgcagacgggcgattcatgctttgtatacagagctctttaagaatatagatgggataactgttatggaaaacccagacaataatttcaattctaacttttggctgacttgtatcctggttgatccttcgatagcaggtaaaacccgtgaggatattcgtctgaagctggatacagagaatatagagacccgtccgttgtggaagccgatgcatctgcaaccggtatttaaggatgctcctttttatggaaacggtacgagtgagcatttgtttgatatcggtttgtgtctgccttcgggacctacgttgaccgatgatgatatcagaagggtagtagaagtgattgtagggatgtagtaactccattctacattatagaataaagtaatctcccggtagatctgtaaaaagaatctgccgggagatttttttattatttgcaaaaattaatatagccttttggggactctattgttgttgtatttcttgtgtgatcggcattatacatagaattattacgtgttcggacacgaaactcgttgtctattttactttttctcttttaacctaatctgttgactccgtcgtagaaaggaaaaaactcttttatatgaaaacgttttttttgatgaaataaatctctgaatgataatttgattataatacttctgttttactgtgaatttaggtcaaaaagtaggattttttagactaacgaatgttatctaaaacaaaaaaaaagcaaatcagaataatgagtcacatttgtttctacatttgcaaagttgtttgtctaactacttgtttgtgtacgttagtgaacaaaagaaaaactcagatgttatgtttatagtaaagttggtaaaaacgcggcttactatactacgaagtttagaaaataatatataaaaagattgcttatgtcacagattatcggacatatctctcaggtaatcgggcctgtggttgatgtgtactttgaaactacggaagctgagattgtgttgccaagtatacacgacgcattggagataagaagaccgaatggcaaaattctgattgtagaggtgcagcaacacattggtgaaaatacggtaagaaccgttgcaatggatagcacagacggactgcaacgtggtatgaaagtatatccgacaggtggccctattactatgccggtaggtgagcaaattaaaggacgacttatgaatgtcgttggcgactctattgatggtatgagagaactcagccgtaaaggagcctattctattcaccgtgatccccctaaatttgaagatttaacaactgtacaggaagtactctatacaggtatcaaagtaatcgacttgttggagccttattcaaaaggtggtaagattggtttatttggtggtgccggtgtgggtaaaacggtgcttattcaggagttaattaataacattgctaaaaagcataacggattctctgtttttgccggagtaggagagcgtacgcgtgagggtaatgacttgcttcgtgaaatgattgagtctggagttatacgctatggagaagcttttaaggaaagcatggagaaggggcattgggatctttcgaaggtggactatgaagaagtggagaagtcgcaggtatctctggtgttcggtcagatgaatgaaccgccgggcgcacgtgcttcagtagctttatcgggacttacagtagctgagtctttccgtgatatgcattcgggagatgaaggtccgaaggatattctgttctttattgataatattttccgttttacacaagcaggttctgaagtatcagcattgctgggacgtatgccttcggcagtaggttatcagccgactttggctacggaaatgggagccatgcaggaacgtattacttcaacccgatatggttctattacttctgtacaggctgtatatgtaccggctgacgacttgactgacccggcaccggcaacaacttttacgcatttggatgcaacaaccgtactcgaccgtaaaattacggaattgggtatttatccggccgtagacccgttggcatctacttctcgtattcttgatccgcatatcgtagggcaggaacattatgaggtggctcaaagggtaaaacagattcttcagcgtaataaggaattacaggatattatctccattctgggtatggaggaactttcggatgaagaccgtacaattgtaaaccgtgcgcgtcgtgtgcagcgattcctatcgcaaccttttgctgtggctgagcagtttacaggagtaccgggagtgatggtctctatagaggatacgataaagggattccgtatgattctggatggtgaagttgataatttgccggaacaggctttcttgaatgtaggtacaatagaggaggctattgagaagggtaagcagttgcttgaacaggcaaataaataattaaaaaataatagttaatgaaaaggctgcatttgagtattgtttctccggaaaaagagatatataatggggaagtgaatagcgtgacgctgcccggagttataggttcgttcactattctgccacagcatgctccgattgtctcttctttaaaggaaggaaagttgagttatgtgacggaggataatgaagagtgtacgcttgatatagaaggtggttttgtagagatgagtgatgaaacggtttctgtgtgcatctcctgacaagacaaaaataagattaacagaaaaacacagcgatataagatgaacattagtttaacgaagcgtaagtatttgctctatcttacgatccttactctcttattgagtggggtgggtggtgtgacttacttctctttggtgcccgaacattattttggaggatatccgttaattccgatatacttctatatttttggagtatttaatatttatatgttcgatgcttgcaggaggtttgctccggacaagatattgctgctgcatttggctatgaaagtgcttaaaatgattttatctgttatagtgcttgttgtttattgtatggtagttagagaagaggcagtggcatttatgcttacttttatagtgtactatctgctgtatttgatatttgagacaagtttctttgccggttatgaactgaataagaaacgacaaaagaaaaataaaacaaaaaatgaaacagttgcataacatattcacaggattactcctcatacttgggttgctgattgcttctcctgcagtggcgcaggaagatgatattacccctcaggagcaaaaggagaacacagttgatgtgaagagcatagtctttggccatatcggagactcctatgagtggcatatcactacgtggggggatactcacattacaattccattgcctgtgattgtatacagttctaatagtggctggcattcatttttgtcttcacgattagaagagaatgggggaacctacgaaggattttctattgctcccgcaggaagccgctatgagggcaaaataatagaacatgatgcagctggtgaggaaatacgtccatgggatatttctattactaaagttactttgtcattgttgataaacagtgctctgttgttgatcattattttgggtgtggcacattggtatcgtaaacgtgaacagggtgcagcggcaccaggtggttttgtaggctttatggagatgtttatcatgatgatacatgatgatgtaataaagagttgtgtaggtcctaattataaaaaatttgctccttatttattgacagctttcttctttattttcattaataatattatgggattgatacctttctttcccggaggagcaaatgtaacaggtaatattgccataacaatggtgctggctatctgtactttccttgctgtaaatatcttcggatccaaacattactggaaagatattttttggcctgatgtaccctggtggttgaaagtgcctataccgatgatgccgtttattgagtttttcggtgtatttaccaaaccatttgctttgatgatccgtctgtttgcaaatatgctttcgggacatatggcgatgttggtattgacttgtcttatctttatctcggcaagtatggggcctgctttgaacggtacgttgactgttgcttctgtgttgtttaatatatttatgaatgcacttgagttgttggtggcttttattcaggcttatgtatttaccatgttgtctgctgtgtttatcggactggcgcaagagggtggaaagtcggaagaagctactgaataaaagtgagtttgactaatctgaattttaaattaataatataaaccattttaaaactgaaaattatgttactatcagtcttattacaagcagccgcaggtgctgctatcggaaaattgggagcagcaattggagctggtcttgccgttatcggtgcaggtttgggtattggtaaaatcggtggttcggcaatggaagctattgcccgtcaaccggaagcttcaggcgatattcgtatgaatatgattattgctgctgcgctgatagaaggtgtggctttgttggcagtagttgtttgtctgttggtattcttcttgtaatttacaattagacaaattacaatttacaatttgccatgcggttatggcgttggcgattggtgatttgtaagttgtatcttgtaaatagaagagtagagagtattaaatcgtaaattgtaaatcgtcaacgtacctatgtgttaaaggtcagataatggtcatgaccgtagggaataaattgtaaataaatttatgtcattgttattacccgatagtggcctgttattctggatgctcctctcgtttgggattgtgttcgttgtattggcaaaatatggctttcctattatcgtcaagatggtggatggccgtaaaacatacatcgaccagtctttggaggtggcaagggaagcgaatgcccagttggctaaactcaaagaacagggtgaagcacttgtggttgccgctaacaaggagcagggacgtatcttgaaagaggccatgcaggagcgtgataaaataattcacgaggcccgcaaaaaagcagaagccgcagctcagaaagaattggatgaggtgaagaagcagattcagattgaaaaggaggaagctattcgtgatattcgtcgccaggtagctttactttcagtagatattgccgaaaaggtgatccgtaaaaatctgaatgaagatagtgagcagatggctatgatagaccggatgctggatgaagtgttggacagtaagaattaagtgaaagagtatggatataggaattgtttcaatgcgttatgccaaagcactgattgaatatgcgaaggaaaagcatacggaagacgtgctttacaaagaaatgaaaatgttgtcgaagagcctcagtgcggttccccgtctgagggaagctttggcaaatcctgttttgaacattcgtgagaagtattcattgatttgtacggcagctaccggtgataaaaatgtaagccgtgagttttcacgtttcatcactttggtattgaaaaacaacagggaacagtttctgcagtttatctgtttatcttttctggatttataccggaagttgaaacacattggagtgggtagacttactacggcagtagcggtcaacaaagagacagaagaacggatacgtaactctgcggggatgattcttcatgcccggatggaactggaaaccgtggtagacccgtctattgaaggtggttttatattcgatgtcaatgattatcgtcttgatgccagtataactacccagctgaaacgagtgaaacaacaatttattgataagaacagaagaatcgtatagggatttacgattggacgatttacgatttacgattgagaatactttgtgtttagattgtaagatcatgaatcggactaatattaatcgtaaatcgtaaatcgttaacgttcctatgtgttaaagatcagataatggtcatgaccgtagggaataaatcgtaaatcaaagttatgtctgaaaatataaaagtaagcgaagtctccgatatcctgcgccgtcagcttgaaggcattgatacacgtgtgcaacttgatgagataggtaccgtgttgcaggtcagtgatggtgtggcgcgtatctatgggttgcgcaatgccgaagcgaatgaattgctggagtttgacaatggtattaaagccattgtgatgaatctggaagaagacaatgtaggtgctgtgttattaggccctacagatagaatcaaagagggctatatcgtcaaacgtaccagacgtattgcttctatccgtgtaggagaaggcatgttggggcgtgttattgatccgttgggggaaccattggatggtaaaggtacgattggaggacagttgtatgaaatgccactggagcgtaaagcgccgggagttatttttcgtcagccggtaaatcaaccgttgcagaccgggctgaaagcagttgatgctatgatccctatcggtcgtgggcaacgtgagttgattattggagaccgtcaaacaggtaaaacagccattgctattgatactataatcaaccagcgtgagaattatctggccggtaaacctgtatattgtatctatgttgctattggacagaagggctctacagttgcttcaatcgtaaataccttacgtgaatatggtgcaatggattacacgattgtagttgctgctacggctggtgatcctgctgctttgcaatatttctcaccattctccggtgctgctatcggggagtatttccgtgataccggtcgggatgcattggtggtttatgatgacctttccaaacaggcggttgcttatcgtgaagtttctctgattcttcgtcgtccgtctggtcgtgaagcttatccgggggatatcttctatctgcattcacgtttattggagcgtgctgccaagattattaatcaggaggaagtagcccgcgaaatgaacgatcttcctgatagtttgaaaggattggtaaaagggggtgggtctttgactgcgttaccgattatcgagacgcaagccggtgacgtatctgcttatattcctactaatgtgatttcaattaccgacggacagattttccttgatactgatctgtttaaccaaggtaatcgtccggctatcaatgtaggtatttctgtatcgcgtgtaggaggtaatgcacagattaaagccatgaagaaggtggctggtacattgaagattgaccaggcacaataccgggagttggaagcgtttacgaagtttagtggcgatatggatcctgtgactgctcatattatcgataagggacagaagaacacccgtttgcttgtgcagccgcagtatagtccgatgccggtagagaaacaaattgcgattttgtattgcggtgttcatgggttgttgcgtaatgttcctcttgataaggtagaagattttgaacgtagttttcaggagagccttgccattaatcatcaggcagatgtacttgatgtactcaaaacaggtgtcattgatgaaaatgtagagaaaggtatcagggaaacagcagagatggtggctaaacaatttattcagtagttaagcagttggtaaagagtagtcaagtagtaagtagttaagtagtaagtaggatactactgctgtatttaacgctaaactatctgctacttactacttgactacttaactgcttgactacttactattaactatttactactaacttctaactactaaagaatatggcttcacttaa

SEQ ID NO: 604 - DNA, 18890 bp, unidentified
  source 1..18890: mol_type = unassigned DNA
aaaatagtggggaaaacagagtatattcaggcgaacaggattccaggaaaaacataccaattcggaaggaaagaacccgaaatacgagatacaagaggagattttatatcaatttttaacacttttcatagaaatttaatcaaaatgacataaatattggctacgttgtctgcttgcaaagaagacgttagatggtataataaagtgactggaaagaagtttgtaatttcgacaaaaaacataattgttagagtagaaatacgttaggatgaacagaaagaaacaagtgggggacaagatgaagagaaagcaggagaagccggcatatgaccggatcgctgccggagagcggctgcgctgtcggaggcttgagctcggctggagcagagagctggtggcagaacggctcggtgtcgtcaataaatattatgcggatatcgagcggggaacctgcggcatgagtgtggaaacactgattaacctgtcccgcttgtatggagtgagtctggatacgctgatttatggcgagaaagagaaaaaatccgcagccagtcaggaagaacagctgatgcgcggactcaacgggatgcctcagattctacaggattactgcctgcggatgctgtggctgtttgccgacggacttcgggcagcacaggcggaggctgcatcagaatgcgagacagtaccggagaccgtaaaaagcagttcggacagcaaaaaaaactccggaggtgaggcctgagatgccggagaagaaaaatcagtacgtagatattcactgtcatattttaccggaggtggatgacggcgcgagaaatctggaagagagcctggcgatgctgcgccaggaagtaaaacagggcgttgcagcagttatcctgactccgcatcagaaaccgaacagacgcagcattaccgctgcttccgcactggaacggacacagaagctgcagcaggctgcgaaagaaaacggaatcgacatcagactttacagcggtggtgagattttttgctgtatggataccatcgagctgttaaaacagggcaaggcgggaacccttgccggatcagattatattctgacagaattttcaccggacgaagaatgggcgtacatccggaactgcctgtatgacctgctctgcgagggctaccgtccgattgtcgcccacaccgagcgctatcggaacgtggtaaaggatttcaaccgggtcgaagaattaaaggacatgggctgccggatccagatcaacgcaggagagcttccgggactgctgggcggacagctaaagcgcacagcacgcagcctgataaaagaagagcttgcagatctgatcggaacggacgcccacagagtagagggagaacggtctgtatcgatggcggaaggagcctcatggctgcaaagacactgcagcccggaatatgcggcacgtctgctctacaaaaacgcagcacacattctggacaatacagatatggaagacatcgaatagaaaaaggggaacgagacatggaaaatcaaaaccagagaagcaacgaggaaaccgaaatcgatctggtagaactttttttggtactctggagaaagcttccgctgatgattgcagtgggactgtttacagcacttttggcctttgggggaagcaaattcctgatgacgcccacgtatcagtctgtaacaaaaatctatatcctgaacaaacaggacagtagcaacgcaaatgtaacctacagcgacctgcaggcaggcacgcagctggttaaggactattcggaactgatcaaaagccgtttcgtactggaagcggtaatcgagcagttgaatctgccgttaagttatgagcagttaagcgataaggttacagtgagcacacctgcggacacccgagtgatctctattgcggtgacggacagcaatccggttacggcgatgaaaattgctaatgcaatccgtgaaacagcctcgacccatatccgcaacgttatggatatcgaaacagtgaatatcgtagaaactgcaaacgtaccgacccataaggcgagcccctccgccagaaagaacacggcgctgggcggaatgcttggtatcctgattgtagcagccatcgtcatcctttcccacctgatgaacgatacgattcagacggaagaggatgtggaaaaatatcttggaatttccacccttgcgatgattccgctgaatgaagctgaaagcaagaagaaaaagaaaaaatataaaaaacaggcgacaagcggaaagtgaggtgacagggaaatatgcagaacgtaataattcgctccatcgagcgtctggatttcagaacaaaagaagcctataaaacattgcgtaccaatctgagctttgcgggaaaaaatgtcaaagtgatttccctgaccagctgtacgccaaacgaaggaaagacaagtgtttccttccagttatgcctgtcccttgcagaaagcggcaagaagacgattctggttgacgcagatctgcgaaaatccgtactgcggggccgttataaagcaaaccgtgaaaaatacggactgtcccattacctgagcggacagatggaactggacgatgtatgctgcagaaccaacgtcaacaatttcgatattatttttgcaggacctgtaccgcccaaccccagtgagcttctgggaggcgatgcgttcaaaaatatgctggaagtgctgcggatgcaatacgattatgtcatcgtagataccccgccccttggcagcgtcatcgacggcgcggttgcaggtgcgatctgcgatggaacggtactcgttgtcgaaagcggagccatcagctacaaatttgctcagaatgtaaaagaacagctggacaaggtaggctgccggattcttggatgtgtcctgaacaaggtcaacaccaataagaatccttattatggaaaatattatggccattactatggcaactattacggccacggacaggatggtgcagacgaagcacagggtgaactgccgctggatgcgggctccaaaaccgacgcgacagctgctgagacagaaactgctgtaccggaacagaacacgggagaaaaggaggatgcaaaatgagtacaaaaggtctgaccatcggattttttattgcagatgcagctttaattgcgctttgcacattcttctacttacaaatggaccggacagcgccggtgatcacactgccggataccaagcagacctatacaatcggcacagataccgatcagctgctggaaggcgtaaccgcttacgattcccatgacggggatgtgacagcctccttactgattgaaaaggtgacagaaaccggaaatggcgaagtgatcgtaacctatgcagctatggattcgtccaaaaacgtggcagaactgtcacggattttgaagacggagaaataaacggggttaagctgcaggacggatctggtacctgtaccggacagaagcgggactgtcggtggtgactacagttgtttatatctacatcttggcatggcaagcaacggcgcgggcgcttccggataagaccggaagccgcccgacatcgaaaaatagtttgatgaattaagataagaacatgcaccggggggaacggtatcgaaaaaacttacagagaaaagactgaacttgaccgcaacatagaatgcaaaggcgcatactctgttgcgggatttgtttttgtggaaagaattggatggaggagatagaaatgagtacaatagatttgaaaaataagacgattttagtcactggtgcagctggcttcattggctcaaatctggtgaaaagaatctatgaggaagttccttcggctacagtgatcggtattgataacatgaatacttactacgatgtggcattgaaggagttccgtctcaatgagctggataagtattctacattcacttttgtgaatggtaacattgctgataaggctttaattacagatctgtttgaaaagtataaaccggctgtagtggtgaaccttgcggcacaggctggtgtacgctactccatcaccaatccggatgcttatgtggaatctaatctggtgggtttctttaatatcctcgaagcctgccggcattcttatgacaacggacagacaggagtggagcatctggtgtatgcttcttcttccagtgtttatggttcaaacaaaaaggttccgtacagtacagatgataaggtggataaccccgtatctttgtatgcagccaccaagaaatctaatgagctgatggcccatgcttactctaagctgtacaacatcccgtccaccggactgagattctttacggtctatggacctgctggacgaccggatatggcgtacttcggattcaccaataagctggtcaagggcgaaacaatcaaaatcttcaactatggcaattgcaagcgtgactttacttatgtggatgacatcgttgagggtgttgtccgtgtaatgaagaaagcaccggacaaaaagaatggtgaagatggtttgccgattccgccatatgcagtttataacatcggcaatcaaaacccggagaatctgctggacttcgtgcagatcctttctgaagagttagtaagagcaaaagtgctgccagaagactacgacttcgaggcgcacaaggaacttgttccgatgcagccgggcgatgtacttgtgacctacgcagatactagtgcgttggagcgggacttcgactacaaaccaagcacaagtctgcggactggtctgcggaatttcgctgagtggtacgctgagttttataaataagaattagagggatagagaaatgagagaatttaaaaatttaaagattgctgttgctggaacgggttatgttggtttgtctattgccacattgttatctcagcaccacaaggtgactgctgtggatatcatccctgagaaagtggagctgatcaataataagaagtccccgattcaggacgaatatattgaaaagtatctggcagaaaaagagttggatttgaccgcaactctggatgcaaaggaagcatacagtgatgctgattttgtcgtaattgctgcacctaccaactacgatagcaagaagaacttttttgacaccagtgcagtcgaagctgtaatcaagctggttatcgagtacaatccggaagctatcatggttatcaagagcaccattccagttggatatactgcaaatgttcgtgaaaagttccactgtgacaatatcatctttagcccggaattcttaagagaaagcaaagctctgtatgacaacctttatccttctcgtatcatcgtcggtactgatgttgacaatgcccgtctggtgaaggctgcacacacttttgcagaactcctgcaggaaggtgcaattaaggagaacattgacactctgttcatgggctttactgaggcagaggcagttaagctgttcgccaacacctatctggcactgcgtgtcagctacttcaacgaactggatacctatgctgagatgaaagggctgaacactcagcagatcatcaacggtgtttgtctggatcctcgtattggtactcattataacaacccgtcctttggctacggtggatactgtctgccgaaagacaccaagcagctgctggcgaactacgccgatgtaccggaaaacctgatcgaggctattgtagagagcaacagaactcgtaaagacttcatcgccgaccgtgttttggagattgctggtgcttatgaagcaaatgacagctgggatgagagcaaggagaaagaagttgttgtaggcgtttatcgtctgactatgaagagtaacagcgacaacttccgtcagagttccattcaaggtgtcatgaagcgtatcaaggcaaaaggcgcaactgtcatcatctacgagccgaccctgaaagacggggatactttctttggtagtaaggtagttaatgacctggatgagttcaagaagcagagtcaggccatcattgcgaaccgctatgacaagtgcttggatgatgtgaaagagaaagtctataccagagatattttccagagagattaagcaagatcaaggaaaattagaggagagagtcagatgaaaaataaagaaaatataaaggtatgcttggtgggttcatctggcggtcatttaacccacctttatatgttaaagccattttggaaaaacaaggatcatttttgggttacgtttgataaggaggatgcaagaagcctgctcgaaggtgaaaaaatgtatccttgttattatccgacaaaccggagtctaaaggctcttattaagaataccaagattgcatggaatgtgttacataaggaaaagccagacttgattatttcctgcggtgcagcagttgcggtcccgtttttttatattggtaaaatgatgggcgcaaagttggtctacatcgaggtttttgatcgaattgataaaccgacaatgacaggaaagatggtttaccccattgtggacaagtttgttgtgcagtgggaagagcagaaaaaggtttatccgaaagcggttaatctgggaagtatattctgaaaggaacttgtttcggaggtaagaatatgaacggcgcaagagaaaagatattttgtaatttgctaagaaaatcaaaaagcaagaatgcaggaaaattttggaggagaatttttaatttttattgtcatttcattttggggtttgaattttcgcctcaaacgcaagttggagaaaatctttcaattgtacatggtgcaagaggtagcgttgttaatccaaggacaattattggaaatgattgcataataagaaataatataattattggtaataatggtctgggggggcagccctattattggaaacaatgtgaatatcggttctaactcatgcattattggccatgtaaccattggagataatgtaattattggagcaggttctattgtggtcaaagatgtaccatctaatgttgttgttgcagggaatccagcaaaaataataagacatatagctatagaagaaaacgcctgagaggtgagaaaatgatttttgtgacggtaggaacacatgagcagccatttaatcggctgatacagaaaatagatgaattaaagaaagacggcattataaacgaagatgtaattatccagactggttttagtacatacgagccgaaatactgtcagtggagtaagctgattccatatcagcagatggtgaaaaatgtggccgacgcccatattgtaatcactcacggtggcccggcaagttttatcatgccactacagataggtaagactcctattgttgtgccgcgtcagcatcagttcaatgagcatgtgaacgatcatcaggtggagtttgcgagaaacgtggctcagagaatgggaacgattatcccggtagaagatattgaaacattgggagatatcataacgaactatgatcagattgttgctggcatgggacatggtatgagcagtaataatgtaaagtttaatgaagaacttgaaaaactggtagatgaattgtattgaggatgggtggatgagaaaagttggaatcatgtcgatgcagcgcattgcaaactacggttcgtttttgcaggcatatgcattgaagcagctaattgaggaagttggctgtaatgtagaatttgtggactaccatgtaggtgctccagtaattacagaaaatgcagatagtaaaaacaaggttgtccgaaagatagaaaagggactggaaacctttcggtatcgggctcctcttgcacacaaattatcgttcatccgatataaacagtctttcgctcaaaagtatatgccacttttagggattacggatgaaatgaactacaatccgacagtggattgtcttgtgattggcagtgacgaggtttttaactgtattcaaaaaaattccaatgtgggctattcgccagaattgtttggaaaaaataaccatgcgaagaaacttatcacttatgcagcgtctttcggtaataccacattggaaaagctggaaaagtataaaaaggccaatgaagtcggagctttgttgaagaagtttgacgcgatttctgtacgagatgctaattcaggaactattgtagaacagctcactgggaaagaaccagtgtacaatctggatccggttctgacctatgattacatgaactgctgcgacaaaatcccacaggttcagacgaatgagaagtatttgattctgtacgcgtatgcaggtcgtatttccaatgatgaggcagattggattgctgcttatgcaaagaaaaagaatttgaaggtatatgcaattggtggtatccaaaaatgtgcagaccgattcgtggactgctcaccctttgaggttctggcctatttcagaaatgcagaagaagttattaccgataccttccacggcagtatcttctcggtgatcacacatcggccgtttacaacattgattcgcaagagtgtaggtaacagctatggtaatgaagaaaagttgagcgatttgctaaagcgactgggactgaccaatcggatgacaacgagaattgaagatacagaaaacatcaatgaaaaggcgattgattacgcgaaagttgatgagcagttgaaagcacatagagaagtggcgaaggagtatctgagaaaaaatttagaggaataaaatggagaacatatcgaggataaaagagaaatgtgtgggatgtaaaagctgtgagcaaagctgcccaaaacactgtatctctatggtagaaaacaaagagggattttggtatccgtctgttgatgaaaaaagctgcatcgagtgcaaggtgtgcttgaaaaagtgtccagtagaaaatacgggatttcatcggaatgagccacataaagtttgggcgtggcgcaataaaaatgatgtggatattatgtgctctgcatctggcggtgcggcggatagtgcagcgaaaactatattgcaaatgggcggtgtggtttatggtgctgcctatgacgagcagctggcagtaagccacattgaagtgacagatgaagcagaaagagagaaactacagtcctctaagtatgttcagtctgacccgaaagatagctacacaaaggtcaaacagcgtttgtcagagggaaaaagggtactttttacaggaactccctgccagattgcaggtctgtatgcttttttgggtggcaatccagaaaatctatatacagttgacctgatttgccacggtgtgccttcgccgaagttcttcaaaaagtatctggaataccagaataagcagacggctggcagagtaatctatttcaacttccgttccaaagacaagagaggttggggaacacaatacctgctaaagacaaagacaaagacaaagacaaagacaaagacactctcccttgatcgctatggaaaacattttatggatggcgactgctatagagagagctgttatcagtgtgcttatgctaatacgagccgtgtaggagatttgacagtgggtgatttctggggaattgcaaagagccatccgagcttcaattctccaaagggcgtgtccagtgtatttgtaaataccgaaaaaggtcaaaagctctttgaaatgatgcgagttcttgcagaagtagaagaagcaacgttggaagagggcatggtgaagcagcataatctggtgcagccgagcaacaggcctgtgactagagatactttctataagagcatcgatgaaccaggctttatagaaaatataaaggttggctttcagccaaaagcacggttgaaatctgtgctgccgaataaactgattcaaaaaatcaaatctctttgagattttgtggaggaagaatacatgggagagcctataagagttttgcatatcttgcagcgaatggaagctggcggtacgcaggctttgttgatgaatatataccggaaaattgacagaacgaaagtacagtttgattttttggtcgtttataaggaaaaacagttttacgatgatgaaattgaaaaaatgggtggacatgtttacaaactgtctttccgggaggatttgaaccttcctaaatttcaaaaagatttggcagttttctttgcgcagcatcacgaatataaaattgttcattgtcacgcctacacgattggatatttctgcctgaaagctgcaaagaaagcaggtatccccgtcagaattgctcattcacataataatgagacagtacacgatataaaatatttaccgaagctgttcatgcagcgaatgtttaccaaaaacgcaacagatcttttcgcctgctctgaagaagctggaaaatatctgttcaaagacaagccgtttcaagtactgaaaaatgcgattgattcgcagaactttattgcggatgcggataccagaaatgaaatcaggaaagaactggggttaaaggataaatttgttgtcggccatgttggtcgcctgcatcctcagaaaaaccatgatttcctgattgatgtttttgcagaaatcaagaagaaaaagcctgacgctgaattgattcttgttggcaccgggccattagaagagaaagtaaaaagcaaagtgatcgaaaaatgcctttcagattgtgtgcattttcttggaaatagaaaggatatgaacagaatttatcaagcgatggatgtgtttgtttttccatctttgtttgaaggtctgggtattgttgcaatcgaagcacaggcggcgggtgttcctattgtctgctctgaaggattgccgccggaaacagatattacgccgatataccagaaacttctgctgagcgatggcgcagaaaagtgggccaatgtagcgcttgaaatggcacagaatctgaaagcacataccaatatgcagcagtatgtgattgatgcaggatttgatatggacgcaactgcaaaatatatggaaagttattatttgaaccgatggagaactgcctgagatgaataaaaaagtaggtttcttaataatgaattttgaaagcggcggaggtactgagagagttacatctgtcattgcaaatgagttagtaaaaaaaaattttgatgtgaggattatcagttgtcagcatggaaactcttgcaaatttgaaatagataaaaacattaaactttactcactaaatggagaaaaatgcgagaattcagctttgagaaaaatctatgtcgaaaagcaattgattaaatatgtaaaagaagaacagattgacgtcatgatagcagtcgatgtagcgttatatctttatttgattcctttgcagataaagaaaatatgtaaatgtatcgcatgggaacattttaactattatataagccctaataaactggtcaaatatgccagaaaactggcggcagaacatgctgattgtgttgtggtattaggcaagaatgatttaaataactacttgacacaatacaaacattgcaaaaatgtgacatatatttataacccaattgcagttgatacaagcgaaagtacgccgttgacacaaaaacgtgcgattgcagttggacgtttaagtagacaaaagggctttgatatgctggttgaggcttgggccttgattgaaaaggaagtcccggactggaaattagatatttatggacaaggaccgcttcaaaaagaacttcaggggcagattgacggactggggctcaggaatatagaactaaaaggattttctgatgatattcataaagaatatatggaatcgtccttgttttttttatcttcgcgttatgaggggtttgtgctagttctgatggaagcaatggcaacaggactcccggctgttagctttcgttgtaaggaaggacctgaagaaacgattgataatggtatcaatggatacctagtagaagaaggaaatgttcagcagttcgcagattgtgcgataaaactgatgaaaaatgaaacgttgctaaagcaatttgcgtcaaaaacaaaaaaggatttggatcgtttcaatacagccgcaattataaaccagtgggttgaactcttaagaaatatgtaaagcgaatcaaaaaagcggaagcaggagatagaatgaaaatattatttacaattaggagccttacaggaggtggagccgaaagagttgtttcagttttatcaggcttattggctgatgttggcgaagacgttcatattattacatataaaacgtcagagagagactattctatttcagaaaaggtacagatacatgaaatgccacaacgaaaggatagtacaataacaaaaggaatgagaatctttgatatgagaaaaattatcaaagaaattcagcctgatgtaattattccgtttgttggaaccgttctgtatgtgtcttggcttgcaatcacaggaatgaaaattccgtttgttttgaccatcagaaataatccgtggacaatgccagaaaaaagattgttaagaaattttcgcgattacctggctaagaaatcttgtgccattctggttcaaaatgaagagcaatcggaatatttctcagccgatttaagaaaaaagtgctttgttgttcccaatcctctttcatcaaagtttattgataatcataaagaaatttatagtagaaaaatttctaaaataattgcagtaggcagacttcacgaacaaaaaaattatccgcttcttctgaaagcgatggttgatattacaaagataaaatctgaaattacactggatattttcggtgagggaaatcaaaagaaataccttgaaggtttagtcgatgaatatggacttgctaatcatgtttttctacgggggagaagccagagcatcgagaaacagctacaagtagcggatatgtttgtgatgacatctgattacgaggggatgccaaatgcactaatggaagcaatggctttcggtgttccatgtatatccagcgattgtaaaacaggtcctagaagcttgatcaaatcgtttgaaaatggtcttctgtttcagacgaacaatgttgaagatttaaaggataaaatggaatgggccattgcaaatcctgaacagatggcagaatgcggaaaacaagcaaggcgatgtttattggaggagtattcgtctgaaaaagccttgaagaaaatgcagatacttttggattatgtgaaggagtgtgagtaagatgggtgaaaaaaagcatggtttgcggcgtgtggctggctattttgtgaaccacagactgcttaattggatgccggacaagccatatctgcaaattttttattatgcagagtttggaaagtttattgattttaagaatccgaagacattcaacgaaaaattgaactggctcaaactgtattatagaaggccggatcttattacattggttgacaaatacgaagtgaaaaaatatattgcagataaaattggtgaacagtatgttatcccgacgcttggtgtatgggataaatttgaggatatcaacttcaatgagcttccaaatcagtttgtgctgaaatgcacacatgattcaggtggattggttgtctgcaaggataaatccaaacttgatttgaaaaaggcgaaggaaaaaatcgaaaagtctctggcaaacaattattatctttggacgagggaatggtcatataaaggagtcaagccgagaattattgctgaaaaatatatggaagatcaggaaaccggagaactccgtgattataaattcttctgtttcaatggagagccgaaactgatgtttgtggcaacggaaagaggcgtcaaaaacacaaagtttgacttttatgatatgcagtttaaccacatgaacattgtacagcactatccgaactctgtatccgccatcaaaaaaccagaacattttgaaaaaatgcttgagcttgccaaaaaactcagtgaagggttcccacacgttcgagtggatttttatgaagcaaatggtcaagtatactttggagaaatgacattttatcatttcggcgcgattgtgccgtttgaaacaaaagagtgggataaaaaaattggagattggctggtacttccagaaaaaattagctaatatgaaaataattcaaagaaaggattttgtggggtgcagggtcaatcagcacttgacgatggatttgatgaatgattactacaaaaggcgcaaagattaaagttaaagatattacaaatatttgttatggaatctgtattttcctgtttgtcattgggcaatcatatctcctttcgtcatctgcaattcttgcaacgctgtgtaaaggattaaagattgttgcggcgactgttccggtattggtacttttacgccactcaaagttcagcattcgtaatttgcttttatggggactaatcgctctcctgataataggaaatatattcttcaatcaggcagacagtgacttgatctatattgttatattcatattgtattgttcaaaggcagagccggaatctgttctgaagacttattgtattagtgctggcattgcaattgcgttagtgatttttgcatggcttataggaattctcccgtctcaaactagtgcagggcgagagtacttgggattttattttgccacattcggtccgaatctcttcttgcacacagttttggcgtatattgccagtagaaaaaacaaaataaagtttaaaagttggattttgattgaagtcataaatgtttggttttataagatgacggatacattagctgtatttgttgttattaatgcaagcattatcctatattacttgttgaatattgaaaagataaaacagtttctgtttgacagagattttccaaggagaatattagaaatatttccatttttttcagcaattgcaacgatagtagcacagtacttttatattgctcactataatgagcctgcattcgtggctataaatgcagctttttcaaataggccgtattttggaaaaattgctttagaaacgtatggtgtttcattgtttggtcaacccattacatggctgacaggaaccgatggcacaaaagtatccggtatggattatttttatgttgattcttcatatttgcaggtgttagtaagatacggtgtgataatgcttgtggttttatgcttggcaatgatggcggtacaatgctatagtgttgtgacaaagaatatttatctatgtatgggatgttctttgttccttattcattgcataacagacccgcaattattatcttttagatataatccttttattataatttctgttgcctgcgttggaatgataaagagcaaaaaagaattttttgaaaggaaccgaaatgagaaagaatatgaataagtatgcagaagtaatagtaacgtataatcgaaagaaattattaaaagaaaacatagaagcactcttgaatcagacatttaaggaccatgatatcctgattgttgacaacaacagcaatgatggcacaaaggaaatggttgcagagattcaggacaagagaatcaaatattataataccggaaagaaccttggtggtgcaggtggatttgcttttggtttgagaaaagccatagagctcggctatttatatgcgtggatcatggatgatgactctatcccggaaaaagaggcattgcaaagccttgtggataagggacaggcattagatggtgagttttcctatctggcctcattagtgtattggacggatgggaaactgtttgatatgaatgttccggatttccagtacaactccagattagggctggatttggacagaattagaaaaaacaagctgttgttgattgatacttgttcttttgttggctgctttatcaatttaaaatatgctgagacagcaggattgccgatttctgagttctttatttatggagatgatcaggagtatacggcaagattgagaaaattggctccagcttatttggatttcgatagtgttattgtacataaagcaccatccaataaaggcgcagatgtggtttcggcagatgagacaagaatagaacgcttcttttatcaagcaagaaacggaatgtacatcgcgcgaaaaaatggaaaagtaggccgtcggctgcgtgtgattggtgggcgaatcaagaatattctcagaaaagcaccggatcacaaagcaaaaagagtttgggtgacgtgcaaaggaacgatctctggatttttctttaatccgaagattgaatatgcacatagaaaaggagaataacagaaaggaaatgggaaaacaaaagtctcttaaattaaattttgtaatgaacgcgattcttacgatgtcgcagttcgtttttccactgattacatttccgtatgtttcacgcattctattgcccattggtaccggaaaagtatcatttgcaacttcgatcgtatcttactttacactctttgcacagttgggaattccaacatacggcattcgggcatgtgcaaaggtgcgtgataatcgggaagaactctcgaaaatggttcaagagctgttcattatcaaccttgtgatgagcgcactggcatatgtggtttattttgcagcaatatgctatgtcccaagatttcggcaggataaagacctgttcttgattgttggcctgacaatcttttttaatgccataggaatggaatggctgtataaagcacttgaacaatatacttatattacggttcgctcgattatttttaagtttattgcaattgttgcgatgtttctcatggtgcatgaacaaagcgattatgtcatttatggtggaatttccattttggcatcatctgcctcaaatatttttaacttctttcatatacaccgttatgtcaacattaagcctgttggtcactataattttaagaaacacttaaaagcgattgtgattttctttgcaatgtcctgtgccacaacaatatatacgcatctggatactgtaatgcttggatttattcgtacagacgcagatgttggatattataatgcggcagtaaagataaaaacgattctcgtgagtatcgttacatctttaggtgtggttttgctgccgagagcatcatactatgtcgaacatagtatgatggatgaattttaccgtattacaaaaaaggcaatcaatttcgtgtttttgattgcaacaccgatgatgatttattttatgctttttgcaaaggagggcgttttcttcttatcgggcgatgcttatgccggtgcaattattccgatgcaagttataatgccaactttactttttattggtctgacaaacataatgggaatacaaatgttagtgccacttggaaaagaaaaagtagttctttattcggaaattgctggaatgattgtggatattatcttaaatgcacttctgattcctaaaatggcatctacaggtgcagcgattggaaccttggcagcagaaatcgctgtttttattgttcagtacgttgcgcttagaggaattattaaggaagcatatagacaggttcattatgttgcaattggcagttctgttttagctggaggggttctcgcggttttaataaagagaatgcagtggggaagttttatgactttatgtgcttctgcaattgtattttttggagtatattttttgattttaacaattgcaaaggaatctcttgtcatagaaatagaaaatcagttgcttggacgaattatcaagaaaaaataataactgactgaatgggaggaaagagtatgaaatatgattatttagtagtaggttctggtctgtatggggcgatttttgcacatgaagctaaagcacatggcaagtctgttttggtagtagacaagcgcccgaatattgcaggaaatatttataccaagaatattgagggtatcaatgttcataaatatggtgctcacattttccatactaataacaaaaaggtttggaattacatcacgcagtttgcagagtttaatcgtttcaccaactcaccggtggctaattataaaggagaattgttctcccttccgttcaacatgtacacctttaacaagatgtggggagttgtaacgccggaggaggctgccgcaaagattgaagaacagcgcaaagagattactagtgagccacagaatcttgaagagcaggccatctctcttgtcggtcgcgatatctacgagaaactcatcaagggctatacagagaagcagtggggacgtgactgcaaggagttgccgtcctttattatcaagcgtcttccggttcggctgacttttgataacaactacttcaatgcactttatcagggcattcctgttggcggctataccaagatgattgccaatctgctggatgaaattgaagttcgtttgagcacagactatctggaaaacaaagcggagctggatgcattggctgataaggttgtatacactggaccgattgatgcatactttgattataagctgggtacgctggaataccgttctgttagatttgagacagaaactttggataagccaaatttccagggcaatgccgcagtgaactataccgaccgagaaactccgtggacccgtatcattgagcacaaatggtttgagttcggtaaggatgagaacggcaatgatctgccgaagactatcattagccgtgagtacagcagtgagtggaagccgggagatgagccatattatccggttaatgatgctaagaatggtttactttattctgaatacaagaagttggcagatgcagaaaataatgtgattttcggcggtcgcctaggagagtataagtattatgacatggatcaggtaattgcagctgtattggatagatgcgaaaaagaattttaacagagagaaaagagaatatgaacacaacattacttatcatggcagccggaatcggcagc

SEQ ID NO: 605 - DNA, 8756 bp, unidentified
  source 1..8756: mol_type = unassigned DNA
ttagattttgttgctgcggcgccagatgtgcatcttctcggcctctttgatgagctgctcacggaagtcggggtgtgccacgttgatgagggcctcagccttctcccaagtggtcaggcccttgaggttgacgcagccgtactcggtgcagagataatgcaggttggcgcgggtgtcggtgatgatgctgccattttccagcgtgggacggatgcggctttccagctggccggtctttttattaaagaaggtggaggacaggcagatgaagctcttgccgcccttggagaggtaggcacccagcacgaagtccagctggccgcctgcaccggagatgtgcttgataccggcgctctccgcgttcacctgaccaaacaggtcgatgtccaccgcattgttgatggagatgaagttgtccagtgcggagatgctgcggatgtcgttggtgtaatcgacgggggcggacatacactcggggttgttgttgaggtagtcgtacatcttctgggtgccggcaccgaaggcgtagacctgacggcccttgtccagctgcttgtgtgcgccggtgatcttgccggccttggcgatgtccacaaaggcatcgacgtacatctccgtgtggacgccgaggtccttcaggtcgctctgtgcgatgaggctgccgatggcgttgggcataccgccgatgcccagctgcaggcaggcaccattggggatctggggcacgacgagatttgcgaccttcagatcgacctcagaagcggggccggcagcggccatctggccaatgggcgggttgctgccctccacgatgccggtgacccgggagatgtggacgcagttctccatgccgccgaggcagcggggcatattggtgttgacttcgacgacgatcttcttggccttctcgcagacagcgcccagatgagaagcgctggggccgaagttgaagtagccgtgctcgtccatcggcgttacctgaaagacggcgacatccagcgggtcggggctttcgcggtaatagcggggaagctcagaataccggatgggggagtagaacgaaaagccctgtgcgatggccttgcgctcgatgccgcccatatgccagctgttccaagtcatgtgggcagcagggtcgtcgatctggaagatctcgggcacccacatcaggatgccgccgcggaagttgacattctccagctccggcaggcgctttgcaagggcggcgtccacggccacaggggtgttgacacaccagccgtagtccacccagtcgccgctcttgaccagcgcggcagcctgctcggcggtcatctttttctgcgcgtacatttccttaaaatccattataaaccatcctctcctataataacataaaagaattgtaaatttaccatttacattcctgcggaacaaagatctttgccggaaatttaccgttcgtttccagttttgacaccggcttatcacatcccggcggtatccttggaaacagcaggacggatgcctccggcagaggcagacttgctcaacttagttataacattaacaaagagcagaatcaagccccctttcgtaaaaaatagccctacggacaagatgactaaaaatcttagcaatttgtggggataatttggtacgacaaaaacaaattttttcgaaaaaagacttgataaaattttgacaatatggtttacttaatgtgtaccaagacaaagcgccccagtgcgacgttaattgactaaaaattaacgatgttgcgaggggcgtatgcctcgatacttgaagcgggaactgaaaagtgctatcatggcaacaccaaattgcgcttttccaaagcgcggcgataaaggagaccataccgatggcaacagcagtttaccccgggtccttcgacccggtcacgagaggacatctcgacatcatcaagcgggcagcaaagatcaacgaccacctcatcgtggcagtgctcatcaacagcgcgaagaaccccctgttcaccgtagaggagcgggtggcgctgctgcaggagtgctgcaaggacatcccgaacgtgacggtggagggctttgacggcctgaccgtggagttcgccaagaagcgccacgcctcggtgatggtgcggggcctgcgggccgtgacggatttcgaaaacgagatccagctggcgcagaccaaccacgcactgatgcccggcatcgagaccatgttcctcgccaccagcatcaagtggagctacctttcctccaccatcgtcaaggaggctgcccgctacggcagcaacatctccaagttcgtgacgcccaacgtagaagcggccatccacgcgaaagtggagcagcttcaggcggaaggaaagaccatctgatcccttttatcatgcagaaaggctctcgggccttttgatagatcgttttacgaaaaccccgtaaatatacacatttcaggaggctattaacatgaaaaaaattgttatcgcatctgcctgccgtaccgctattggtaagtttggcggcactctggcaaacgtccctgctgctgagcttggctccatcgtcatcaaggaagctctgaaccgtgcaaacgtgaagcctgagcaggtcgatcatgtttacatgggctgcgtcattcaggctggtctgggccagaacgtcgcccgtcaggcttccctgaaggctggcctgcccatcgagacccccgctgtcaccgtcaacgtggtctgcggctctggtctgaactgcgtcaacatggctgctcagatgatcgaggccggcgatgctgacatcgtggtcgcaggcggtatggagaacatggatatggctcccttcgccctgcagaaggcccgctacggctaccgcatgggttctcccatgggcaagagcgagctggtcgataccatggtcaacgacgcactgtgggatgcctgcggcttcaacaagcacatgggcatgaccgctgagaatgtctgcagcaacgagacctatcagaagaagtacggctacagccccatcacccgtgagcagctggatgagttctcctacaacagccagatcaaggctgacaaggccatcaaggacggcgcattcaaggacgagatcgttcctgtcgtcatcaagggcaagaagggcgacaccgtgttcgataccgatgaaggcccccgtctgaccccggtcgagaagctgggcaccctgaagcccgccttcaccaaggacggcatcgtgaccgctggcaactcttctgctatcaacgatggcgctgctgctctggtcgtcatgagcgaggagaaggctaaggagctgggcatcaagcctctggctacttgggtcgcaggtgctctggcaggcgtcgagcctgaggtcatgggtctcggccccatcgctgccaccaagaaggtcatggcaaagaccggcctgaccgttgatgatatggatctgatcgaggccaacgaggcatttgcagctcagtccatcgcagtcggcgaggctctgggctttaacaaggacaagctgaacgtcaacggcggcgccatcgctctgggccacccggtcggcgcttccggcgctcgtatcctcgtcaccctgctgtatgctatgaagcatcgtggtgcaaagaagggtctggctaccctgtgcatcggcggcggcatgggctgcgcaaccatcgtcgagatggactaagttccctttgaagggtcactccggatattgataccgcccggacaaggggcaggaccggagacctgtccccctgtccgggggctgatttgagtaagatataacctgattggaggttttcacaatggcatttgtaaaaaccgaggtgcagggcgctgtcgagatcatcaccatcgaccgcccgaaggcactgaacgccctgaaccccgaggttctggctgacctgaaggctgcttttgaggcagtcgatcaggagaccatccgctgcatcgtcctgaccggcgaaggcgacaagagcttcgtggcaggcgctgacatcggctccatgagcaccatgaccaaggccgagggcgaggctttcggcaagctgggcaatgatgtgttcctgatgatcgagagcttccccatccccgtcatcgcagccgtcaacggcttcgcactgggcggcggcaacgagctggctatgagctgcgacatccgcatctgctccgacaacgctgtgttcggtcagccggaagtcggtctgggcatcaccccgggcttcggcggcacccagcgtctggcccgtctggtgggcatgggcatggcaaagcagctggtctactctgcactgaacatcaaggcagacgaggcataccgcatcggtctggtcaacgcagtgtatccgcaggctgagctgatggagaatgtcctgaagctggcaggcaagatcgccaagaacgcccccatcgcggtgcgcaactgcaagaaggctatcaatgacggcatcagcctccccatcgagaaggctgtcgaagtcgaagagaagctcttcggcgactgcttcgagacccacgaccagaaggaaggcatggcctgcttcctgagccgtgagaaaccgaagcccaaggctgtgttcaccaacaactaaaaccaaccacctctgcaaagcctccccggaaaggggaggtggcggagaggatatacattacataataaaggagagatttcccatgaagatcggtgttatcggcgctggcactatgggccagggcatcgcaaaggcatttgctcaggtcgagggcaacactgttgcactctgcgacatcaagcaggagtgggctgagaatggtctggcaaagatcaagaagggctacgacaagctggtggctaagggtaagatgacgcaggagaaggtcgacgctatcgtcgccgccatcaccccgggcctgaaggaagacctgtgcgctgactgcgacctcatcgttgaggctgctttcgaggatatgaaggtcaagcagaccactttcggcgagctggataagatctgcaagcccgagtgcatcttcgcttccaacacctcttctctgtccatcaccgagatcggcaagggcctgtcccgtcccatgatcggtatgcacttcttcaaccccgctgaccgcatgaagctcattgaggtcatcgctggctgcaacactcctgctgagaccgtcgagaagatcaaggagatctccgtcgccatcggcaagaaccccgtgcaggtcaacgaggctgccggcttcgtcgtcaaccgcatcctgatcccgatgatcaatgaggctgccttcatcaagatggagggcgtctccaacatcgccggcatcgacaccgccatgaagctgggtgctaaccacccgatgggccccctggagctgggcgacttcattggtctggacatctgcctcgccatcatggacgtcctgtacaaggagaccggcgacagcaagtatcgtgcctgcccgctgatccgcaagatggtccgcggcggcaatctgggctgcaagagcggcaagggcttctacgtttacaacgcagaccgcaccaagaccccggtggacgagctgtaatttagtttgaaatttctctcggtcgccctcaaaaagcggccgggaggaatttgtttgcacaggacaagcgtgcagctgccctgtgctgaaagaaaaacatccgttaggaggatatagcgatggattttactctgtccaagcagcagcagatggtgcagaagatgtaccgcgagtttgctgaaaacgaagttaagcctctggcaaagaaagttgatgccgaagagtatttccccaaggagaccgtcgagaagatgggcaagctgggcatgatgggcatttacttccccacttccgttggcggcgcaggcggcgatgtcctgtcttacgtcatggcagttgaggagctgagcaaggtctgcggcactaccggtgttatcgtttccgcacacaccagcctgtgcgcagcccccatctacgagaacggcacccccgagcagaaggcaaagtacctgcccaagctgtgcagcggcgagtggctgggcgctttcggcctgaccgagccgggcgctggcaccgacgctcagggccagcagaccatcgcaaaggaagatggcgattactgggtgctgaacggctccaagatcttcatcaccaatgccggttttgctgatgtcttcatcgtcatcgctgtcaccgacgtcgtgcccgacaagaagggccgtcccaccaagctgtgctccgccttcatcgtggagcgcaccgacccgggcttctccgtcggcaaggctgaggacaagatgggcatccgtggttcttccacctgcgagctgatctttgaggactgccgcatcccgaaggaccgtatgctgggcatccgtggcaagggcttccagctggctatggccactctggacggcggccgtatcggcatcgcctctcaggctctgggcatcgccgagggcgctctgcaggagactgtcgcttacgtcaaggagcgcaagcagtttggccgcagcatttccgctttccagaacacccagttcgagctggctgagatgaaggcccgcatcgaggctgcaaagtatctggtctacgctgccgctctgaagaagcaggaagcaatgaacggcgcaaaggtccgctacagcgtcgaggctgctgaggctaagctgatcgcagcccgcaccgccagcgatgtcacccgccgctgcctgcagctgttcggtggctacggctacacccgtgattaccccatcgagcgcatgatgcgcgatgccaagatcactgagatctacgagggcaccagcgaagtgcagatgatggtcatttccggcgcgctgctgaagtaagggaggcaagatttacaatgaaagcaatcgtttgtgtaaagcaggttcctgatacctccggtaaggtggccgtcaaggcggacggtactctggaccgtgcctctatggcaaccattaccaaccccgatgacctgaacgctctggaggccgccctgaagctgaaggacgagaccggctgtgaagtcgtcgtcgtcaccatgggtcccccgccggccgagggtatgctgcgtgagctgctggcccgcggcgctgacaaggctgttctggtgtccggccgcgagttcggcggttctgataccttcgcaaccagccagatcctcgctgctgcggtcaacaagatcggtgtcggccccgaggacgtcgtgttctgcggccgtcaggcaatcgatggcgataccgcacaggtcggccctcagatcgctgagaagctgcacctgcctcaggtgacctatgttgcagacatccagaaggatggcaacacccttaccgtcaagcgtatgctggaagacggctacatgatggtcaaggtgcagactccctgcctgctgacctgcatcaaggagctgaaccagccccgctatatgagcgtcaacggcatcttcacctgctacgacaagccgatggaagtgttcgattacaatgcactgaaggacgatccgctgatcgaggtcgataccatcggtctgaagggttctccgacgaacgtcttcaagtccttcactcctccgcagaagggcgcaggcactatgctgactggcgacgataccgctgcacagctggctggtatcctggccaagaagcacctgatctgatgaaaggagcataggattacaatggctgattttaacgaatacaagggcgtctgggtcttctgcgagcagcgccagggcgcactgatgtccactgattttgagctggtcagcgaggcccgcaagctggctgacgagctgggctgcgaggtcaccggtctgctgctgggcgacaacgtggaaggcatcgcaaaggagctgggcggctatggcgctgataaggtcctggtctgcgaaagccccctgctgaaggattacaccactgacgcatacgctaaggtcgtctgcgacatggtcaacgagtataagcctgaggtcctgctgatcggtgctaccaacatcggccgtgaccttggcccccgctgcgcagctcgtctgcacaccggcctgaccgctgatgcgacccatctggacatcgacactgcaaagtatgtcgagttcctgaaggaaagctccaccatcgacctgtccaagcagaagttcgattatgaggatcgcaacctgaagatgacccgtcccgcattcggcggccatctgatggctaccattatctgcccccgcttccgtccccagatgtccactgtccgtcccggcgtcatgaagaaggctcccttcgatcaggccaaggcagatgcctgccagatcgtgaagcccgcattcagcctgactgctgacgatgtgaagaccgaggtcctgagcgttgagaaggcagctgagaagctggtcgatctcatcggcgcagacgtcatcgtctctgtgggccgtggcatcagcaaggacgtcaacaagggcattgagctggctgagcagctggctgtagctctgggcggcggcgttgtcggcgcatcccgtgccgtcaccgacgcaggctggatgaccgctgaccatcaggtgggtcagaccggtaagaccgtccaccccaagatctatgtggctctgggcatctccggcgcgatccagcacaccgcaggtatgcaggattccgagtgcatcatcgccgtcaacaagaacgagtccgcccccatcttcggcgtggctgactacggcatcattggcgacttgttcaaggtcgttcccgaactcatcaagcagatcgaggcagcaaaggctgctcagtga

SEQ ID NO: 606 - DNA, 16503 bp, unidentified
  source 1..16503: mol_type = unassigned DNA
tcggccacggtgacaaagctgttcagctgcacatccagatgctcggccacgccttccacagcgcgggtcacgtcggagagcttgcccacgccggagggctcgatcacgatgcggtcggggtggtactgctccaccacctgctgcagggcggtgcggaagtcgcccaccagagagcagcagatgcagccggcgttcagctcgttgatctggatgccgctttccttcagaaagccgccgtcaatgccgatctcgccgaactcgttctcgatcagaacgacctgctggccggcaaaggcctctttgatgagctttttgatcagcgtagtcttaccggcacccaggaagccggagaaaatatcgattttggtcatgattcaattgcctctttctttttagcgcaaagagccgcagagtgctggctcaaatatcttacattcctattataacaaggctgtcaatgggaaaacggcctttttcaagaaaaaattgtaactttttttgcaaattggcggcattttgaaggagaacgaactccctcagtcaaaacctgacggttttgccagctccctcggggagggagcctctggcgtgcccgcaaactttgcgcttacgccggaaactgtaccgctgtgccaaaggcctcatcccagaggacgacttcccccggtcaggggaagatgtcaccgtaggtgacaggggaagttcgttcccaaacccctctggtgaaaaagtggttcagaaacgcccgcaggcgtttctgaaccacaaatgcaaaaagattctttccgctgaacatggccagagcgcaagcggaggccattccagaccgtcccgcccctgcattgcaatctttttcccggaatgatacaataggacacagaaaaattccccgccgccgggggcttttccggcggtccggccatagaaaaaaggaagctgtcattatgagcatgaataccgtacccgagcgccttgccgcgctgcgtgccgccatggccgcaaacggcgtggctgtttatctgatcccggtgggggacccccatgccagtgagtacctgcccgcccactataccagcctgacctggttctccgggttccacggcgagaactccaaccttgtcgtcacccgcaccgggagcgccctgtgggccgatggccggtacttcgtgcaggcagaaaaagagcttgccggtaccgagatcgagctgcagcgcatgggggaaccgggtgtgcccaccgtggaggaatactgtgccgatgccctgaacgaaggggaaacactgggcctgtgcggcctgaccgccagcacggccctcgtgaacggcctgaaaaaggcattggagaaaaagggcgcttccatccggacgctggcccttgaggacgagctgtggaccgagggccgccccgccctgccggacaccccggcgtggatcctgccggaggagtatgcgggcttctcccctgcccaaaagctggaacagctgcgcggcaggctccgggaactgggctgcaccgcgcagttcgtgggcaagctggacaatctggcatggctgctgaatctgcgcgccatggacatcgagtgtaccccctacgccatggcctactgctacgtgaccccggaccgggcggtgctgttcatcaacacagcccgcgtggccccggaagcccgggcagagctggaagcaaacggcgtcacgctggcggagtatgatgacgtgctgccctgccttgcggccgagaccgagccgcagaccgtgctggccgagacggccaccgtcaattatgccgtgtatcaggtgctggaacagaatgccgccctcaccgtgaaggacggcaccgacccgctgctgctgatgaagggcgtgaagaacgaaacggagcttgcccacacaaagcaggcccatatccgggacgctgtggctatggtgcggttccagatggagctggaaagccgccttgccgccggtgagaccctgaccgagctgaccgtggacgagatcctgcacaagtaccgcagtgcggacgataaattccttgtggagagctttggcaccattgcggcctacggcggcaatgcggccatgatgcactaccacgccaccccggaagatcacgctgtgctggaaaagaagggttttctgctggtggacagcggtgccacctacatggacggcaccaccgacatcacccgcacctatccgctgggggagctgaccgaggacgaaaagcgcttctacacatggaccctgcagagccatatcgaccttgccagggctgtctggctggattactgcgagtgtaagatgatcgataccatcgcccgggaacccctgtggcgccacctcatcaactaccgctgcggcaccggccacagcgtcagctttgtgggcaatgtgcacgaggggccccatgccctgaacagccgcaacaccacccggatgcgccccggcatggtggtcaccgatgagcccggcgtctacgagaccgaccttgtgggcatccgcatcgagaacgagctggtgtgcatccacaaggcggataaccagtacggcacttttctgggctttgagccgctgacctttgtgcccattgctacctcgcccatcctgcccggcgtgctggacaaagacgagcttgcatggctgaacgattaccaccgtcaggtgtttgcaaagctggccccgcacctgaacgcggaagagcgggtctggctggccgaaaagtgcgcctccatcggctgctgagccggataaaaacagaaacacccggatgccgtacagcggcagtccgggtgtgtggttttcagaaaagcggtgcgccgttttgcccgcggaaacagccggttacagcctgcaggaatgggcctgcggggtgtccagcggcggcagggtgaactcgttttcgccaaaagcggagcgcagaatggcggcccgggtctccgggtagatgcccagttcggtatagatgctcttgtacaggcccatcacccgccgccgcagccgaaggatatcggcggtggtcactctggagtgggaaacgctctggctgcactgcaggtaatagtagccgatgtccgggatggaaacggcggtgcgcacatagcgcagatattcggtgttgaacagctgatcttctgcaaacagctcctgccggaagcggatgccgtgcccggcaaggagatcccggcggtagagcttgttccacagcacaccgtagtaaaaggtattgggcttttcgatcagctgccgggcgtactcctgcccggtgtacaccccggcgggcagataaccgtaggcccgggtgcggggcgggttgcgccggagcacggtgcccagcgccttttcccacgggcggatgtgctccacgtagtcctttggatacaccatccagaagggcgcgatcacaagatcggcggcgtgggtctcggcggcggtgacgagcttctcggtaaagtccggggccagccagtcgtcgctgtccacgaactggacgtagcggccatgggccagcgcaagcccctgattgcgggtgtccgccgcgccggaattgggcttgtccaccagcgcgatgcggtggtcctgagcggcaagagcgcggcagaccgagagggtgtcgtccttggagccgtcgttcagcaggatgatctcgatgcttttatagctctgggcacagatgctttttacacagcgggcaatgcagcctgcggcgttgtacatgggcacgatgatactgacaaggggaaattccatagcgtctccttttctcagatgcggctgtgggtgcgtgcagcggcgtcggagagccgctgcaccgggccgttgggcagggggctttcaaacaggctcaggtagatgccccgcagccgcagacggaaccggtcgtacacgcccagctgaatgcacatctgccggtaggcgcggtacatccggtcacggtggcgcagcatgtctgccaccctcacctgcgtgtggcagacgctctgcgggttctggatgtagcagtaaacggcctcgtcgatggcggcgaaccgctgcgccgcctgcagataccgggtgttgaacagctgatcctcggcgaaaacgacattttcaaaccggatctgcgccatccggatcaggtcgcggcggtagagcttgttccacagcacgccgtagtaaaaggcggcggcgtggccggtgagctgccacaggtaatccaccttgctgtactcccctgcgggcagcaggctgtattcccggatgtcatagccgccgtctctgcggggcaccatcatccggtagggggccagcacaaggtcggcacggctgcgccgggcagctgccacaaggtttgccgtgcagcccggcagcagatagtcgtcactgtccgcgaactggatgtactcgcctctggccagcgcaaggccgcagctgcgggtatcggctgcgccggtgttcggtttgtcgatcacccggatgcggggatcggcttcggccagcttccggcagatggcaagggtgtcatccctggagccgtcgttcagcagaaggatctcaagctcctgatagctctgggagacgatgctctccacacagcgggcaatgcagcctgcggcgttataggcgggcacaatgatgctgacaaggggttccggcatggcaatggtctccatttctgttttttcggtgcagcgaggtttcatttatcatactccagccctgcgcaaaaatcaaggcgggcggctggcggagaggggaatgtcggatggtctttcacattgcggtatgcagcacggatgcggccctgcgcagcgggctggaacgtcagtgcatggaatattttgcccggcggcaggacgcgtgcatcgtgcagcagctgccggacgcagatgcacttctgcgccgtgacgccgagggcgagcggttcgacctgtatctcatagagctggcagcggtggcggctccggccgggctttcggcggctgcggagctgcgccgccggggccgcagggctccgctggcctttgcggcccgcacggcggcccacgcctacagtgccttccgggtggacgccatgcagtatctgctgctgccggtgcatcagcaggagctttcggccctgctggcccgcgccaccgagccggagtatggcccggccctcaccgtggccacggccgagggcctgcggctgctgccctatgcccagctcgagtatctggagtgcacccaccatgtggtgcgtttccacctgctcagcggggaggatgtgatgtccctttcgctgcgggtatcctttgccgaggtggcaaggccgcttttggcggacggccgctttttgcagccgcaccgctcctatgtggtcaatctggcggcggcccggctgctgacggcaggcgagctgcagatgagcagcggtgcgcgcatccccatcccccgcgggcgggagggcatggtgcgtgaggccgtccgcagctggaccgaccggtaaaatggcaaacaaaaaagagctgccttgtgcagctctttctcatgtacggaagttcaggcctctgatttggcgttgcgtttcttttccttgtcggaagcatccagaacaccaaagccccagcggttggccatgtccatgatgatcttctggggcgaaccggcgggataggcattctccgagaatgcggtcaggaatttgtacagctgcggctgcaccttgtcgtacaggcccagctttgtgtaaagatctttgtagtagcggaacacctgcagcttgttctgcacgatggaagccagattgatctgggtgtggcagatgctctgggggttctgcacatagtggtagccagccttggggatggaaacgaatacgttggcgtacaggatatattccaggttgaataccagatcctcggcccagcgcacctcgctggtgaactgcagatggttgtccacaaggatgtcgcggcggtagagcttgttccacaggacgctgtagaagaaggatgcgggcttttccatcaggcgcagggcaaaggtgtcgcggtcatagatgccctcgggcagaaaaccgtattcgcgcacatcgtcgggacgcttttcctcgatgccaaggttctcctgcaggttttccagagcctgaccggccttgcaggagtttgccgggatcaccatccaatagggtgcgatcaccagatcggcattgttggtctcggcggccgttaccagccgctcggtaaaatcaggctcgatataatcgtcgctgtccacaaactgtacgtacttgccggatgcaagggtcatgccgcagttgcgggtgtccgacacgccggaattggacttgtccaccaaaacgatacgcgggtctttttcgcggaactgctcacagaccgaaaagctttcatctctggaaccgtcgttgaccaaaatgatctcgatattcttccacgtctgcgcacagatgctctccaggcagcgggcaacactattctgcacattgtacactggcacgataatgctgacgagtgggttgttcatgacggaaggtctcctctttacggatattatacctttatattttaaaaatcaaacggtgtattctcacatatcttacaaaaacagggaaatgagggcactgcccccttgggacagtcctgtttataatatcatactcttcttgacggcaaaaagcaagagtaatacccctttaacatgaaaaagaaccgcactctgcggcccttttttattacacggcggtccagtccagtgcatcccaccgggggaggaactggctgcagacgcggcgcatctccggctcgtcggcggcagaggcggggtccgcgatgcccacgacgtaaaatccggccccatgcgccgtggaagcagcgtacactgcatcctcgcacaccgcacaccgggcggggtctgcaccgcccagacggctcatgcattcaaagaacacctccgggcggctcttgtgcagcgcgccctgcgcctccacgatgaaggaaaaatacccggcaatgcccagccgggtgagcacggtgcggcactggtcggcccatgtgttggagcagatgcacatgcgggcaccctcggcctgcagctttgccagcatcgtgcgcacgccgggcttgagctccacggtctcgtacagctcggcgatcacctcccgcatcacggcaaagtagctctcctcggtcagcggcagatcatactcccggatcaggtatcgtgcgccttcctgcatccccatgctcagcagggtggcacgcaggtcggcccggggcgtgcggccgtagcggcgcagcagggcgtccggcgcaccctcccacaccacggtcatgctgtcggtcagggtaccgtccatatcaaagatccattggctgcagtgcatgagaatgcctcctttaaagtatcctgacaagtataccatgtttcttagccgggagaaagccttcaatttacaaaaaaagggagaaatttctccggaaatatgctataatctgaacaaaaccggaaccaatcgaaggaggcggaggcaatggaagaacgcagtgtcccgtgcagggctctggtgctggccggcggcggtgcccgcggcagctatcaggtgggtgtgtggcgcgcgctgatggagctggactggcacccgcagatcatcaccggcaccagtgtgggcagcctgaacggtgccatgttcgtgctggaccagtacgaaacggcgcgggacatgtggctgagcatccgcagcaaggacgtgatggagctgccggaagaggatgcagacctctcggccctgcaccagttcctgcgcagtgtggtgaaggccggcggcatggacgtgaccccgctggaggagatcgtggagcgggtgctggacgaggatgccctgcgcgccgcacccatccgctttggccttgttacggtggagcagcggggcctcaaggcccgggagctgacgctggacgagatcccggcaggaaaggtcaaggactacctgatggcctccgccgcctgcttccctgccctgcgggcgcgggacatcgacggggtcaagtttctggatggcggctacagcgacaacatgcccaccggccttgccaaacggatgggcgcagaggagctggtgtgcgtagaccttgagggggtgggcatcacccgcccgaacctcaccggcctgcccaccgtcatggtgcgcagctactgggagctgggggacatcctgcactttgacccggacaccgcccgccgcaacatcgagctgggctactacgacacccgccgcgctatgggatatctgcgggggtgcgcctatgcggtctcctgtgacgcccagagctgcgcggacgctgctgccttccatgcaaaatttgagcgggtgcaaaagcaggtgcgggagaaataccccgtcaccctgacagcggatgccgccctgctgctggccaacatgaaggatgcggaccttgccccgctggaagctgccgccgaggatgtgggcgtgagccctaccggctactataccacccacaccctgtgcgatgcgttccttgcaaagtgcgatcaggcacggatgcagagctttgcaccgctgtttgagggcagcgccgatgcggcgcgggctgcgctggcggcattgctgcccaatacctttctgcaggcgctggtctggcacaccctgaccgcgccggaagcagaacttttgccggaggtgaaccagaatgaagatctataaaggtttctgtgcctcgccgggccttgtgctgggtcaggtgagccggttggagcaccatgtggagaccacgaccgtgggcccctttaaaccgtcccgggagctgcagctgctcaccgatgccatccgcaccgcgcaggacgagctggaatccatggcagaccgcgctgcgcccagcgagcaggccatcttccagttccagagcatgatgctggacgatgagggcatgatgaacgaggtgcgtttctgcatcaatgcgggcgttggcgccgctgcggccatgaatcaggtgggccagcgctacgccgaccagctggccaacatgaaggataacccctacatgcagctgcgcagcgtggatattctggacgccacccggcgggtcatcaacatcatcaccaaccgcccccgcatgtggctggcgctggaccacccggtgatccttgccgcagagcggctgatgcccaccgacctgttcagcgtgccctccggcatgattctaggcatcatcacggcagagggcagcggccagagccacgcggccatcattgcccgggcaatgaatatcccgggcatcgtgcaggtgggccgggattttctggacgactgcgacggccgcaccgtgattttggacgccaccgggggccagtgcacgctggatccggacgctgccgcccgccagcaggccgagacccgcatctgtgagctgcagcgggagaacgaagagatggggcagctgcatgctctgcccaacaggacaaaggacggccagccctttgagctgctggccaactgctttgggccggaggatatcgacacggccatgcagtccggcgcgcagggcgtgggcctgctgcgcaccggctacatgatgctgccgggccgcattctggacgagcaggagcagtatttcttctactgctcctgtctggcggcggcgcagggccggcaggtgaccgtgcgcaccttcgactttggctcagaccgcaccatttccgacgcctatcagggcctgcagtcctccaagctggggctgcggggcatccgcaacagcctgcgccagccccgccagttcgagacgcagctctgcgcgctgatgcgcgccgccgcccgcggcccgctgcaggtgatgttccccatggtgacgacggtggaggactgggacgccgccatgcgcgtggtggagcgctgccgggagcatctgcgggagcggggcgtgcccttcaaggaggataccaagttcggcgtgatgctcagtgtgcctgccgcctgcctgacggcggaggagttcgtggcgcacggggtcgattttcttgtggtcggcaccaacgacctgacccagtacacccacgccgccgaccgggagcttgccagcgcggagcactactaccgcccggccagcagcgccatgaaaaagctcatcaccatggtaatggacgccgccagagagcgggatgtgccggtgaccatctgcggccttgcggtgggcaacccggccaacacggtgcagtatctgcagctgggcctgcgcagcttctcggtgagtccgcagaaccttttgaacgtgaagaaagctctgcgggaagcagagacataaaccctgaaaataacaaaaaagcagctgcaacgcagctgcttttttgttactccagatccccggtcagggtcatgacggacgcaaggaccgccagcggggcggtctcgcaccgcaggatgcgggggccaaggcccaccgttctggcaccggcctttgcggccatttcggcttcctcggcggcaaagccgccctcggctccggtcacgatggcaattttccgctttctgccgtcggcaggcgcggtctcggccagcagttggcgcaggggcgcgccgccgcactcgtagcagaacagcacaaggtcatactggtcaaaggtgcggcacacggccccgaagttcggcagcggcagggccacatccggcagaacgccccggccgcactgcttggcggcttccgctgcaatgcggttgtagcgctcgttcttctgctcctctttttttggcgcggccacgcagtaccggctgaagaaggggataaagtgggctgcgcccagctccaccccgtgcttgatgatctgttccagcttgtcctgcttgggataaccggccagcagggtcacttccacgccgggttcggcggcgctgggatagcccggctccacccggaactccacgcactcgtccccaaagccggtgatggtggcggtgtattccacggcgttgccgtcgcatagaatgacagtatcgcccagccttgcgcgcatcacgcgggcaagatggtgggcatcggccccgcgcagggtggcggtgccgtcagagatctcggtggtaaaataacggtgcggcataaaatctccttacgctttcttgcagacgatgcactcccagccgcgcttctccttcacttccacaacggcaaggccggccttttccagcccggcgatcacttcgtccttgcggctgtcgatgatgccgctggcaataaaggtggcaccctctgccatcaggcccggcacggcgggggccagagacaggatggcgttggccacgatgttggcggtgatgatgtcatatttgccgctggccttgtccgaaaggtcgcccaccagcacggtcagcttgtcctgcacgccattcagggcggcgttctccccggcggtgcgcaccgccacagggtcgatgtccacgccctcggccacggcagcgcccagcttcagcgccgcaatggcaaggatgccgctgccggtgccgatgtccagcacccgctcgccgccggtcacccgctcgtccagcgcttccatgcacaggctggtggtctcgtggccgccggtgccgaaggcaaggcccgggtcaaggatcagctttacccggtcggtgtcgtactgctgccacgagggcaccaccgccagccgtttgccgatctccagggggtgataatacttgcgccagccgttctgccagtcctcctgctccacgccctcggtctctgcggtgtaggcgatgccggcggcttccatgcgggcggcaatgagggccagcgtctccacgggggaagcgcccggctccagatacatatggatgataacggtgtcgcggggcttgtccagcagctcctgctcgatcagatccacatgggcgatctcggccacctgctgctcgatgtcgctgtagtcttcgatataaataccgccctcggcgatcatggtggcaacggcttcggcgttgtcggcatcggctttggccacggtcaggcggatatcagtccattccataaagtaaacctccttcggttcccggcttttcttataatagtatagtacccgattcggctgtgggatgcaagcctttgggcaaaatgtatgtaaaaagaaaagaattttcaacataaaaacggtacacgtgcggaaaagctaaaaattatcgactataaagccggtaaataaggacttttgacgcattttgatagaaaaaatgagaaaggggctttcttttctttcaaaaatatgttactattctattacggaattatggacggccgacaaccagaggcgtctgtaaacacaaacatttcttaaggaggaatgtgctttatgatgaagtatctccagaaactgggcaaagcattgatgctccccgtcgcggtcctgccgatctgcggtatcctgatgggtctcggttatgcccttgctccgggcgtcatgggcgttcccggtgctgcaacctccggtgcagcttacaccgtcggcttcctgctggtcaaggcaggcggcgctctgatcgataacatggcatggctgtttgccattggtgccgctgtgggcctggccgacaacgacggtaccgcaggtctggccggtctggtcagcttcctgatgatgcagcagctgctgaaccccggcgtggtcggtatggtgcgcaccctggaagagggcaccgctacctacatcgccttccagaaggtggccggcaactccttcatcggcattctggccgctattgtgggtgctgcctgctacaacaagttcaagaatacccagctgcctgactggctggcattcttctccggcaagcgcttcgttgcaatcgctaccggtctgatctccattctggtgtccgttgttctgctgttcgtctggcccgtcatcttcgacgctctgatcgcaatcggcaacggcatcgctggcatggacggcatcggcgccggcatctacgctttcctgaaccgtctgctcatccccaccggcctgcaccacgctctgaacaacgtgttctggttcgacaccatcggtctgggcgacctgagccacttctgggctggcgagacctctgctgatgtgggctggagccttggtatgtatatgtccggcttcttcccctgcatgatgttcggtgtcctgggcgctgctctggctatggtcaagaccgctaaaaacaagaaggccgccatcggtctggttctgtctgctgcaatctgcgcattcgtctgcggcgttaccgagccgtttgagttcggcttcatgttcctgtgcttcccgctgtacgttgtgtacgctgctctgtacggcatcttcaccgtcatcacctactactccggtttccgtgctggcttctgcttctctgcaggcgctaccgacctggtgttctccgcttctctgcccgcagctgccaagacctggatgatcattcctctgggcatcgcagccttcgtggtgttctacgcagtgttctactttgccatcaccaagttcgacctgaagacccccggccgtgaggacgaggacgatgaggccgagaagaaggtcgttctggcaaacaacaactacaccgaagttgcttccgctgttctggctgctgtcggcggcaaggagaacgtgaaggacgttggctactgcgcaacccgtctgcgctttgaggtcaaggataactccaaggtggacgagaaggccgtcaaggctgctggtgctgccggtgtcatccgtcccagcaagactgcctgccaggtgatcatcggcaccaaggtccagttcgtgtacgacgagctgaagaagatgctgtaacacaaggcattccatctgacccgatgcgggagactggttgatcccgcaccatcataaaactgccgccgggagacgggactcagctgtccgctcccggcggctttttgcgttcccgcacggagtatgctatactggaagcagcaaaacagggcgcacctgcccgggaggagaaagcgatgagcaaaacgtacaactggcggaaactgaacgaaaaagagctgacgcgggtctatctggacgaaatgcggcgggacttcccgcccacggagctcaagcccctgagcatgatcctgaacagcgaagccaacggcacagcccacacatggggcgtgtttgacggcgaaacactggcggcgtacctgctcatggtgcgtccggcgggcagcagggtgagccagctggattactttgccgtgctgccggaataccgtgctgcagggctgggcgcgcagctgctggccgacctgccgcagcacgagcggggtgcacaggccatcctcattgaggccgaatgcccggataaggcggaggacgagacaatggcggtgcggcggctgggcttttatgcccggtgcggggcccgggacaccggcttcaccgagcatctgttcgatgcatggttccgcattctggtgctggactgcccgggtgccggtacctttgcggaccggcaggccgtggatgcactggtggactgctaccgccgcaccatcagcgagaccgagtggcagaagtacgtgcagttctactgcccggacggaacaaaatactgctgagcagaaggcgctccatggagggcgccttctttttttgtcactttgcccagccagaaaatggcattttcggcatatttatcctgtttgtaaaatccgagtgcaggtttttcatccaggctttacgcaggcttgacacagccgccggagcctgtgcaaaagctttacctccattttgcgcgtacatggtcgcagcgcgcacggcggtgcggtacaataaggccgttcccaaggaaaacacagagaaacaagaaaacatcggccggaaatgcattccggcatttattggaggaaaagggttatgaaaaagatcactcgtcgttcgtttatcactgtctgcggcgctgctgctgcagcaatggctctgaccgcctgcggcggcgcagcctcttccactgtggaatcctctgctgcagagtctgcctcttcttctgccgctgctgagaccgctgcaggtaccctgtccggcaatgtggctaccggcggttctacttccatgaagaacgtcatcgctgccctgaccgagggctttgccgaggtggagccgggtgtcaccgtcagctacgaccccaccggttccggcgcaggcatcaccggtgctaccgataagacgctggacatcggcctgtcctcccgcgctctgaaggacgatgagaagaacgatgtggacggcaccatcgtggcgctggacggcatcgccatcatcgtgaacaaggacagcaaggtggcagacctgaccgtggagcagctcaagaagatgttcaccggcgagatcaccaactggaaggatgtgggcggcgacgacggcgagatcgttctggtgggccgcgaggccggttccggcacccgcgatggctttgagagcatcgtggacgtgaaggacagctgcaagtacgcacaggagctgaccgctaccggcgctgtcatcagcgctgtggaggccaaccccctggccatcggctacgcttccctgtccgctgtgggcgacaccgtggccatggtcaccgtggagggcgtggagtgcagcgaggacaccgtgaaggacggcagctacaagatccagcgtcccttcgtgttcgtcaccaacaagagcgtggccctgtctgagcaggcacaggcctttgtggactttgccaccagcaaggacgctgccgacctcatccgcaccgcaggcgctgtgccggtgaacgagtaattaccgggtggtttgccggggagtttccccggtgaaccgcctgccccgcctctgaacaagaaaactgccgcgtctggctgccgtttctgcgggccgacgcggcttttataaaggatttcagctatgaacaaaaaatcctatctgagccgggtgcggctgccccgcacccccgccgaatggctggaagcggtgatgaacttcatcttcttcctgtgcggtatgctggcggtgggttgcgtggtgcttatctcggtgtacatggtgatctccggtgtgccggccatccacaagatcggcctgttccaattcctgttcggcacaaagtgggcctccacggcggcccagccgctgttcggcatcctgccctttatcctgtccagtatctacggcacgctgggcgctgccatcatcggtgtgcccatcggcctgctgacggcggtgttcctctccaaggccgccgaccccaagctgcgcaccgtggtggtcactgccatcgagctgctgtccggcatccccagcgtggtgttcggcctgctgggcatgcaggtgctggtgcctgccgtggcaaagaccttcggcaaggcttccggtgcctgcctgctgagcgctatcgtggtgctttccatcatgattttgcccagcatcgtgtccgtgtcggtcacggcgctgaatgccgtgccgccggagtatgagcagggcagtctggcactgggtgccaccgacaccgaaacgtggttcaaaa

SEQ ID NO: 607 - DNA, 11051 bp, unidentified
  source 1..11051: mol_type = unassigned DNA
atgcaagacattagaaacattgcgatcatcgcccacgtagaccacggaaaaacaacactggtggacaagatgatgctggcgggacatttgttccgcaacgaccagacaaatggtgaactggtattggataataatgacttggaacgcgaaagagggataactatcctttcaaagaacgtttcaattaactacaaaggaacaaaaatcaatattattgatactccgggacacgccgacttcggtggcgaagtagaacgtgtactcaatatggctgatggatgtatcttattggtagatgcattcgaaggcccgatgccgcagacacgcttcgtattgcaaaaggcgttacagatcggtttgaaacctgtagttgttgtgaacaaggtggataaacccaactgccgtccggaagaagtatacgaaatggtattcgacttgatgttcagcctgaatgctacagaagatcagttggacttccccgttatttatggttctgccaaaaataattggatgagtactgactggaagaccccaacagaaaatctggttccgttgttggatgctattattgagcacattccagcaccgaaacagctagagggaactcctcaaatgttaatcacctctttagactattcagcatatacaggtcgtatagctgtgggacgtgtacatcgtggtaccctgaaagaaggtatgaatattacactggcaaagcgtgatggcagtctgataaagtctaaaatcaaagaactacatacttttgaaggcttaggacgtaaaaagacagatgccgtttcatcgggagatatctgtgctgtagtaggtgtagaaggcttcgaaattggtgataccatctgcgatttcgaaaatccggaaccattgccccccatcgccattgacgaaccgaccatgagcatgttattcactatcaacgattctcctttcttcggcaaagaaggtaagtttgtgacttcacgccacatccaagatcgcttgaccaaagaactagataagaacctggcattgcgtgtacgcaaaagcgaactggaagacggtaaatggattgtatcaggacgtggtgtacttcatctttctgtactgattgaaaccatgcgccgcgaaggatacgaattacaagtaggacagcctcaggttattttcaaagaaatagacggagtaaaatgcgaacctatcgaagaattaacgatcagtgtgcccgaagaatattccagtaaaatgatcgatatggtaacccgccgtaagggtgatttggtttctatggaaacacagggtgaccgcgtaaacattgagtttgatatgccttcgcgcggtattatcggtcttcgcaccaatgtactgactgcatcggccggagaagcgatcatggcccaccgctttaaatgttaccaaccatacaaaggtgagatagaacgtcgcagcaacggttctatgattgctatggaaagcggaacagcttttgcatacgctattgacaaattacaggatcgtggcaaatttttcatttatccgcaagacgaagtatatgccggccaagtggtaggtgaacatgttcatgaaaacgacttggtgatcaatgtaactaaatcgaaaaagcttaccaatatgcgcgcatcaggttctgatgacaaggcacgcatcattcctccggtagtattctcgttggaagaagcattagaatacattaaggaagatgaatatgtagaagttactccaaagagtatgcgtatgcgtaaagtgattcttgacgaaacagaacgcaagagagccaacaaaagctaatcaatctacattgaatataaaaaaatcccgaaggccatattaccttcgggattttttatctctaatctacaaacttcactttactaacctctctaggtttagcagccggcatttcatcgggataaccgaaagcaatcgcataaagcaactcatacccttcactgaatcccaactttttcatatattccgcagctgcaggtgatttcatgaaacgcacaggtcctcccaaacaacaggaacctattcccattgaccaggcagacaaaatcatattctcacccaacaaaccacaatcgatctgtgacatatcatatgcaggatcgttagcaataaacactactgtaggagcattattgaacatattcttaaatcccggacgttctgccgctttgggattttcttttttgaatatttcagtcaaaccattgataaattccggattatctactacacgaacctcccatgactgtttattcattccattaggtgcattgattccacattctactatagtctgcatcttttcacgctccacagcctcgggcttatacttccgtatactacggcgactcataatagtttctaccacagggtttacctggctcacggaaacactatccgcaacaacttccttctgtcgggagccttgcgatgtacagctgcataatacgaacatgcctgcaccaactaacattaatctaaataatttcatttgctatcatatttggtttgcaacaaatctaggcattttcaagcataaaaaaaagtggttcctttataaggaaccactttttatatgttaaatctgtaaaattcaaattacaacttcggaccagcagcaaccaatttcttacctgcttcgttaccagtaaacttagcaaagttcttaatgaagcgaccagccaaatctttagctttttcatcccactgagcagcgtcagcataagtatcacgaggatcaaggatcttcggatcaacacccggcaattctgtaggaacaacgaaatcgaagtaaggaataaccttagtaggagccttatcaatagaaccatccagaatagcatcaatgataccacgagtatcacggatagagatacgtttaccagtaccgttccaaccagtgttaaccaagtatgctttagcaccagtcttttccatcttcttaaccaattcttcagcatacttagtaggatgcaatgacaagaaagcagcaccgaagcaagcagagaatgtcggagtcggttcagtgataccacgttctgtaccagccaatttagctgtaaatccagacaagaagtaatactgagcctgttcaggattcaagatagataccggaggcaatacaccgaatgcatcagctgacaagaaaataacttgttgagcgtgaggacctttagagataggtttaacaatgttttcgatatgatagataggataagaaacacgagtattttctgttacgctcttatcagcgaaatcaatcttaccgttagcatcaactgttacgttttcaagcaaagcgtcacgtttgatagcagcgtagatatcgggttcgctttccttatccaagttgataactttagcatagcaaccaccttcgtagttgaatacaccttcgtcatcccatccgtgttcatcgtcaccgatcaacttacgtttcggatcagtagacaaagtagtcttacctgtaccagacaaaccgaagaaaatagctgagctagttccttccatatttgtattagcagagcagtgcatagaagcgataccacgaagcgggttcatgtagttcatgatagagaacatacctttcttcatttcaccaccgtaccaagtattcaggataacttgttctttagtcttcaagttgaaaacagtagctgtttcagagttcaagcccagttctttatagttgtcaacttttgctttagaagcgttgaaacatacaaaatcaggttctccataagcttccagttcttcagcagtaggacggatgaacatgttagttacgaagtgagcctgccaagctacttccataatgaaacgtactttcatacgagttgcagcgttagcaccgcagaaagtatcaacaacgaacaaacgcttgccgctcaattgttttacagctttagctttcaaatcagcccaagcttcttctgtacaaggtttgttatcatttttatattcgtcagaagtccaccatactgaattttcagaagcttcattcttaacgaagaatttatctttaggagaacgacctgtgtaaacaccagtcattacgtttacagcacccagttcagtaacctgtcctttttcgaaaccttccaatcccggtttagtttcttcagcgaaaagcacatcataagaaggattgtggagaacttccttcacgtcggtaataccgtacttgcttaaatctaaatttgccattttttaatgatttaatttggttattgtataatgttatttttactctttattttctgagagaagatgtttttcaacacccccttgtctaaggcgctacaaaattagtgctttattttaaaaaaaagaagttattagagaaaaatttccgtaataatcaaatatttatatttgtgtaacaaaaatgcaattcgtactttacaaatctagaaattatttgtttctttgcaggtcaaagtcaacaatataacaaaagcatagatatgaaaatcatcaatctcagtgaaggcaattctctcctaaaccaatatgtagcggaattgcgcgatatacatgttcaaaatgaccgtatgcgtttccgcagaaatattgaaagaataggagaaatcatggcatacgagatgagtaaagcactaacctattccgtaaagcaagtacagacacccttgggaactgccacggccagcacacacgatgacaaaatagtgattgcaacggtattccgtgccggactgccgttgcacaccggttttctgaacatgttcgaccatgccgacaacgctttcgtttccgcattccgtttttacaaggatgacgagcaccgtattgtagatgtgcacattgaatacatcgccgccccttcattgaatgacaggaccttgcttctcgttgaccccatgcttgccaccggtgaaagcatggaacttgcctggaaagctttccttaccaaaggcaaacccgctaaattgcaaatggcctgtgtcattgccagccaacaaggggtaaagcatatggcagaactttttcccggcgatgatgtcacattatggtgtgccgccatagaccctgtcttggacgagcacaaatacattgttccgggattgggggatgccggtgatttagcattcggcgagaaactttagggctcaaactataaagacagtttcacgtgtgttcgcttgcacacactaaaattctaaattaaatggttagtaaccggcaattattcacagcctattactaaccatttaatttttaaaacagttctgtagatctggtccctacagggaagatgaaaaatcttatttcacttcccaaatatcatttgtcatcagtaattcctggaaattatgatattttttctttgcggccacttcttcaatctgtgcattaacagcgtcatcataagtaggcgcctctacatcacggatcacccctaatgcaaccggaaaatccggtccttccatcaatgccagtttcaactgcaaagtattatccatacaatgagcatcgtgcactaaaatatctttttccgtcacaccattctcaccaagctttaccactttcagtccgaaaccttcctgcatcagcccgtattctttgtctacaccaaacaacatcggtttaccgtgttctaaataaatggcattctttgaacgaccttctttcgtatatactgattcgtgtgttccatcattaaaaatgacgcagttctgaagaatttcacatacagccgcacctttatgattggcagcagctttcagaatctccactgtaccaggaccatccgtagctaccgcacgggcaaagaaacgtccacgcgcaccaaaacataattcagccggatgaaacggatcttccacagtgccgtaaggagatgatttgctaacaaatccacggggagaagtcggagagtactgtcctttggtcaaaccatatatacggttgttcaacaaaatcatattcaagtcgatattacgacgaacggcatgtataaagtgatttccaccaatagccagcccatcaccatcccctgaaatctgccaaacagtaatctttggattagccaccttgcagcctgtagaaatagctgccgcacgaccgtgcacagtctgcatggcatatgtattcatgtaataaggcaggcggctggaacatccgatacccgaaataacggcagtatcatgaggagccactcccaattcagccatcgctttgtgcagcgaagccaagaaaaaatggtcaccacaacccggacaccaacgaggttgtccctttttgaaatcttttgctgtatattcgttcatagtctttactttctttacggttattatttatttaaaatctcagtgaaagcatcaactaactcgctgactacgaacggctggccttttacctcattaaactgataaggaacaaatccgtccactttcatacggagatatccggcaaactgaccaagattctgctcagccacgactaccttcttatatttcttcagcacttctgccgtattttgaggcagcgggttcaaatgaacaaaatgtgccaaagcaaccttcttgcctgcatggttcatttcctccattgctgaatataaatgaccgtaagttccaccgaaacccactatcaacaaatctgcatcctctacgcagccttgcaccttaacatcaggcactggaattttagcaatcttctcggcacgcaaacggcacatcaaattatggttttcaggctcggtagaaatagcacctgtatcactgtctttttccaagcctcccaaaatatgcatataaccttcctgtcccggcaatgcccaataacggacacctgtttcagtattacgcttgtaaggagtataattatccttcatttccggagtaacatagggtgggttaatagccggatagtttgccagatcaggcaatttccatgcgccggaaccatttgctacaaaaccatcagtcagcaacaccaccggagtcatgtgttccaaggcaatcttacaagcatcataagcagcatcaaaacaatgagttggagaagctgcggcaatgaccggcataggagattcaccgttacggccaaacaaagcctgcaataaatctgtttgctcagacttagtaggcaaaccagtagaaggaccgccacgctgtacattaataaccaccaatggtaattctgtaataacagccagattcatagcctctgatttcagacaaacacccggccccgaagtagaagtagccgccaacgcacctgcaaacgaggcaccgatagccgtagcgcaacctgaaatttcatcttcacattgaacagtagtcactcccaatgatttatgtttagaaagctcatgtaaaatatctgttgccggagtaatgggataagatcccaagaacaaacgcaggcctgctttctcggcagcagcgatcaagccataagccgtagccttgtttccgctgatatccatatactttccggggactttagacttagtttccaccttataagtatgatccacagacgcatgggtattgtggccataatcatatccggcgtgtatcactttaatattcgcttcagctatttgcggcttctttgcaaatttctcgcgcaaaaaattttcagcaaccgccaggtcacgattaaacaaccagcaaaccaatcccaaagcaaacatattacgacatttcaacattgacttgttgtccatgcctgtatctgccagacagtctttcaccatctgtgaaataggagcagcaattacatcctgcttaatacccatttcttcaatcggactgtctgttttgaaagccgccttgtccagatctgatttctgaaaacaatctgtatcaataatgatacaagctgtggacttcgcaaatttgtattgtgttttcaatgcagcggcattcattgcgaccaatacgtcgcatttgtcaccaggagtaaaaactttacccgcaccaatatgcacctggaaacctgacacaccggtcaacgaaccttgcggggcacgtatatccgccgggtaatcggggaatgtactgatatcatttcccactgtagccgaaatattagaaaagatatttccggccagctgcataccatcgcctgagtcgcctgagaaacggaccaccacttggtccaactccttgactatcatttcatctgccataacttattatttagggttacaaaatttcactgtttgcaaagttcggaaagttctgtcaaaggacaaaatattccgctgtcaaactacgtttgaatatcaaaatgtacaaaattaaaggtttatttatttccaagctaagaaaaagtagagataattacctgtttaaaagcataaatttctatcattatgacagcagcaaaaacgattcatttttacaatttattatttttatccatgttttataaacaacatgaaagttcatagcagaataataacattattagattataaaaaacagacaaaaaacaacaaaacaacaaagaaaggattattttcttcccacttaagacatttttcgatctttcatattgccattttaacaaaaaggagtacctttgtagccataaaagggccttgtagttcaacggatagaatagaagtttcctaaactttagataggggttcgattcccctcggggctacaaaagcagtaaacaattactatacaatcatttactgcttttattttatctagaaattctttagattacttatttaatcaccccaagttctttacccactttaataaatgcagcaattgccttatccaaatgtgccttttcatgaccggcagacaattggacgcggatacgtgcctgccctttcggaacaaccggataatagaaaccagttacatatatgccttcttcctgcatcttggcagcaaaatcctgagacagtttcgcatcataaagcatcacagcacaaatcgcgctctgagttggtttgatgtcaaaaccagcagccagcatcctgtcacggaaataattcacattatccatcaacttagtatgcaaggcatcactttccttcaacatcttaaacatttccaagctagcaccgataatggcaggagctacagaattagagaataaataaggacgtgaacgctggcgcaacatatcaataatttctttcttaccggtggtaaatcctcccattgccccaccaaatgctttccctaatgtaccagtaaaaatatccacacgaccgtatgctttaaattgttcggccacgccatgccctgtaggacctactacaccggccgaatgagattcatccaccattaccaacgcgtcatatttttccgccagttcacaaatcttatccaatggagccacattaccatccatcgagaatacaccatctgtagcaataatgcggtgacgctgtgcctgcgcttcctgcaaacaacgttccaagtcagccatatcagcattagcgtaacgatagcgttttgccttacacaaacgtacaccatctataatagatgcatgattcaacgcatctgaaataatagcgtcttcttctgtaaacagcggttcgaacaaaccaccgttagcatcaaaacaagcagcataaagtatagtatcttctgttttaaaataatcagaaatggcagcttccagctgtttgtgtaaatcctgagtcccacagataaagcgtacggaagacataccgaagccatgtgtatccattgcctctttggcagcattgatcaaacgttggttatctgacaaacctaaataattgttggcacaaaagttcaacacatcttctccgtcattcaccttgatgtctgcacgctgaggtgtggtaatgatacgttcatttttatacaatccggctgccttaatatcagccagttccttcgcaaggaactccttcattttaccatacatagctttgtttttttattaagtatatagtttaagtttaaaaatcagtctgacttgacaaagttcttatttttttttgatatccaattaaattatagagaaaattttgataaaatatgcagttttctatctatctttgcttccaaaaggaaacttaaagcaaatagcaaactatgaaaaatgtattaattatcggctccaccggtcagatcggttcggaactaaccatgaaattgagaagtatttacaatggtaatatcgtagccggatatattcccggtgccgagcctaaaggggaattaaaagaatcaggcccttctgccatcgtagatatcaccaatgaacaacaaattgccgaaactgtatcaaagtacaacatcgacaccatttacaatctggcagccttactctcggctgtagcagaagccaaacctcaactagcatggaaaataggcatgggaggcctgtttaatgtattggaagtagcacgcgaaatgggttgtgccgtatttaccccaagttctatcggtgtcttcggtaacaacacccctaaagacaagactccacaagacactatccgtaatccgcgtaccatgtatggcgttacaaaagtatcaggagaattactgagcgattattaccatatccgttttggtgtagatacccgttccgttcgtttccccggattaatttcgtatgtcacacctccgggtggcgggaccactgattatgctgtagacatctattattcggctgtaaaaggtgaaaaatttgaatgtcctatcgcagccgatacattcatggatatgatgtatatgcctgatggtttacgtgcagccattgaaatcatggaagcgaatcccgacaaactaattcatcgcaattcgttcaacattgcttcaatgagttttgatccggaaattatttataataatataaagaagtatatgcctgacttccatatggagtacaaagtagatccactacgtcaagctatcgccgaatcatggccgaactcactggacgacacttgtgcccgtgaggaatggggatggaaaccggaatatgatctagacagtatgacacaggatatgcttgccaaactaaaagtacgattcaataaataa

SEQ ID NO: 608 - DNA, 5536 bp, unidentified
  source 1..5536: mol_type = unassigned DNA
atgacaaacgggaaacagaggcttacacgcccacgcaccggaagaatgattgccggtgtgtgtgcggggcttgcagacttcttcgggctcgacgtgtccttagtacgtatcctttatgtccttgcaacggtctttaccgtattttcaggtgtcattatatatattatattactgattatcataccagaagaacccaatagattgtatcaaaatgattaaagtaggaatcatcggcggagccggatatacggcaggcgaactgatacgcctgttgctgaaccacccggaagcggaaatcgtattcatcaacagctcgagcaatgccggcaacaaaattaccgacgtacacgaaggactgtacggagaaacggatttagtatttaccgacgtgctgccgttggacgaaatcgatgtgcttttcttctgcaccgcacacggcgataccaggaaattcatggaaagccataatgtgccggaagagctgaaaatcatcgacctctccatggattaccgcatcaagagcgacgaccacgattttatctacgggctgcccgagctgaaccgccgggctacctgcaaggcaaagcatgttgccaaccccggttgtttcgcaacgtgcatccagttggggctgctgccgcttgccaagcacctgatgctgaacggcgacattacggtaaacgccattaccggcagtaccggcgcaggtgtcaagccgggggcgacgagccacttcagttggcgcaacaacaacctgagcgtgtacaaggctttcgagcaccagcatattcccgaaatcaggcagtcgctcaaacagttacagaacagcttcgactcggatatcgacttcataccctaccgtggagacttcccccgcggtatttttgccactatcgtggtaaagaccaaagtcgcgttggaggaaatcgtccgcatgtacgaggaatactatgccaaagattcctttacgcacatcgtggacaagaacatcgacttgaagcaggtggtaaacaccaacaaatgccttatccacctggaaaagcacggtgacaagctgctcgtcatctcttgcatagacaacttgctgaaaggggccagcggccaggccgtacataacatgaatctgatgttcaacctggaagaaaccgtcggcttgcggctaaagccctctgcattctaaataaagaaccgtatggtaaaaaacaatttcgtattatgaaactattcgacgtatatcctcttttcgacatcgatattgtcaaaggaaagggctgccgtgtatgggatgacaagggtacagagtacctcgacctctacggcggccatgcagtaatctctatcgggcatgcgcatccgcattacgtggagatgataagcaagcaagtagccacgctgggattttattccaactcggttatcaacaagctgcaacagcaagtggcggagcggctgggaaaggcctgcggctacgacgattattccctgtttcttatcaacagcggagccgaggccaacgagaacgctctcaaactggcttctttctataacgggcggacgcgcgtggtatctttctcgaaagctttccacggacgtacctcgctggcggtggaggcgacggacaaccccaaaatcatcgctcctatcaatgcctgcggacatgtaacctacctcccgctgaacgatacggaggccatgcaggcagagctggctaaaggcgatgtatgcgcggttatcatcgagggtatccagggggtaggcggcatacaattgccgaccgacgaatttatgcaagccttgcgccaggcctgcaccgaacacgataccgtattgattctggatgaaatccagagcggttacggacgcagcggcaagttcttcgcccaccagtacaacggtatcaaggccgatatcatcacagtggccaaaggtataggcaacggtttcccaatggcgggcgtgcttatcagcccgatgttcacccccgtctacggacagctcggaaccactttcggcggcaatcacctagcttgtagcgcagcgctcgccgtactggatgttatcgggcaggaagggctcgtggcgaatgccgccacggtaggcgcgtacctgctggatgaattgaggcagttcccgcaaatcaaggaagtgcgcggacgcggcctgatgattggactcgaattcgaggagcccgtcaaggagctacgttcgaagttgctgaaagagcagcatgtgttcaccggtgtgagcggtacgaatgtgctccgcctgctgccgccgctatgtctcggcatggacgaagccggcatgttcctggagcgttttaagaaagtactttgatatttgaaagataatcagccggcaaaagagacgaccgaaagaagaataccttcctgtttcggtcgttttttatagaaattctttacctttgcccgaagacaacgtttttaaaaggaaaatgatatgaaaacagcaattatcggtgcaggaaatatgggcggctctatcgcccgcggcctggccaaaggtactatcataccggccggcgacatcgtcgtttctaatcccacgcagggcaaactggatgcgttgaaagcagagtttcccgccctgcaaaccacccgcgacaaccaggaggccgttaccggagccgacctcatcatacttgccgtcaagccgtggctcatcaagagtgtgctgcgcgagctgaagctgaaaagcaggcaaatcattatctcggtagccgccggcatcactttcgaggagctggcgcattatgtagccgaaccggaaatgactatgttccgcctcatccccaacacggctatcagcgaaatggaaagcatgacgctcatcgcaagccgtaatgccgacaaggaacaggaacggttgctgctcgacattttcaaccaaatgggtcttgccatgctgattcccgaggagaaaatagctgcggccaccgccatgacttcctgcggcattgcctatgtgctgaaatatatccaggcggccatgcaggctggtatcgaaatgggtatttatcccaaagacggcatgcgcatggtagcccagtcggtaaaaggcgctgccgagctcatattgaacaacgatacgcaccccagtgcggaaatagacaaggtgtgtacccccggcggcatcactatcaaaggtatcaacgagctggagcaccggggattttcctccgccgttatcaacgccataaaagcaagcaaataacccaacccaccacttaataataattccatggacgaacaaatcaaacaaatagccgaacgcctgcgcggattgcgcgaggtactggaactgactaccgaggatattgcccgcgattgcgacatctcggcagaggaataccgtcttgcagagaccggagaattcgacatctccgtgagcatgttacagaaaatagcccgtcgctacggcattgcgctggatgccctgatgttcggcgaggagccgaagatgagcagttacttcctgacccgtgctggaaaaggaaccagcatcgagcgtaccaaggcctataaataccagtcgctggccgccggcttcatgaaccgcaatgccgacccgttcatcgtgaccgtagagcccaagcccgacagcgagccgatacattacaacagccattcgggacaggagttcaaccttgtactggaaggacgtatgatgctgagcatcgacggcaaagatttgattttaaacgaaggagacagtttgtatttcaactccaagctgccgcacggcatgaaagcgctggacggaaagaaagtgcgtttcctcgccgtaatcatgtgataaggtgatagcatttccttatgctgacacattaccacgctgacccattatcacttttttaattatggtagaaagatttttatcgcagacgtccttcacatctcaagaggactttatcaagaatttaaagattaacgtaccggagaacttcaacttcggctacgatgtagtagatgcctgggctgccgagcaacccgacaaacccgctttgctctggaccaacgacaagggcgaacagatacagttctcatttgccgacatgaaacgctatacggacatgacggcctcttatttccaaagcctcggcatcgggcacggcgacatggtgatgctgattctgaaacgccgttacgagttctggttcagcatcatcgcgctgcacaagctgggcgctgtcgttattcccgccacgcacctgcttaccaagaaggatatcgtatatcgttgcaatgctgcggacatcaagatgattgtctgtgccggcgagcctgtcatcaccgaccacgtcaccgccgccatgccggagtctccgagtgtggagaagctggtcagcgtcggtccggaggtagccgaagggttcgaggactttcacaaaggcatagccggcgccactcctttcgcaaggccggagcatgccaacagcaacgacgacatctcgctgatgtacttcaccagcggcactaccggcgagcccaaaatggtagcccacgacttcacctacccgctggggcatatcgttaccggaagtttctggcacaacctgcacgaaaacagcctgcacctcaccattgccgataccggttggggcaaggccgtatggggcaagctctacggacagtggatagcgggcgccaatatcttcgtgtacgaccatgagaagtttacgcctgccgatatcctgacgaagatacaggactatcgtgttacctcgctctgcgccccgcccactatcttccggttcctgattcacgaggacttgacaaagtacgacctttcttcgcttcaatactgcaccattgccggcgaagcgctgaaccctgccgtgttcgacactttcaagaagctcaccggcatcaagcttatggagggcttcggccagacggaaacgacccttaccgtagctaccatgccctggatgcagcccaagccgggcagcatgggactgcccaacccgcaatacgacgtagacctgatagaccatgacggccgttccgtagaagccggtgagcaggggcagattgtaatccgtacggacaagggcaagccgctcggcttgttcaaggaatattaccgcgatgccaaccgtacccgcgaggcatggcacgacaatatctattataccggtgatgttgcctggaaagacgaggacggctacctgtggttcgtaggacgtgccgacgacgttatcaagagcagcggctaccgcatcggcccgttcgaggtggaaagtgccctgatgacgcatccggcggttatagaatgtgctatcaccggagttcccgacgaaatccgcggacaagtggtgaaggctactatcgtgctgtccaaggagtacaagaaccgtgccggcgaggagttggtcaaggagttgcagaaccatgtgaagaaggtgaccgctccttacaaatatccgcgcgtcatagaattcgtagacgagcttcccaagactatcagcggtaaaatccgccgtgtggaaatccggaagaacgacgagaaataa

SEQ ID NO: 609 - DNA, 28280 bp, unidentified
  source 1..28280: mol_type = unassigned DNA
  misc_difference 7437: note = a, c, g, or t
  misc_difference 7438: note = a, c, g, or t
  misc_difference 7439: note = a, c, g, or t
  misc_difference 7440: note = a, c, g, or t
  misc_difference 7441: note = a, c, g, or t
  misc_difference 7442: note = a, c, g, or t
  misc_difference 7443: note = a, c, g, or t
  misc_difference 7444: note = a, c, g, or t
  misc_difference 7445: note = a, c, g, or t
  misc_difference 7446: note = a, c, g, or t
ttaattattaagccttgatagtgtcatataattggagatttctttgtaaaactcattatatgcactgttaaaatccactccgtcccataactggtgaagcataatctcatattttgtatatatgttgcctacgcctacatatttggcttttacgatgctgttagcatatattgtgtgcagtgtattgtaattgctctgctgggtctttgatttatagcttatgtctgcccttgcactcatatgtccgctaagactttccaaatcctctgcatagtcatatgatattgcccttgctactgccttggataccgcaatatttgatgtgtatggatttactatcgccatcgtagtaactgacattgcctttgactctaaatcatctgcaagctttggaactggaattattccatattcaacacctgtagcatcaattgttgaaaggctgtcggcatcaactattgtatatataagctttccctctgcaaactgtgatacacacgactgcaatgatgaattatatctatcaatcgcataagtgtcctttaacttcacatattcagttaaagcctttttaaaatgcacctcatctattgcaaatgctcctgaatcctcagcattattgccgcctatattaacgtatcttcctgtaaatgtataattaagaaacattgatgatgcatcaaagttaaatatcctctgaacacttttattatcttctgtaacttcgtagttatcattatattcttttatctcatcaaatgtatcaactgcacctgcaagcttactgttatacaccataaccggcatattaaatgtaaccggatagccatataacttttcattatatgagcttgctataagggcagcctgtccatatactttatcattgtatacatccttgtaagaatcattttcaagcataagacctaaaagatatgccttattgcaattctctgatgacataagatacacatctggcacattatcatttcttacagtttcattgtaaattgtatcaacaaaatctgatgactcaacatataccggattgacagtaaccagattgttagcctctttaaattctttcgctacattttcaagatagctgtcatagtccttattatcataccagacattaactgttacaggagtctctatatcaagttcccttgctgtcttattcttatctgtacctgaacatgccatcacagataaagtaagaacacctgccataagaactgacacaagcttcttaattactttcattattcatccaacctttattaaaatgatttctttaactttgttatcatttcatctacgtccgccttagttataacaagaggtggcaccattctgataacattagttccggctgagaacagtataagtccattgtctaatgcattagcaataacatctttaggattgattgaaagttcaagtccctgcataagtccaagtcctctcctctcaattataaaatcatattctgctacaagttcatcaagcttttcttcaagatatgctgatacttccttgacattatccaatatatgctgtttctcaaataattcaaatacttttgttgctgctgcacacgcaagtggattaccgccataagttgtaccgtgatctcctggtacaagtgccttggcaacttcttccttggcaagaaatgcacctactggaacaccacagccaagtgccttggcaacagtaagaatatcaggctcaactccatactgctggaatgcaaacattgtacctgttcttcccattccacactgtatttcatcaagtataagaagaatacccttttcatcgcaaagctgtcttacacccttgatgaattcgttagttgcaggatatattcctccctcaccctgtactgtttcaaatataatagcacaagttttatcatttaccaactgtttaacactttcaaggtcattataattagcaaatttaattcccggaatcataggtccgaacgcttcctgataatgcttattgcctgttacagctaatgctcccatacttctgccatggaaggaatgatgcattgctataatctctgaatcagttcttcctgtctttaaataagcgtatttctttgcaagctttatagcaccctctattgattctgtaccactgttagtaaagaataccctgtccattccagaagcctttgtaagtgctttagcagcatttaccgctggctcattatagaaataattagatgtatgtataagcttgtcaatctgtgcctttaacgcatcattatattccttgttattataacctaatgcaaataccgcaatacctgcaccaaaatcaagatactcttttccgtctgtatcatataatcttacaccatcacctttatcaagtacaatctggtatctgttatatgtatgtattaacttttcttctgctgttttaataatctgttctgtctgcataactactcctgttattatatattagtatcgaagaatttctcagcaccttctgataatatagctgtaccaacacccttgttagtaaatatttcaagaaggaggcagtgtggaatacgaccgtcaagtatatgcactcttgaaacaccatgttcaatcgcatcaatacagttattaagcttaggtaacataccaccacctattgtaccacctgctaataattcccttgcctcagttgttgaaagttctgagataaggcttgatttatcattataatccttgtatacaccttcaatatctgttaagaatgcaagcttctctgcattaactgcccttgcaatggcacaagctgcatcatcagcattaatattgtaagcgtggaaattgtcatcatatcctatagggcatattactggaagaaaatcatccttaagaagagaatgtataagtgttgtatcaacttccttgacttcacctacatatcctatatcttcaccctttgaatacttcttctctacctttaacataccgccatctttaccacttataccacacgcctttacgccaagttcctctataagcgatacaaggcttttattaaccttgttaagaaccatctcagcaatttccatagttggctcgtctgtaactcttaaaccattcttaaattctggtgtcattccagacttttcaacccatttgctgatttccttgccgccgccgtgtacaataattggcttaaatccaacaacctttaataatactacgtcctgaataacttttcttttaagttcttcatcaaccattgcacttccaccatattttacaactataatctttctgttgaacttctgtatatatgggagtgcttcaacaagcacctgtgccttctttaactcttcttccatattaattgtactcatttattatcctcattcctgacaatattacaatgccattttattcttaactattatgatctgtaatccgcattaatctttatgtaatcaaatgtaaggtcacagccccacgctgtagcttcactgttaccctgcttaatatctgctattgcggttacaggattttgtgaaagaatttcagttgccttttcttcgctgtaatctgttgcagtaccatctttaactatctgaagctttcctgcgttgctttcaaagaatatatcaaccttctccggctcgaaatcaacgcctgaataacccatagcacaaagaattcttccccagttagcatcgtgtccaaatattgccgcctttgtaagattagaagtcactattgatttggcaagaattcttgcctgttccttagttgaagctcccttaacctgaacttcaaaaagacatgtacagccttcaccatctcctgctattttcttagaaagctctgtaagtacataagataatgcctcataaaatgtatcataatcactgctgccttccttaatagtatcattgcctgcttcgccattagcaagaacaagcactgtatcattagttgatgtatctccgtcaacagatatcatattaaatgaatcttcaacaatatcacttgtcatcttctgaagtgctttcttctctataactgcatcagttgtaataaaacagagcattgtagccatatgaggatgaatcataccggcacccttgcacataccgcctaccgttacttctttgccagcaatatttactgtgcaggcaacctgcttgcttacagtatcagttgtcataattgcctctgcggcaagtgttccagcctctttagtataatcaagaagttccggaagtgccttaattcctgcacacattctatccataggaagctgcattccaataacacctgttgaaccaagaagcactgcatcagctggaattccaagtgcctctccagctgtcttagcttcaagtgcacaggcttcatcaccctcaacaccagtacaggcattagcaacaccactgttgactacaattgcctgtgcataagcttcattgtatacaatattcttatcccatttaacaggagcggcaaatactctgttaagagtaaatgtccctgctgtcacgcaaggcttgtctgaaacaaccattgccatatctttcttaccattcttatacttaattcctgccgccataccagctgccttaaatcccttggctgctgtaactccaccttctataatctgcataactgcctcctgtccagattaataaccgcttgttattaaattacctatataataattatctatcaggattattacttaccaataacgtcttattaatcttatatgaataaaatatttatagtgccgcctgtattatataattctatggaaacataggtgcaatcttaagtccttcattctcctcaaaaccgaataaaagattcatattctgtactgcctgaccagccgcacccttaacaaggttatctaatgcacccatagcaataattctgttagttcttggctctatcttaaatcctatatctacaaagttacttccctcaacccatcttgtctctgggcatacatccttaggaagaactcttacaaaatattccttgtcataatatttatcatatgccgccttaacatcttcataagttacatcctttgcaagattagcatatgctgtcacaagtattcctctgttcattggaactaaatgtggtgtaaatataagctttaaatcatctcttccacaagcatatccaagctgttcttctatctctggtgtgtgtctgtgtgtaccaacaccatatgctttcatactctcattaacttcacagaaaagattagcaacctttgcacccctgcctgcaccgcttgttccgctcttagcatcaatgattattgtatctggattaataattccttcttttacaagtggatataatgtaagaattgatgttgtagtgtaacatcccgggttagcaataattcttgtattattattcactttatccctgttaatctcacataaaccatagactgcttcatcaatatattgtggtgacttatgttcaagcttataccatttctcatatatatctacattctttaatctaaagtctgcactaaggtctattatctttacctttgataaaatctcatcgttaacaagtgatgcacataagccctgtggtgttgctgtaaatattacatcaacctcatctgcaagctgttccatattatcatccatacatctggcatctacaagtttaaacatatttctgtatacatctgaatatttctgatctatatagcttcgtgaaccaagccatacaatctctacatccttatgtccaagaagaagtcttactaattcgttacctgcatatccggtagctccgataattccaaccttaaccatacgtcctccatctgaatgtttatttattcattcgtgtacatatattattcatcaataaaaatgacaagttccattataacaacttttttttctatgtaaagtgtttattcattattttttatatttatgcaatgttcttgcataaagttgcataatatacatttttacctattgcattttcataataagtagtttattataatcagcagagttttacactttgtaatagcattatttactacataatatttattacataattaaacctattacttaattatatggaggtacattaataatgaaagagaaagttgttcttgcttattcaggtggtcttgatactacagcaatcattccttggttaaaggaaactttcgactatgatgttatctgtgtatgtgcagattgcggtcaggaagaggaattagacggacttgaagaaagagctttatcttgtggagctgccaagttatatatcgaagacatcacagatgaattctgcgataactacatcgttccatgtgtacaggctcacgcagtttatgaaaataaatatttacttggtacatcaatggcaagacctatcattgccaaaagacttgttgaaattgcccgtaaagaaggtgctgttgctatctgccatggtgctacaggtaagggtaatgaccagatcagatttgagcttacaatcaaggctttagctccagatatccagattatcgctccttggagagattcaagatggacattacagtctcgtgaagatgaaatcgaatattgcagacagcacggtattcaccttccattcagccctgactcaagctacagccgtgaccgtaacatctggcatataagccacgaaggtcttgagcttgaagatccagctaatgagcctaactataagcaccttcttgttcttggatgcacaccagaagaagctccagatgaaggcgaatatgtaacaatgacatttgaaaagggtgttcctacatctgttaacggcaagaagatgaaggtttctgatatcatcagagaacttaacagacttggcggcaagcacggcattggtataattgatatcgttgagaaccgtgttgttggtatgaagtcacgtggtgtatatgaaacacctggtggaactattctttacgaagctcatcagcagcttgaagaattagttcttgacagggatacaacagcagagaagattaatgttgctaacaagttcgctcaggttgtatacgaaggaaagtgggaaacacctcttcgtgaagcacttcaggcatttgtcgaaaagacacaggaatacgtaactggtgaagttaagttcaagctttacaagggcaacatcatcaaagccggaacaacatctccatattcattatataacgaatctatcgcttcattcacaactggagacctttatgaccaccatgatgctgatggtttcatcaacctctttggtctttcacttaaggtaagagctatgaagaagcttgagaacgaaaagaagaataacaaataatactttaaaaaatattatataacaagtattataaaacaaaatcaggagctgccacatatannnnnnnnnnatttttcatcttttataatgttttatgagtttttataagctcttataaactctaataaactcttatcaaacattaatctcagatatttctatattctttttctcctgtttttcacaaccattccatatatcaaagtaataacataagaagctgctgccagtatacacataacacccataaccctataagcaatctgagtatctataaacacagttcttcctagatatctgttacttacagccgccatacatctgtttccaattatatttgcaataaaaatatatataccacctgttatgacaaatatacatgggagtgtgtaccttacaaccctgacaggattaaatgcaatgataacaatcaataatgtgatatatattaaaagcatcaatatcttaaacacaacagacgttattattccatatacctttataagcggctgcagacgataagatatatcaccatatataccactggcataattatttatagcctcatttgcagcatttttactatagctaagagctgccctgactattgtttcctgtatatttcccatattgatattagatgctattttgttatatgtcatatccataagctcatccagctctgcatctatattaatctctatatcatcaaaggatttttctttaagcatcccgtcaaccatagccgttgtatatttctgtgctattctgtctactatcttagaatcctctatacttgtctgaattctggataacgcctccatattatccccaagtgaatcaaaaacagtatccataaaacggtgcgatatagcagctgacagtcctgcatcctttaacatgcttgagacatacataggtgccgttacacatacaataagtataagacctgctattacagatattaaaccaacacctatctgtgtccatctatgagcagtatccctgtattgtctgtatccatatgacatatatattccttctttctgtttagatataacaattccgtaatcttcctacgcaatcacattaaaacaatcacattaacataatcatattaacacaattatattaatacaaccataaaaaaatgtaatagatttagtgctttcttacattttcctgaatctgttataccgctgtcttgcaagttcttccttgtccatatcaatatatctgtacataaaatcacatatcatgcgtttcatatataatgtcactctttttatattattttcatttataaccggatattccggaatgaccttctctattatgccaagctcatataaatctgctgccgtcagcttcattatttccgcagcctcttttgctttcttagaatccttccacagtatcgatgcaaagccttctggtgaaagtattgaatatatggaattctccatcatccatacctcattggcaacacctagtgcaagtgcaccaccgcttccaccttcgccagttactattgacaataccggaactgtaagactgctcatttcatacagattctttgctatagcttctccctggcctcgctcttctgcaccaagaccgcaatatgctcctggagtgtctataaaacatataaccggtctgttaaatttttcagcctgcttcataagccttagtgcctttctatacccttcgggattaggcattccaaagtttcttgatatattctctttagtagtcttacccttcatatgtcctatgactgttacaggaatgccgccaaatgttgcgattccacctattattgctttatcatcacaaaagtttctgtcaccatgaagttcaaaaaaatctttagttattttttctatgtaatctgcggcattaggtctttcactgcttcttgctatttcaaccttttcccatacatcatactcattatacagattattatcagcctcagcctttttttcttcttctctatctatctttttgaaatatatattatcaagatactcaagatacttcttcataatatctgaattgctccggtatgtatccacattttctttaacttctgtataagctccactgtacttatgtatgtcaagcagatgcgcaagtgtcttctttagctcatcccttttaactatcgcatccacaaagccgtgctctaacagaaattcagctctctgaaacccttctggcagttcctgtcctatagtctgtctgataactcttggtcctgcaaaacctataagggcacctggctctgcaagtataatatctccaagcatagcaaagcttgcagttacacctccagttgtagggtcagtaagaacagtgatatataaaagtcctgcctcatcatgtttttttaatgcggcacttatctttgccatctgcataagagatactattccctcctgcatcctggctccgcctgagcatgtaaatataataaccggcagcttctgctctgtagccttctcaactgcccgtgtaagcttttcacctacaacttcgcccatgctgcccataagaaatcttgtatcacagacacctataacagctttgctgccatctatctttccaacaccggttattactgcctcatcaagatttgtttttcttttaagattctggattttctcctcataacctgggtattcacatggattgctctcttcaatgttagtatcccattctgaaaatgtattcttatccactaccatggatatccttgttctggcatccagcttcatataatatccacattccggacatacacaattattcagatacatgtcctctgttaaaattatttttgaacaaaccggacatttcgtatataatccatctggaacatttatattactgctatccagattgttgattttatttttatggatattctttttaaacaagccttttatctgcatataaatcctcatttccacgcactcttactgtgcataacgaacaactattttttacatacctgtggatactcctctggtatgaaatctgtactgacatcacctttaataaacttctcattctggcatatatcatacataaaatctgtatttgttgtgacaccttcaataataatctcgccaaggacacttctcatcttctcaatcactgttttcctgtcgtttgcatatgtcataaccttcattatcatggaatcataaaaaggaggtatcgtatatccactataaactgcagtatctattcttacaccattaccacctggtatatgtatattctttattgttcccggattaggtgcaaagttcttttcagggttttcagcattgattcttatttccatggcagcaccatgtatccttacatcctcctgcttaataccaagactttcgccggctgctatctttatctgttcctttataagatcaacacctgtcacaagttccgttataccatgctcgacctgaatacgggtatttacctccataaagtaataattgtcgtttttgtcaagaagaaactcaactgttcctgcattttcatagttaactgccttagccactgccactgcagtatctcccattctctttcttaattcatcattcaacgcaggagagggtgattcctcaactaacttctggtgatttctttgtattgaacaatctctttcaccaagatgaattgtatttccatatttatcagctaatatctggaactctatatgtcttggcttttctatatatttttctatatacattgtgccatcagcaaagccattcacagcttctctctgtgcgttatcgaattcccttttaaaatcttcttttgtatatacaacacgcatccccttgccaccgccgccaagtgcagctttaaccataacaggataacctatattgtctgcaagctcttttcctctttctgcatccataactggttctttggttcctggaataactggaatacctgctgatatcattgtatttcttgcttcctgtttattacctgttttctctatgatatctgaatctggacctataaatgtgatgttacatttttcacataatgatgcaaacttactgttttcagaaagaaatccaaagcctggatgtattgcatctgcatgtgtagctactgttgcactcaatattctttccatattaaggtaactatccttagctgctgcctttcctatacatacactctcatcagccagctgcgtatgaagtgcttccttatccgcctcagaatatactgcaactgtctgtatacccatttccctacaggctcttattattctaacagctatttcgcctctgttcgctatcaatatcttattaaacacagcttcatctccttataatcattccataatccacatattatatttataacatcagacggattaacctaccataaatgtaagctctgctgtaagtgcaacctcgccatctaccgtcgcaacagcctttcccacgccaactggtccttttttctttataatctcacattccatcttaagtttatcaccaggaactacttttcttttaaatcttgcattattaactgcaccaaaatatgctgttttacctttgttttcttccagcgaaagtatcgcaacagcgcctacctgtgcgcatgcctctatctgaaggacccccggcataacaggctcagctggaaaatgtcctgcaaaataaggctcatcatatgtaatacacttatatcctgttgcctttattccaggctcaagttcatctatcgtatccacaagcagaaaaggatgtctgtgtggtataatatccattatttcctttgttgtaagcatacttaactccttatattaaataatcgaatttcatatatataatgtcggtatcaaaaacccatgcctttgataccgacgtattgtcagactggttttataacaaacataggctgtccatattcaaccatctgttcattatctacaagaatatcagtaaccacaccatcataatcactttcaatctcattcataagcttcattgcttctactataccgattacctgaccttttttaaccctgtcacctattgctacatatgcatcagcttccggagatgctgaactgtaaaatacacctacaagtggtgaattaacagtaagcacattatcatcagaagttttaatgtccgatttattcaatcctgattcattgccgttatcgctattaactatatcatcagcaccggcagtttctttaacagctgccctgtcacttctgtcagcgccaagcgaaagcttagtgtcgccatcttccatgctaaagcttgtaagtgaagattctgatacagcattaatgagctttattacattttctaattccatatattatctccatttcttcatgaccttttattcatattctggtattccatatatctcaccagcaatctacttatgtactttaagcgttcatcatattatgaatactttcttactataagagttgcattatgtccaccaaaaccaagagaattcgtcatgactacatcaacgtccttttcgattccttcatccttgacataattaagatccatttcttcctctgtttctgatagtcctacatttggatgtatataaccatcctggattgacttgacacaggctatgaactcaactgcgcccgctgcaccaagcagatgtccaaccatggattttgttgaacttacaggcacattgtaagctgcatccttaagtgccagcttgatcgcccttgtctcaaaaagatcattatgatgggtacttgttccatgtgcatttatataatcgatatcatctggttttacttctgcttccttcatggcacttgtcatagcatatgcagctccacttccatcctccataggtgatgttatatggtatgcatcagaagaacagccatagcctgtgatctctgcatatatatgcgctcctctctttaaagcatgctccagttcttcaagtacaaccacacctgctccttcacccatgacaaagccatttctttctttgtcaaatgggatagaggctctcttagggtctgtagatgttgaaagtgctgtaagcgcagcaaaaccaccgattccaataggagatatagaactttcagttccacctgcaaacataacatctgcttctccatgctgtatgcttctatagccttcacctatagagttagttccagtagcacatgctgtaacaacatttatattcttaccctttaaacctagctgtattgatacattgccagctgccatgttagttatcataagaggtacaagaagcggattaatcctagatggacccttttcaagaagcttcttgtgattgctttccatagcttcaaggcttccaacaccagagcctactgatacaccaacacggaaagcatcctctttagccatatcaagccccgaatccttcatagcctcatgcgcggccgcaacagcatactggctgaacttttccatccttttggctgccttgaaatccatataattcttagcatcaaaatcctttacctctgctgcaagcttaaccttataatctgttgtatcaaatcttgttatattatctattccaactgtattctctttaacagaattccagaattcatccacacttaaacctataggtgttattgcacccatacctgtaacaactactcttctcatcagatattcatacctccatctactgatatcacctgtcctgttatgtatgctgcttcatctgatgccagaaatgctacagcattgcttatatcatccacgcttcccattcttgaaagaggaatcatatcaagtactgacttcttctgttcatcagataaaacctttgtcatatctgtatcaatatatccaggtgcaactgcattaacagttattcctcgcgatgcaagctcctttgccgcagatttggtaatacctatcacacctgctttagaagcactgtaattaacctgtcctgcattaccagctatgcctacaactgatgacatattgattattcttccgcttctttgctttaacatgtatctgcttacgtgtcttatgcagttaaatgttcccttaagattaacatctataactctgtcaaaatcttcctctttcattctcatgataagaccatcttttgttatacctgcattatttataagaatgtctattctcttatatttatccattatatatgtaatcattttttcagtttcttcatacgaatcaacctgacacttgtatttttctgcctttccgttggcagccagaatattttcaactgttctatctgctgcctcatcattaccactgtaattaacaataaccacagccccctctttggcaaaacgggcagctatagcagctcctattcctctgctagctccggttacaagcactatcttgttttcatatctttttatacaattatccatacacataacacactgcctttcatcgatacaatattgctaaagccttaccaatatcttgtctgcatttattgcctgttattttataactacttccttttccatgctcttagctatctttttaacaaagccagataaagtctttcctagtcccacctcaacaaatgtatcataaccatcggctatcatttttctgactgactgttcaaaacgtactgaactatatacctgctttgaaagaagttcttttatatatccactggatgtattctcatccacatactcagctgtacagtttgccacataaggatacttcactttatcaaaagtaactttttcaagatccttcataagcttatcacctgcgcccttaagaagctttgaatgaaacggtccacttacattaagaaggagtgttcttcttgctcctgcttccttaagcacttccatagcctcctgtacacattcctttttacctgatattactatctggccagggcagttgtaattagctgcggaaactgtatcaggatacatatcattatcagactctgtgttcccacttttatccttgttatatttagcaagtacactgtcaacctcatctgatgtaagcccgataactgcagccatggcgcctataccagccggaacctcctgttccatatatattccacggtttcttacaagtcttacaccatcttcataagatagcgcaccacttgcagtaagtgcactatattcacctaatgaaagtccaatagctgcatcatacgtaaggccctgctcaaccatatcagcaagctgggcgatttctgttacatataacgcaatctgtgtatactcggttttatcaagaagatcattttcttcaaatattaaatgctccatattgatacctgtcagttcaccagccttcttaaagcactttactgatgaagtgcagctattatagctttctcttcccattccagtacgctggcttccctgtcctggaaacattacaactgtttttcccataccttttaaatcctcatttccatacactgttttatgccagcttattatgtgaattatatacctcagagacttccttcataagctccttaataatctcttcacatgtctgttccttattaacaagacctgctatctgacctgccattacagttccctgcttgacatcaccatccacaacagcctttcttagtgttccaagagtaagtctttcaagcttttcaaactcaacgccttctttttccatatcaagatactctcttgtcatgctgtttctaagtgaccttactggatgacctgtacttctgccagttactactgaatctatatccttggcagctataactctgtccttataattctgatggacatttgactccttagccacaacgaatcttgttcccatctgtacagcctctgcaccaagcataaatgccgcacatacacctctgccatcacctattccgccagctgctataacaggaatattaactgcatcaacaacctgtggtacaagtgtcatggtcgtttcctcgccgatatgtccacctgattccatgccctctgctacaactgcatctgctccggcacgttccatcattcttgcaagtgcaactgatgccacaacaggaataacccttattccagcttccttccaggtcttcatatatttgcttggattgcctgcacctgttgttactgcttctatatgctcatcaataacaagctgtgctatctcatctgcataatcacttaaaagcataatattaacaccaactggcttatctgttatctttcttgcaatatgtatctgttctttaacccattctgccggcgcattagctgctccaataaatcccattccaccggctttgctgacgtgggctgccagattagcatctgcaacccatgccataccgccctgtataacaggatattctatattaagaagctctgttacacgagttttcataacttatcttccttcctgacatttataactatttctggttagcctcgatataatcaacaacatcctgtactgtaagaatcttttcaagctcctcagatggaatagttactgaacactcatcctcaagtgacataacaagttcaaaaagatcaagtgaatctgccttaagatcttccttgaaattagactcaggcttaataactgcctcatctatacctaactgtgctgcaactaattctcttactttttcaaacataatgttaaatctccttaattcttattattttttattatatgttgtcggggtcaaaagcccacaactttgatatctatggcaaagcttttgccataaacatcttatatatgttaaaatgccgcttatccggctgcctgatatcttttagtaagcagtctgcaaatatctatataataagcttagcatctttaaccgtgctaccatacaagcagaatacttccccagcttaatcctgcaccaaaaccggcaagtacaagcttctctccctgttttaagcttccattcctgtttaactcatcaagcagaataggaatgcttgctgatgatgtatttccatattcattcagattgactggaaacttatctttatcagccttaagtcttttagctacactctctataatacgtacattagcctgatgcaatatgaacttatcaacttcattaatatccatattattattatgtaaaagtgtttctatagctgtaggaacactctttacggcgaatttaaacacttcctgtccatccatatgtataaatatatctgtgctgcatgaatcagaaaatcttctgccacctgttaaaacagatgcacctgttccatcattgtagatattgctgtcaataattcctctttcatgaccaactaaggcacctgtaacatcttctgtgttgttatcaactgctttaagaaccactgcaccagcaccatctccaaaaagcacacacacacttctgtctttccagttaactatttctgacattttttctgaaccaataacaagtgcatatttatacgaacctgcctttaacattgaagctgcaatatccagggctgtaataaaacctgaacatgctgcacttacatcaaaacacatagcatttactgctttaagctttgcctgtacaagtgatgcctgattaggaaaagcataatcaggagttgacgttgcaactataatcagaccaatcttagaagcttcaatacgtgcatcctctactgcatttcttgcagcgttatatgccatatcagcattatccatatcttttgctatatgtctgttacatataccagttcttgtccttatccactcatcactcgtatctaccatttctgacagattatcgttagtcaatatatctggtggaacatagcttcctgttcctatgattcttgttcttatcatacttttttgtccttatttatttgacttactaacaatttgattatcttactttgattttcaaacattatttttatactacaaaacttatgtgtttgtcaaggttattttgatattcaaattattaaaatatactaaagcaataaaaaaagacctgaaacagattattacatctgcttcagatcctttttaacttttagtttaacttctttatccggcgtgagcgattcacatatctttcgtaccgccttctgatatgacaacttatctaactttaagcagtcggtatctgtaagatattcccacgttctttttggaaatgtaacaaaacattccgcaagaagccagcctgctgccatctgtgtataatatccataggccgaaaaatccctgtttacaagtgaaaatatatcatcaagatataaaccattagcacaatttatttcatctgtgctttctatatctttaatagtaacctttttcattctcggtcttttcatgccatgcatatcaacctttaaatagtggtctaacagcattataagccctactcttgccctgtattcatcaaacgattctatacattcctttatgtatggcagaaactcgtcccgaaacatatccataaccctgaattctacacagaagctgtcgtttacagcccagttgttcacaagaggaacgaatgtgttgaagtcttttaaagccttcttaaagtctttctccttcgctgttcccattcctattatgtagcttctaagcagtgtttcttcctgataaatatccggttcactaagcagctgccggaaatccttattctcctttatcagctgttttgcatattgctttaataccggttgtcttattcctattatattatcgcagccaggaataagtgaggatgtaaatgctgcatattctcctttatcagtcatccccagaagttcatttcttatatattccagcattattcataaagaggatacttatctgtaagctccttaaccattgccatagccttagcctgattagcatcaacatcatcaacaagtaatgcaatagcttctgctactacatccatatcttctgtattgaagcctctggttgtaactgcggctgtaccaagtctgataccacttgttacgaaaggtgaagctggatcgttaggaatagtattcttgttacaagtaatgttagctgcatcaagaagcttttctacttccttaccagtcttattcttgcttaaaagattaacaagcataaggtgattatctgtaccaccagatacgatatcaaatcctctgttcataagacctgagcaaagagcctgtgcattgtcaacaatattcttagcataagtcttaaagcttgggtcaagggcttcctttaagcatactgccttaccagcaataacatgcataagtggacctccctggattcctgggaatacagccttgttaaacttaaacttttcagcagcttctgctgatgaaagaatcataccacctcttggtcctcttaatgttttatgagttgtagttgtaactacatcagcataagggatagggcttggatgctctccacctgctacaagaccagcaatatgagccatatctaccataagataagcaccaacttcatcagctatctctctgaacttcttaaaatcaataactcttgcatatgcagatgcaccagcaatgatcatctttggcttacattccttagcaattcttaatacttcatcataatctataaagccttcagctgtaactccataaggaactatattaaaatatttaccagagatattaactggtgaaccatgtgaaaggtgtccaccacagtcaaggctcatacccataacagtatcacctggttctaccatagcaaagaatgctgcaaggttagcctgtgcacctgaatgtggctgaacattggcatattcacaaccaaataacttcttagctctctcaattgcaagtgtttcaacaacatctacatattcgcagccaccataatatctctttccaggatatccttctgcatacttgttagtaagagggcttcccatagctgccataacagctttacttacaaggttctcagaagctattaattcaatatggcttctctgtcttgctaactcatcatccatagctttagctaattctggatcatagttcaatacttcatcaaatgaatacatattacaacctccattttctatagttgtagttatacaacctgtttgactattaattttatagattatttatcaataagtcaatgtataattatacatttgtacaataattaagttatttaatacaatcttcattagaatatccgccttagaaagttatataagccattattccatacacctgcctcgtgtccgccgtgtctgtaatagaatatatggtcaattgaatgttctgtcatatatcttgaataattctctgatgataccctgcaatatggatcttcatcacctgttactataagtgtaagaagtggtgcttccccgctttccttaacaagctcaggaagaagatatcccctgttgccatataatgtttcaccgcttcctgtattaacaactcctccaacaggctcaaatgcacctacatacccaaatatatcagggtgtgcaaagcataaataaagagcttcccgtccacctaatgaatatcccgcaattcctgtgtattccctgcctatcttagttgaataatgcgaattaatatatggaataagagcattaatcacatcattttcacaggcatcatatcttgcagttaaatctgaaaatccataatcagattcctgctttctgtcaacatctgtaaatacagtaaagcttactaatatcatatcgttgcggttgtattcatacacaatattctgtgctgttggtcttgcaccaagaaccctgtaatcttcatatgttccactcattccgtgaagaagatatactacaggatagcttttactcttatcatatccatatggaagatacacattggcatttcttgtagcattagtagttggagaataatattctatcttctcaatctcaccataattgccgccaagatgttctgaattaaacgcttctggttcttcataattagtatcattcttatcataagagaacaacattaccggataatcgtgattaactccagcttcgtctattgtactattattttcattaacactgtcaccattagtatttttgttaccactactgccattattattgtctacgctgttactactgcttacaatgcttgcattattagaagctgtattcttactaccagtactattgccacaacctgttaacaacaggcttgctgataatgcaaatgccattataagtgcctctgtttttctaatattatttcttctcataattaatcacctcatataattattaattaaacctgattattaactctacattttgataatagcatttagagttaacttcaagtcaagcataaaatattcctatataaataaaatatatgaagcaccttctcacactaagcactgtcgcttgcgacaacctacatcttcgtgcaagtgtgcatcatcggcacatagcaccttttatgtataggaaattctatcgaaattccctattacataaaaaaacaacagctgtcttttataaataatgcagacataaaatgtcatttgcactccttataataaacatactgttgtcttataaatattaataaccctgcaaaaccatcctgattatattattaattacaacttataataatcaactgctagtcttgcaatacattgtaatctgcttaatctcttacaatccatttagttatctactgaactctttaaatcctctgcaagaagatatatgttatgtaatatattcttacagttcttcatactttcaactgttgtgtcagatacttttaggccttcagttgaagcagctgctacctcttctcctgttgctgataaatgtgaaatattatcagaaataacagaagttgaatccagtatcttgttaatgctctgctctgcagaatctatattgttcataagattatcaactgtttttcctacgtcctcaaaagtcactcttgtattatcaataagttcattctgcttattaactgactcaactgacgcttttatgctctcattagctttcttcgtatcttcataaagattattaattatatctgttatgcttgaagatgcattcttagtctgttctgagagctgtcttatctcttcggctactactgcgaaaccctttccggcttctcctgctcttgctgcttctattgaagcatttaatgcaagaaggttagtctggcttgaaatctctacaatagaaccaataaatccctgtacatcatcaaccttttctgtaagactgttaatcacatctacgattatattgcttgcatcatgtacattctgtgcctgttccttaagttcaactactatagccttactatcattaacagtctcatctgttctgtgtgaggcctcaaccatctcgcttatctctttttcagcaatatcagtgttttcctgaatctctgcacacatagtggcctgtctttgtatggcttctgctgtgctttctgtgctttctgctatatctttcattgaattgtggtttatatctatgctcttttctaactcatcaagcatatccatagcctgtccgaaatgtctggttatattatcagctacagcaaccatcttctcgttattctctttctgtataactgctgctgcctctatcttattcatattctctgcaaaaaactgcttaagcagctttgttacactaagagatatacatgtaacaataaccaatactaatatagcaagaaccctgcttgccatagccactccattatacatattataatccataataagtcttatgacattaccagctatcgcaacgccatcagcccacaatattagtttttcattaagatataccatcgaagccataatcaaaggaagtacatatgtccatacaccatcagttgaattaagcagtataagaacaacatatccaaatgccattgataccgcaatcgttaattcacacactctggtcttcttccttaaaatataagcagctactgatacaataattacagcaagtgccacaacaaactgtattaaaatctttcctttgttatgtccgtcacccactcctaatgctgccatcagggtcagcgcaatataaccaaatactatgagaactgtaaataaaacagtcctgtttgcccttatatactgattctctgtcataatttttctccagtcttttgttatagttttgcaaagatttataaaaaaagtatatacccacgattattcaaatgcaatatttttgctaaaaaaaagctgataaagccattattttcatccagatttcacaaagtattgtctaaaaatatagttaaaaaaagcatttgaaaatatccattaaatactttcaaatgctcttaaaatattattcctgttctgactctgtaattctgatagataagtcttcaagctgttttgcatctactacatctggtgcattagtaagaaggcaggaagcatcctttaccttaggaaatgcaataacatctcttattgaatctctcttagccataagcataacaagtctgtcaagaccatatgcaagaccagcgtgtggtggtactccgtacttgaacgcatcaagtaagaaaccaaacttctcattagcaacttcatctgtaagaccaagtgccttaaacattcttgactgtacatcagcctgatggattcttactgaaccaccacctatctctgtaccgttaagtacaatatcataagccttggcacgtactgaacctgggtctgactcaagcttatcaagatcctcatccataggcatagtaaatggatgatgcatagctacgaatctctcttcttcatctgaccactcaaactgtgggaattctgttacccagaggaacttataatcattcttatcaagaagtcccatctgtccagcaagttcaactcttaatgctccaagtacattccatacaatcttattgcggtcagcagcaaataaaagaaggtcacccggcttaccttccatagcctcaacaagtgcgttcatctcatcctcagtcataaacttagagaatgaagacttaagtgaaccatcttcgtgaatagctatataagcaagaccctttgcaccatatccctttgcaaagtcgacaagtgcatcaatcttcttacgaggcatacttccctgtccattggcattaatacctcttacagttccaccattctcgatagcccctgtaaatacgccgaaaccacagttctttactatgtctgtaacattcttaagttccataccaaatcttaaatctggcttatcagaaccaaatctatccatagcttcctgccatgtcatacgctggattggaagctgtacatcaatatctaatacctctttgaaaagatatgctaaaagtctttcattaacatcaattacatcatcaacgtcaacaaatgacaattccatatctatctgagtgaattccggctgtctgtcagctcttaaatcttcatctctgaaacatcttgcaatctgcatatatctgtcatatccagagcacataagcatctgcttaaagagctgtggtgactgtggaagtgcatagaattttcctggatgaaccctgcttggcacaagataatctcttgctccttccggagttgacttagtaagcataggtgtctctatttcaaggaaaccttcattagcaagaaatgctcttgtaagagtggcaaccttgcttctcataatgatattagactgaatatcaggacgtctaagatcaaggcatctatatttaagtcttatatcttctttagtattaatattatcctcaattggaaatggaggtgtctctgactcagaaagtattcttaatgattcagccgcaatctcaatatcaccggtcttaagattgtcattaactgctccacttctcttaataaccttacctactacagctattacgaattcatttcttaatgtatatgccttgtcaaatccttctttgccgataatattctcatcaaaaagaatctgtaaaagaccgcttctgtctcttaaatccacaaatataagtgaaccaagattacgtcttttagcaacccagcccataactgtaactgtactgccaatatctgcacttgaaacttctgtgcatctgtgtgttctctttaagccaaccattgactctgccatagttaattacctcattcttcttagctgtattaacagcctgttttatttgccctaaggcataattaggttactcctaatcctgactgatttttagtatatcacttatatccaaatcatcaatatctaatctgctattattaatcaattctatagtcgaatcttcgtgaataagcctctggaataaaaggaatactctgatatccatattcttaatctcatctatcataattgtaacagcagtgtctatatcaaatgctttcctatatggtctgtctgatataagtgccgcaaattcatctgcaacctttaatattcttgctcctaatggtatctgctcaccaacaagcccattaggatatccgcttccatcaaaacattcatgatgtgaaagaacgacatccattatattatctgaataatcgtattttttcaatagatcatagcttatctttgagtgcatactcatatactgcttctcatcttccggaagtgcctcatcggttcttccatacagatattctgaaagctttaactttccaacatcgtgaaccatcgcagcaatctttaattcgtatgcctcatctttagacaaaccacacatctgtgcaagctcatatgtcagattggcaacaagcactccgtgcttaattccacttttaaaatcattaatcatataatcaatgagttcattattgttattcttcataattctaccatatcaatatacttaatgctgaatcaattccattcagacaatattatattatatttttatgtgaaagaaatgtcaatgtccttatcggctatatttaaagagaaaccttgtatacacgtttatttaagctttgcaaaatgttctttagcaaattccatatcctgaaccgcctcaagagttccaacataatttccctgcttgtcccttaccgcaatatatttaacaagcatagtccttccttgtttatccatccagacagatacttcatcaagtgttcctatcctgaattcttctataattcttctgacctttgcctcaatctttggtgggtggcacgagaatacctccctgtcaattgccataacaggtcttttaaatacctttgacccttcattaaaatatctgttgatattatcttcatcaacaaatgttatctccattggtattgcattaagcagtgcctcaagctgcgaaagtgtcatatgtccgcctgccatatataactcattctgaacatcttctttcttatcagattgttctgacacttcaggtttatacacattttctacttcttctgctttctcccatctgtctgatactgtatcaaggcacacggcataatctttggaatcgtgatatattccaatccactcagcttccgtaaaattagcggcacagttaggatacaatatattatcttccttatatatcatctcctctgccctctttataacattttctattctttcaattaatttaccgtccagacttttaccattattgttatccgcactgttattattgtctgctttgctactgttattaccgtccatgtaatttaactgctttgctatgtctgacagctcatctcttatctcatcatcaactgtccacataaccgccgaaggtccgctgattttatatcgtacattaagcaccggatataacaaatcccctttcttggcataatgaatagataactccctgagcttatatatcttctctttcagtgcctttatatcaatatgtccgcttgtaatattttctttaatatcatcaataacctgctggattgccttattttctttcacaaaagtatttaatgggtggccgcttatcatagccagtttattaaaaatgctttctctgtctttacgcatatctgcaatggcactcttagtcatacctttcattgtgtcatcatagtactttttcatctctgatatttcattttccgccttggctattctttcttccttagtcgcaccgtgaaataatgctgagtgaacatcacacagctttgaaacctctgatataggtgttccctctgctatcaacgcctgctccgcttccataatctctattggattgacatcattgaattccttaacaaaatctttcttaacattctcaagactttcaccatcaccaagtcttttaagatagcctttaatctgttctgccctgttcatataattcctccattatttttattatatttttcaatctatctgctggtaatttatcagctttatatataagctggctattatgcttatatgtgcatcatattataatctgctttattatcttgtaagcttacagtcactcttacctgtatatcttgtaagaccacaattacacttatctgtatgtggattattagtatgtctggattgtaacatcttcattccgcattaatatgttgtatttacaacactttcaagattaatattcatatcttaattgttttgcttgttaataatcctgcttttataatataatacttaggacgattaacgattgtggggtgaatatttaatgaaatatgatgtaataattataggtgctggtccgggcggaatattctctgcttatgagcttatgaagaaagctcctgatctaaaggttgccgtatttgaggaaggtaatactttagagaagagaaaatgtccaattga

SEQ ID NO: 610 - DNA, 6813 bp, unidentified
  source 1..6813: mol_type = unassigned DNA
atgcgtattattttctgtctgatggttttcttgttcataggaaagaacacgatgctggcacagcagctgtcctcattcgtagaatatggagcagccctgcataccggtgacaatactcctctttggcaggtcagcaaccagcaaggactcacttcgctcgacaacaatacttacatacgtggaggaatatcctacaaacaccaacttggaaaatggaagtttgaagaagcactggatttggttgcagcagccggattcagcacgacctccttcattgtacagcaggcttacgtagacatccgttacaagtggtttggattctttgccggaagccgggaacagaattctccattgctgaatcaagagctgagcagtggcggcatgacctggtcgggtaatgcgcgtcccatcccacaagtacagataggcatacccgagtatgtacagttgctaccccgtttaggcctgaaaggagaaatctcgtacggatggtttacagataacaaataccagcgggagcaagtcggagaaaaatactggtacaccaagagtatcaaataccatcataaagaagggttcctgcgtatcggtatacccaaaggaaaatggcaactggaactcggaatgaccctcgacacccaattcggaggatacaagattggaggttccgaattaggagacttgggcaacggatggaaggattacgtacgcgtattcttccccggccacgggcgtgaggacggaccggtaggtgaacatctggctttccaaggcaattttctgggtagcgaatatatcaaaatgacttatcgtcctaaggaagatttctccatcagcgcctatctggacaatcattttgatgacttctccgccatggccaaactcaacggttgggatggcttatggggtgtggaatataaatccaaccatagacaagccatcaacggaatcgttatcgaatatctccagactaccaatatgagcggtccactgcacggtttgcaaaattctgtagtaggtaagaccggaggagccgacaactactacaacaacggttactacccaggatgggcacattggggtatggcgatagccaatccgttgatagcatcgcctatctataataaggatggcgatatgagtttcaagtacaatcgcgttaaggccctgcatctgggatggagcggcgacatcagcagtgagtggagatatgtggcaaaattgtcccacaacagaacttggggaactcctcatcgtccaatacccgatatattagaaaatttttctacttttgcatcgttttactatattccccgtaaatggaagggctggtgcttcaacgcgtcccttgcattggatatgggagagatatatggagacaattttggattccaactgaaagtacataaaacattttaagaaaatgaactacatacaaacagagattgacggcgtatggctgattgagccgaaagtattccatgatgcccgcggatactttatggaagcatttaaggaagaagagttccgtgcacatgtcggaaacgttcacttcatccaggacaatgagtccaaatcctctttcggtgtattacgtggtcttcattaccagaagggtgattgcagccaagccaaactggtacgtgtcattaagggaaaagtgctggacgtggctgtcgacttaagaaaatcttctcccactttcggaaagtatgtcagtgtggagctaagtgaggagaacaaaagacaattcttcattccgcgtggttttgcccacggttttctggtgctgagcgatgaagctgtctttacatacaaggtagacaacgtatacgcaccacaatccgaggcatccatccgttttgacgacgaaaccatcggtattgaatggcccgttgctacggaacagcttctattatcagataaagacggacatgccgtatcgttcaaggatgcggtctattatgaataaaatatgaaaatagccattgtcggtacaggatacgtcggtttggtaaccggaacctgctttgcggaaatcggtgtcaacgttatttgcgtagacacgaacagtgaaaagatagagtcactgaaaaagggtgttattcctatctatgaaaatggactggaagaaatggttagccggaatgtgaaagcaggacgcctgcaattcaccacgtctctggagagttgtctgaatgaggtggaagtggtattcagtgccgtaggtacaccacccgatgaggatggaagtgccgacttgagccatgtgctggaagttgcccgcaccattggacgcaatatgcagaaatatgtgttggtggtaaccaaaagtaccgttcccgtaggtactgccagaaaagtgcgggctaccattcaagaagaacttgataagagagggatgaacattgacttcgatgtcgcttcgaatcccgagtttctgaaagaaggtaatgctatcaacgattttatgagtcccgaccgtgtagtggtgggagtagagtccgaacgagccaagaagataatgagcaagctctacaaaccattcctgctgaacaacttccgtgtcatctttatggacatcccttctgcagaaatgacaaagtatgcagctaactccatgcttgccacccgcatcagcttcatgaacgacattgccaatttgtgcgaattagtgggagcggatgtaaacatggtgcgcagtggtatcggttcggatacccgtatcggacgcaagttcctctatccggggataggttacggcggttcatgcttccctaaggatgtaaaggcactgattaaaacggctgaactgagcggctacaagatgcgtgtactccatgcagtagaggaggtgaacgagaaacagaagagtatcttattcgaaaagttgcagaagcatttcaacaatgatttggagggaaagaccattgccatttgggggctggcctttaaacccgaaacagatgacatgcgtgaagccccggctctggtattgattgacgagttgctgaaggccggttgtaaagtacgtgcctacgacccggctgccatgaacgaatgccgacgccgcataggagaaagtatttattatgcgacagatatgtatgatgctgcgctggatgcagatgcactgatgctggtgaccgaatggaaagaattccgcctgccttcatgggcagtcatcaagaaaactatggagcagccgttggtattggacggacgtaacatttatgacaagaaagatatggaagaacaaggtttcacatatcattgcatcggaaaataaagttgcagaaaaaagaaaagaaataaatagggacgttatgacaataaaaggaagtgcgattctcattgtacttgttgtctcattggcctcatgcagcaacagacaaacaggagaggtttccgtaaaggaagacctcattgcaaaacaactgttacaaggcatctgggtgaacgatgaaacagaaatgccgttgatgcgcatcgaaggggatacggtatattatgccaacccgcaaagcgctcccgtacctttcaaggttgttcacgatacaatctacatatacagcaatgaaccggtggcctataagatagaccgtcaaacggaatacagcttctggttccactcgctggccgacgaagtaattaaactgcataaatcagagaatgcggaagattctttggttttcaccagtcgagaagtggaggtcatttctactactccggaagtgataaagaaagacagtatcgtaacatacaagaatacaagatataggggatatgtatatatcaacccctcaaagatgaaggttttcaagacttcctattctgaaaatggaatcagtgtggacaatgtgtattatgataatgtaatccacatctgtgtatacgaagggaagaagatgctttacggccaggacatcaccaaaaagatgtttgcggatatattccctgccgaaatactgaatcaggccattcttgccgatatgaacttcatgggtgtggacagtaaggggtaccattaccaggcaacccttggcatacccgaaagctccgtatacagtctggtaaatatgattattggttttgactgtacaatgagcatagaaaaagcggaataaatccgctttttctatgtcttttcttcaccacaccacagtgtttatttcttctcaccgccattctgtggccgtttggcactgggctttccgcctttattgttgttacggccattcttatttcctcctggcctacgtccgtttccatggccgccccgtcttcctccgtcaaatgctctcggcttgtattctggtgcttcacccagctcttcgggaaccggtatcttatagatatccctatccaggaatttttcgatatttttaaagttaccctgctccttttcggaaacgaaggtgatggctacgccgtcattattggcacgcgccgtacgtccgatgcggtgcacataatcttcactgtcgtggggaacgtcgtagtttatcaccagacggatgtcatcgatatcaatacctctcgcaacgatatctgtggctaccaggatattgatacgtcctgccttgaactcatacatcacttcttcgcgctgtgcctgctccaagtcggagtgcatttcaccaacgttcagtttcatctgcttcaaagctttggtcacttccttcactttcagtttggaagaagcaaagatgataacgcgttccggcgtctcctctgcaaagaggctacggatgatgcccagcttctgattctcgtagcagacgtaggctgcctgcacaatcttttctgccggtttggaaacagccagcttcacctcggcaggattgttcagaatgttaccagccaactgttgtatcttagcaggcatggtggcagagaacatgattgtctgccgctctttaggaaggaatttgacaatttgcataatatcgtcataaaatcccatgtccagcatccggtctgcttcatccaaaataaaataagagacacgggaaagatctacataaccaaggctaagatgggctatcaaacgccccggggtagcaataacgacatcagcacccagtgtcaaccctcttttctgctgctcgaacagtattccgtcattaccgccatacacagccacgctggaaaccggcatgaaataagagaaaccttccatctgttggtctatctgttgcgccaactcgcgggtaggagccatgacaatgcaattgatggcatcggcagggtgtccgccctctgaaagcttgttcaatataggcaacaaatatgcggctgtttttcccgttccggtttgtgccactgctattaaatctcgaccttcgagtatgacgggaattgatttttcttgtatgggggtgcactcttcaaagcgcatggcatccagtgcctccagcacatcgccatttaaatgtagttctgaaaacttcatgtatctcttttaaatttgcgtacaaagataggaaaaagacttataaaatagactcttacagtaaaaaaataagcccttgggacaataattatctcaagggcttgcaaatttgtttcaagcatctgccttcaacggggaatatcaatgtatgaatccttaaatcccagaaagtaaagtacgccatctaagccgatggtgttgatggattgcttggcattggcaactactttgggctttgcatggaaagcgattccaaggccggcaattcccagcatgggcaggtcgttggcaccgtcgcccacagcaatagtctgcgcaatatccactttctccacctgagctatcaaacacagcaactctgccttacgcttaccgtcgactacatcaccgagatagcggccggtcagtttgccatcctctatttccagctcgttggcatacacatagtctataccgtacttcttctggaggtactgcccgaagtaggtaaaccctcccgaaagaatagctatcttgtaaccgtatttcttcaaaacatacattaggcgatccacaccttccgtaatgggaagattttctgcaatctcctgcatcacggactcatccaatcctttcagcaaagccactcgttcgcgaaagctctcaatgaaatctatctcaccacgcatggcgcgttcggtaatggccttcacctggtcgcccacacccgcacgtatggccaattcatcaattacttctgtttcaatcagcgtagagtccatatcgaaacaaatgaggcggcgcatccggcggtacatattgtccaactggaaagagaaatccatttccagttcggttgccagtttcattaactgttcttgcatggcaatacggtctttcggagtgccacgaacggaaaattcgatgcaggcgcgtgtacgcgattcgcattcgtccagcgggatacgtcctgtaaggcgcttgatggcatcgatattcatgccttgctctgcaagaatacgggtaacggcagatatttgacgggcagacaacttacgccccaataaagtaagaatatagcggttctttccctgcatattcacccaatcctcgtactctttggtagtaatggggtagaaacggacagtcactcccagggaggaagccttgaaaagcagttccttcataatgaaccccgagtgttgttcttccgtcttgcacaaaatgcccaacgaaagagtattgtgaatatctgcctggccaatatccagaatggtagcatcatatttcgccagaatttccgtcacggaagctgtcagtcccggacggtcttcacccgtaatacgtatcaggatgagttcagtgttcaatggttgcat

SEQ ID NO: 611 - DNA, 13466 bp, unidentified
  source 1..13466: mol_type = unassigned DNA
atggagaataatcccgaaatagcgcttgcatggcaattcattgaaaacacaggcactcatctttttttgaccggcaaggcaggtaccggtaagacaactttcctgcgaaaactgagggcggagagtccgaaacggatgattgtacttgcaccgacgggaattgccgctatcaatgcaggcggtgtcaccatccactcctttttccaagtaccttttgctccttatgtgcccgaaagctcattcagcgcagatggcaaggcaacctaccgttttcgttacgggaaagagaaaatcaacattatacgcagcatagatttattggtcatcgatgaaatcagtatggtccgtgccgacttgctcgattcggtggatgccgtcttgaggcggttccgcgaccggaacaaaccctttggcggcgtgcaactgctgatgattggcgacttacagcagctgtctcccgtagtgaaagacgatgagtggcagatgctgcgcaaatactatgacacgccttatttcttctccagccaggccttgaagcagacggaatattgcaccatagaactaaagaaagtctatcggcagaacgatgggacttttcttgaattactgaaccgcattcgcgaaaaccgttgtgacgggcaagtgctggaagccttgaaccgccggtatattcccaatttcgtaccagataaagaagaaggatacatccgcctggtgacccacaattatcaggcccaacggattaatgaccatgagctggaacaacttccgggacgctcgtatgcctttcgtgccaagattgacggaaagtttcccgaatattcctatcccacggatgaagtactggaactgaaacgcggtgcccaggtaatgtttgtgaagaacgacacctccggtgagcaccgttactacaatggcatgattggagaggtgacagccgtgtcggcagatggaattgaagtgcgcagtaagggaagcgacgctaccttcttacttcaggaggaagagtggacgaatgccaaatacgtgcttgatgaggaaaccaaggagattacagaagatattgaaggaacattccggcaatatccgctgaagctggcgtgggcgattaccattcacaaaagccagggactgacgtttgaacgtgccgtgattgatgccggtgcctcctttgcgcatgggcagacctatgtggctctgagccgctgcaagacattggagggagtggtgctcagtgccccgctttctgcaaaggccgttatcagtgaccatgcagtagataccttcacgatggaggcacggagaaacgagccggacgagaaacgcttccgttccttgcagcagacctatttcctggaactgctgtcgggcttgttcgatttccagcccatggagcaggctttgcggcggtatgtgcggctgatagacgaacacttgtacaagctctttcccaagcaactcgcagcctgcaaggaggaaatggaacgttttcacgacaaagtgacgaaagtagcccagaagttcagtatccagtatacccgcctgattgatactgcgcaggactatgcagccgacccgactttgcaggggcgcatacactctgccgccacttattttcaagagcagttgcaaccgctggatgcggtgatggcgagtacggtaacttctgataataaagagttgaagaagaagctccgggatgccatggaggaactggaggaagtgtttgacatgaagactgatttgctggattatgtgctggagaatggtttccatatggcaggatacttgaagcagaaagcactgctttccattgatgattcggcttcgcagaagggtaaaggcaaagggagaagtgcttctgccaaagaagggcagggaagcagtaagcaggctgataaagagaaacgtccgcgtgagcggaaacgcgatgctgcggctgttgaagtacccacggatgtgctgcatccggaactttacaaccgcttggtagcatggcgcaatgcagaagcttccgcattagggctgcccgtatacaccgtcattcagcagaaggcaattctaggcatcagcaatctgcttccttcggataaggccatgcttgtacgcattccgtatttcggaaaaaaaggggtggagaaatatggagatgtgattctggagatggtacgtgtgtatcgcaaagagaaaggactggcagagccggagttgctgtagtcgaatctcctgccatccgcacctgcattatttaccatccgaacatcagctttattccttcctccagcgtatacggttgataccccagttcccggtgtgccttttctatactcagcccgctgaaacggggacgtggtgtcttttcgttcatttccttcgtggtgacgggacggatgagcgagcgattcagccccaatacgtccgctacccgataagcgatgtctgcaatggtcaggcactcgctgccacagagatgatagataccgttttgcggatgacttatcagcttctccactccttgcgacacgtctcccacgaaggtgggcgtacgccattggtcggatacgacgaacacttcctcattgttccttaatctgtttgccaccagttggagcacatttccatgctgtccgggcagggcggcaccgtacaccaccactacgcgcacgatggcataatccctgcaaacggcagcgatacgtttctcaccttccagtttggtgtagccgtaataattaacgggagcgggaatatcctcctccgtatagggtcggtccgtatcaccaccgaaaacgaagtcggtggaaagatggataaaacggctgcctcccgcctcacagcattctgccagatgctccacggcagtaatgttgacggcatccgcttctgcatggtgcgtttcgcaataatcggggacggagagggcggaggtattgattacaacatccggctgtacttcctggaaaagctttttcaccgcctggcggttgcatatatccgtacggataaagcgatagtcgcccgaatggggacagatgtcgtcgtgcagggaacagcccgttgtctgataaaacacgttgtgggacaaatcatccaggatgcgtctgccggtaaaaccgttggcgcctattaccagtattttctttcttgtcattgattctgttgttaagtgatgggcatcaatagggcacgtgtctgccctgctgtacctcgatgcgtatgccaaaggctccgttggctgatttcagctcgaacgcccctttgaaattgttcttttcccaaggcagtgcggaagggttgggtactttccagccgtccttgtcatattcgccgtacgtatggatgcgcatgccgttcttcaaagtgaaacttcccatttgcaggttgtcggtagagccccagaagcccgtcagtccgaagggattcgaactgaaataccgggagttgctgagtgagaatatgttcgaaagaccttgtgaataagtcacgttcgggttcaactggaagatgcggctatagtctttgctggcatccggtatctccaaagtgaatttgggaagagtgggggtggacagattcatcagccccatatccagcaggaagccgtcgtaattcttcacgcccggcagaagctccttttcagacggagacatgccttcgggagacgcttcgccacgtactgcagtacgtaccgtatcggcaggcatctcgctctgtgcgctgacggatgacatgcctgcaagtaaaatgatgatgcagaagaagattcgtttcatagttctttgttcacaatttcagttgctgtctgccgcataggggcagactgaacaaagatactcgtttccctctatttccggaaatatctttgtattatttctatttctttatacgaatggtaggggcgaaaatgggcgaatttacccatttcattttggtggggtcgtatcttcgttccatccctccgttgaggtcgagccagtccgtcactttcagttccagtaccatgccataaccgctttgcggatacatcgggttcatatatccatgaaaggagttacttctcccgtagcccgaatactggccgaaggcatgcaggcgcatgtagggattgatgcggtaggatacggaggcattgtagcctatgtcccattgagtacctcggggggcatcccttttggcatactgggcaccggtaatggatgaaggttgggagatggaatagtgggcggcatatacccctccgctcaattcccaatgtccgtcgggactgtaataagtgactcctgcgccagcctgcatgatggagcccattgcaggataggtgttatggctgccgtacatcgtcagtacgacttccggcgagagcaggaaatcggcgaaacgctggaagtcccattcaaagatgtttttctgaaagtgtatcttcttcatgtccgtccagggcaggggctccacatagtcggagggagggagatggagatttatctcttcctgctgttcgccttgcagactttgttggggctggctttcatcaaggcccgtacgcttgttctcttttggagaaaagggaatctgctctttctttacgggaggccggttctttattgtgtcttccggaatctcgctctgtgcataggcgcagagtgaggaacagataaaagtaatgaataataactttttcataaatagtagtttagttttagtttagttcactattagtttatatcctattccccgcacattgacgatacggatgcgctcgtctccggccagtttatgccgcagtttggtgatgaacacatgcaggctgcgggagttgaagaagctgtcgtctccccagaggtcgagcaatacattctgggtgttgaccacctggttacggttctcgcaaagacgtttcagtatctcggactcgcggtgggagagttccacttccgtatccgcgttaggtgaagtcggggtgcctgcaaaagcaagtcgttgagtgacggaattgaaacggtagtcaccgatttcaaaaacggtagtttctttgggcttttcctctgtaaaggagaaagctttgcctaccagggcctttatgcggataatgagttcctgcattccgaaaggctttttcaggtagtcgttggcacccagctcaaacccttccaccacatcgttgatggtggagcgggcggtaaggaacagtaccggggtctgtttgtcggtctgccggatgcggcgcaccatttcaaagccgtccatgcggggcatcatcacgtctgccaccagcacgtcgggacggaggtcgaagaacttgcgcaatccctcttcaccgtctgctgcggtgtggatgatgaagttctgcccttccaatgtgtccttgataatcatggcgagggtctgttcgtcctcaaccagaagtacggttatcttttccataattgtcgcttttgttacaagtaatgtaaagctccttaacaagtaatgtaaagtaccctaacaaataatgttatcatatccttatcgtaaaggtacttccttttcccaactcactctttaccgatacgctgccaccatgcttctctatcatggtcttcacatagaacaatcccagcccatagcctttcacatcgtgcagattacccgtgggtacgcggtagaatttgtcgaagatgtgcttctgcttctcgggagcaataccgataccgtggtcgctgacagagatttcggtctgttcattctgcccttcgacggccatcttgcggcaatggatggtcacttcggcttctccgtgcgaatatttgatggcgttgtctatcaggttgctgatgatgttgctgaaatgcgtacggtcggcaagtacgctcagatcttccggttcgatgtccaccgatatgtggacggagctttccgctttcagcttgtgttgttcgatgagcgtttccagaatatcacgtattgcaaactcctccgggtgcaggcggaaagtcctgcggcgttccatactcatggaaagtatctgttcaaccagtccactgaggcgctgaagctgttcctggcagatacgcaggtatttgccgcgttgggccttttcctccgcttggttgaagttgagcagagcgtcgttggcggcatatgctacggcgatgggggttttcagttcgtgggtgatgttgttggtgaaatcgctcttcatctcttccagtgtcttctgtttcaggatggtgcgtatcaggaaccagaaggagaaagcgagtacgatcagaataacgaatgatgtggtgagaatgcccgacatctgtcgcaagaccaacgtgccggccggttccatgatgagacggtagctttgacttgtattgatgtcgaaagaataattatattccacggcttttgaggtaggcacatagccgggggtaccgatgtttaccaatgtatctatatagagaatggtagagtcccatttgctgcctttgtgaagatgtagcagcctatggggaagattgatgttacggtcatgcaggaatgaagtcagcaggctgtcataaagcagtacgtcggggtcggaaatgatgtccagtcccgaatgcagtccgcgctggaagtaggtggcgagttccagcatactgttttggtcgcgcaaaatcacatccagtccccctttggcactcaatgcggattggggagagctgtctgagtccctgacactgacttccacgcgggttgaatcgttcgggtgggtcacgtaaacactgtctcctttgggcatgaaggtttcgtgcagggtggtgttgtccaaagaatcttcacgggagatggtggtactgctacggacaaatgattttccgtcatcgctgtatccggctgatacgctgacttcaccgtggtttatgtcgtcctgcttcattttatccacgcgtatcatcatttcgttatagtcgctcatgcgcatggcttcggtgatgtccctttccatttcactgtgcatggtatggtagagccccgtcagccagtaggcttggtaggcgaagatgccggccagggagacgatgacaagtatggcaatatatttgaatggcagtttcatgtttgtttccggttacttttatacatacaaaggtaagattaatattgtgaaccctatcatccgataagactaaataacactcccgataacactggataacacttggtaagccgctgataacacaagtttctgctgattctgccgtactttgcagacgaagatttgcagaagaagaatataaacataaataaaaagaaggacatgaaacgattctatttactccctattgtatgctgtgctttgagcatcagcctttcggcacaagagaacaacggcactgcaaccacctccggtgcggacgacaaccgcatcctcagcgccgacagccttatcacgaccgatgcccgtctggacagtctttatcagaccttgccggaagtgatgattaccggtgaacgccccatcgttaaggcagcgcaaggcaagctggtgtacgacctgccccgccttatccagaacctccccgtagacaatgcctacgatgccgtgaaagagcttcccggcgtcatcgagatgaatggagggctgcagttggcaggtcagggagtcaccgttatcctggacggcaaagtaaccaccctcagcacagagcagctctattccttgctgcgcagcatccctgccagccgcatagagaaggcggaagtgatgtacaacgcccctgcacgctaccaggtgcgtggcgcacttatcaatatcaccttgaaacaatcggtaggcggccccggctcctggcaaggcgaactctatgccaagtatcgccagaagcataacgaaggctttgaggaacgcgccagcctgctcttcagcaaaaataaattctcagcagattttctttactcgcacagccatggccggggctactctactaccgacaaagaggctgtgcacaccctggcagacggctcggttcaccccatgacaacatatgaggtgggccgtggccgcagtcatacccataatttcagggtaggggcggactataacatcgccaaggaccatcagctgagtttcgtctataacggtggctattccacctcccacaactggaagggcgtgacgggcacgcaggtgtccacaactcatggcaatagcaccgactggctgcacaacggccgtctggactatcgtacccctttcggcctcaaagccggtgccgaactgacctactaccgttccccgtccgaccagttgctgcatagccgcatgcaggacgaggaactcgacttctacaccgaagattgccaacgtatcaaccgatggaaattctttctggcccaggagcacagtctgggaaaaggttgggatttgaattacggagccatctatactaccagcatcgacaacagctaccaatattattatgaccccgaaaccggcggacaactgacctcatcggatgccttgagcaatatgaagtcccgccgccgcgagcagacctggaatatctatgcaggttccagcaagagtttcggcgacaaactcgctttggacgcttccctggctgtggagcattacaagactcccgtctggaaccagtgggactggtatcccatcgtcaacttgaactatatgccgtcaccgggacatatccttcagctctctctgagcagcgacaaggactatcccgactactgggcggtgcaggatgccgtctcttacatcggtggcggatactctgagctgcatggtaatccgttgctgaaaccggcgcaagagtatgagcttaaaatgacctatattttgaagagcaaatacatcttcagcgcttggttcaaccataccaaggactactccgtacagacgctctaccaatcttccgaacgtctggttgaaatctacaagacactcaattttgattatcagcaacaagcaggtatacaagcctctatcccgtttaaggtgaaggattggttgaattctcgccttaccctcatcggcttgtggcatcgcgaaaaggatggtgatttctgggatattcctttcgacagaaagcaatgctatggcattgcccagatgaacaatacttttactctctccaccaaacccgacttgaagctgacggtgaccggatttgtgcatagtaaagccattcagggcatctacgacctgcctacgtcgggcaatgtgaatattgccctgcgctacggcttcgccaagaacaaagccattctcaacctctattgcaacgatatttttgagacgggacagatttctccccgcatccgtttcaagacgcagaatgtgacgaatcattactcatgcttccgcgaattcggcgtatcgtttacttataaattcggtggatataaggagaagcaacgggaggcggtggatacgtcgcggttcaaatagatagaagatgcaggtggtcaggtgaaaatacggtattcttttgtactttgccacatctttcgtacttttgcaactttcaaaacattaaagttgttatttaaagaaaagactctgtatgaaatcggacattgaaatagcccgcagcatagagctgaagaagataaagcaggtggctgaaagtgtggatatcccgcgtgacgaagtagagaactatggccgttacatagccaagattcctacgcatctgattgatgaagagaaagtgaagaagagcaatctgatactggtgacggctatcacggctacgaaagcgggtatcggtaaaacaaccgtgtccatcgggctggcattggggctgaacaagattggcaagaaagcgattgtggctttacgcgaaccctcgttaggtccttgcttcggcatgaaaggcggtgctgccggtggaggatatgcccaggtgctgcccatggagaagataaacctgcactttacgggcgactttcacgccattacctccgcacacaacatgatttccgctttgctcgacaattacttgtaccagcatcaggcggatggcttcggactgaaagaaatcatctggcggcgcgtacttgatgtgaatgaccgttccttgcggagcattgtcaccggattgggaccgagcaccaacggcattaccgaggagtcgggcttcgatattaccccggcttccgaaattatggctattctctgtctggcaacagacctcgacgacctccgtcgccgtattgaaaatattattctgggattccgtttcgatggtactcctttcacagtgaaggagttaggagtagccggtgccattaccgtactgttgaaagatgctatcaaccccaacttggtacagactaccgaaggctctgctgcttttgttcatggaggaccgttcgcaaatattgcccatggttgcaactccattcttgccacaaaaatggccatgacatttggcgattatgtagtgacggaagccggtttcggggctgacctgggtgcggagaagttctacaacatcaagtgccgcaagagcggcctacagcccaagctgacgataatcgttgctaccgcacaaggactgaagatgcatggcggtgtcagtctggaccgcatcaaggaacccaatatggaaggactgaaagagggcttcggcaatctggacaagcatgtacgcaatttgcgttcattcggccagcaggtcatcgtggcattcaaccgttttgccagtgatacggacgaggaggtggaagctatccgccgccattgcgaagaaaagcttgaggtaggttttgccgtgaacaacgcctttgccaaaggaggagagggagccgttgaccttgccaatctggtagtagatactatcgagaacaaaccatccgaaccgctgaccttcacctacgaagagagcgattgcgtggaacgtaaaatagaaaaggtagcctgcaacctctacggggcaagcgtagtgacttacagtctccactcccgcaaggttatcaaactgatagagcagatgggtatcagccattaccccgtctgtattgccaagacgcagtactccttctctgccgacccgaagatatatggtgcagtcaacaactttgagttccacatcaaggatattgtggtcaataacggtgcggaaatgattgtagccatcgccggtgaaattctccgtatgccgggattacccaagaaaccacaagccgaacacattgatattgtggacggaaatatagaagggctgagctaaacgcgcggagcgcgtttagaattaaaaattaaaggctgcgcagttcaaagcgaacattgcgcagcctttaatttttaattcttaatttttaattctgtttgcttatcaataagcaaacagcgggtattctttcatcttcgcatttacgcgtgcacgtacctctgcgatgacttgttcgttgtctacgttggacagaacggtttcaatcatctcggcaatttcgagcatcaggtcttccttggcaccacgggttgtgatggcaggagtacccagacggataccggaagtctggaaagccgagcggctgtcaaacggaaccatgttcttgtttacggtgatgtcggcagataccaacgctttctcggcaaccttaccggtcaaatcgggatatttgctgcgcaggtctaccagcatggagtggttgtccgtaccgccggaaacgatggtgaagccacggtctatcaaggcttgtgccaagacagcggcgtttttcttcacctgcttggcatattctttccattccggttgcaggatttcgccgaaggcaacggctttggctgcgatgacatgttccagcggaccaccttggataccggggaatacggctgaatccagcaactgggacatcatcttgatttctcccttcggagttttcttgccccagggattggggaagtccttacccatcatgataacgccaccacgaggaccacgcagagtcttgtgagtagtagaggtcacgatgtgggcatatttcacggggttatccagttcaccggctgcaatcagtccggcaggatgagccatgtcaatcattaggatggcacctatcttgtccgcgatttcgcgcatgcgcttgtagtcccattcgcgggaataagcagaaccgccgccgataatcattttgggtttctcgcgcagggcaacttcttccatctggtcatagtccacacgtccggtttcctggttcagattgtattcgcagggagtatagataataccggaagtgttgaccagtgagccatgggagaggtgaccgccgtgtgcaaggttcagtcccatgaatttgtcgcccggattgagcacggcgaggaatacggctgcattggcttgtgcaccggagtgcggctgtacgttggcccattctgcgccgaaaatctgtttcaagcggtcgatggcaatctgctcactctggtctactacctcacaaccaccatagtaacgcttgccggggtatccttcagcatacttgttggtgaggcaggagcccattgcctgcataacctggtcacttacaaagttctctgatgcaatcagttcaatgcctttgagctgacgttggtgttctttttcgataagttcgaaaattaaatcatctcttttcattctgcttattagataagtttgataaatctgtgttctcttattaagcgcacaaatttacgggaaataaatgaataaattgaaagaaaaggaagaaatttactgtcaaaagaacactccgaaagaaaaactcagcacattgtccctgcggtgaaaacggatttcgtttttcgtgttttcgtcagcagcgttgttgtcggccggaatatcgtatgtcacgctcttggagatgttatgcagccccatgtcgtaacggaagtcgaaaaagacgcgtgagatggtgacggatacgccgacggtgaaactgagattgagcggacgcagcctttcacggatattcacctggtcgaaattctcgaagtcgatgtcacttttcctgtcccatatatagcgcactttgggtcctccaaagacggcaaggctgtacggcccctccttgatgaagttgtatccgtagatgacggggatgtctatactgtggatggacgatgtaatggaggcttcctccggccgggctcctgatgcggcgtcttcgggcagaggtttctcgaaggtgatgttgcaccggttgatgttgtaggatatttccggttgcaggaaatggcggtcgaagtttatccgcatgaaaagggagccgaaatatcctatcttgtaattgttctgcacttcgtcgatgggcactccgttgacgctgaactgggatacaaggaacaaggaagaggtgaaaccgcctttgaaaccgaaattgaccggagtttccttgcggtgtctggaatgctcttcgtcggcagtaccgggcacaaccggagtctgtccccacatcatggcggggaaggccaacagatataagcccatcaagattcgtcgcaactccat

SEQ ID NO: 612 - DNA, 68289 bp, unidentified
  source 1..68289: mol_type = unassigned DNA
catatgggtgaaaatgtgtgggatttcaggaagcggctgacgcttcttttggcgagtgccgttattattgcggtggttttctttatatttaaagtactattctattatgtgtggcctttcttgcttgcattttgttttgcggtgctgcttcagaagccgatagtggggctggcgaaacttttaagggagaaaaagatgcttgctgcgagtatagttgtaacaatggtaacgcttattattctttcagtgctgttgtatgtcggttatatggcgtttcgcgaacttaaagatttcatagccaattttgatgagaatattaacagccttgatgggcagtttaagcttgtatgctgtcgtattgatggctggattaagttaaaagaaggctgcagttacgcattttttgaaaaatgtaaagggataattatagatggagacggacagcagatgttctttacaattatgagaaaacattctgttccggttataacatggtgcgttatggcggttgccggacttgtggtgtgctttattggaacgatatatgcggcggctggaattgagaagtacagaagctggcgggagaacactatatttaaggacgaagtcggggcggtgcatgtggggcttcgcaatttgataaatgtatatttcagggtgcagcttattataatgtcgataaatattgtggtgtgttcaacagcatttttaatgataggcaatccatatgcgattcttcttggtgtgctgactgggattattgacgcacttccgatatttggtacgggaacggtactgataccatgggctgtgggaagcctgcttttcggacatgtgaaaaatgcggtgattcttgtggtgttgtatattgtcacatattttgtgagggagattatggagtcaaaatgtatgggtgacagaatgggaattgcgccatttacaatgcttgcggttatatatatcgggatacttgtgtatggggttgtcggatttattcttggaccaatatcatattgtataataaaagcacttgttctttacttgaaaagcattttagaacatgataaactctagtggtgccgtcaatggcaggcggacaatgcgaagcagcattcgcatcaggctccgtatgaaacgggtctgtaatgtcatagaaagaggtttattatggcagaagataagaaattagtagaagcgattacatccatgaaagaggatttcgctcagtggtacacagatgtgtgtaagaaggcagagcttatgtcttactcaagcgtcaagggatgcatgatttttaagccggctggatatgcaatctgggagaatattaagaatgagatggacagaagattcaaggaaacaggtgttgagaatgtttatcttccaatgttcattccagagagccttcttgaggttgagaaggatcatgtagaaggatttgcaccagaagttgcatgggtaacttatggcggacttaatccacttcaggaaagaatgtgcgtaagacctacatcagagacacttttctgtgatttctataaagatgagatacagtcatacagagatttaccaaaggtatataaccagtggtgttcagttgtaagatgggagaaggagacaagacctttccttcgttcaagagagttcttatggcaggaaggtcatacagcacatgctacagcagaagaggctgaggcacgtacacagcagatgcttaacctttacgctgacttctgtgaggaagttcttgcaattcctgtaattaagggacgtaagactgataaggagaagttcgcaggagcagaggctacttatactatagaggcccttatgcatgatggtaaggctctccagtcaggtacaagccacaactttggtgatggatttgccaaagcatttggtatccagtacacagacaaggataataagttaaaatatgttcaccagacttcatggggaacaacaacaagacttattggtgctgttattatgactcacggtgatgattcaggacttgtgcttccacctaaggtagcacctgttcaggttgatgttattcctattatgcagaagaaggcaggcgttcttgacaaggcttatgaagttggacaggctcttaaggcagcagggcttcgtgttaaggttgatgattcagataagaatcctggctggaagttctctgagcaggagatgcgtggtatccctgtaagagttgagatgggaccaagagatatcgaggctaatcaggctgttattgttcgtcgtgatacaagagagaagattactgtatctatcgatgagcttgcagacagaattccagaaattcttgatactatccagaaggatatgcttgagagagcaagagctcacagagaagctcatacatatacagctcttaattatgatgaattcaaggatacagcagctaataaggctggattcatcaaggctatgtggtgtggagaccaggcttgtgaggacaagattaaggaagatactacatgtacatcaagatgtatgccatttgcacaggagaagttaagtgatgtgtgcgtatgctgtggtaagccggctaaggctatggtttactggggtaaggcatattaatcataattatttataggatttttgagaatggagtccctttcggcagtattgccggagggggcttttttataatctggaggggattttacatttatacatattcttgataaaatatatattgatatataattaaaaatatgataacaatatattaaaagaaatatttcttatatctgacgcaattgacatgattttatctaatcaggcagttgcttatcaaagctggatagtcattcagcaataacccattaacacataattgaataatgcaggcttgttttagatatctgtagatgctaatatatttatatagacaatattagtatatgtgcgtggatatctgcctgcaaaagagacggggaggatgtctatggcagagaagaaagacaatgtaacatctaaatttaaggacaatgtattctgtatgctgtacagggataagaagaatcttttagaactgtataatgcacttaacaattcagcttacacgaatgtggatgatttgcaggtgactacattaaacggcggttcatatatgaagtataagaatgatgcttcatttttactatgtatgagcctgtatatgtttgagcagcagtcgagtaagaatcctaatatgccgttaagatttttgcactatgtgtctgatgtattcagggagctgttcagtaattccatgcttcacaggagaagtatgattaagattcctgttccgcgttttgtgacattctacaatggtctggaaaaatgggttgaagatgaggatgaaatcaggctgtcagatatgtacgagattccgacagacaatccggagctggagcttaaagtgcgtgttatcaacattaacgaagatgtacatatccttaataagtgcaaaacgctgcgtgattacatgacatttgttaataaggtgaggttcaagatgggtgttgaaggtgacaatgtcagaattgcagtaacagaggcaatgaacgaatgcatagatgaggatatacttgtcgatttcttcgaacagcacagggaggaggtcgtcgaagtgagtatatatgattatgatgaggaagaagtcagaagagtgttggctgaggagtatgcgcaggaagttgcacagggaatggcgcaggaaatagtagagaaagctgctaaggaggcttctgaaaaagcatttgcggagggcgaacaatctatgatgattaatcagattataaaaaaggtaaagaaatcaaaaactctggagacaatagcctcagaacttgaggaagaagtggcagatatcaagccgatatatgatgtagtgattgcggctgcacctgattacaacattgatataattaaaaataaactcgcaattaattaaaagaatccctcaccaaagccgatgtaattgatatgtatccagaatagaaggcagccggtgagggttattttatgattatattatttgatatgttcaatcattgcaataagagtagctttatcattgagcttagggttctctataacgatatcaagcagggatttcagtgtttcaccgatttcgtgtccctgaaggccatattcaataaggtcattgcctgatatgtcgaggtcttttattgtaaagcagtcaccgcgtgcaagaatatctgttccaagacgctttaatgtgagaagatgctttaccttcgccggattacttattcctgtgatgtcttcagatgcctggattacagccatcataagctcatgccacagaggcaggaaatctctgccatacttattaagggcagtacgaacagccggttcagtttcttctatatccatctttgataattcaacaagctttgatactgtgttaactgtcttgttatccagcttaagtgcacggagagtcttagctgcttcatcaggtgtagaagttatgaaaagtgcagcgtagcgtaagtatatattatcaggtgtgtgttgtaatgttgcaagtattttgcgcttgtagcggctctttagagcattgtcaattaccgggagtattggggcaaaaagtcctgcttctgaatattgcgcaacataatcgggatgtgcagacataagcgttttgccaagctctacatgcacacgctccatgcttattttgctgattgaaggggaaagctttttaattgcattccatgttgcttcatcaatggtaaagccaagctgtgcagaaaatcttatggcacgcatcattcgcagagcgtcctctgtaaatcttaattctggttcaccaacgcagcgtattatttttgtatccaaatcatcaagacccttaaattcatcaacaaatccatcagtgtcgttgtatgccatggcatttatcgtaaaatcacggcggcacaggtcatcaacaagcctgtctgaaaattctacagacttcggatgcctgccatcctcgtattcgccatcaattctgtaggttgtaacttcgtatccggttttatctatcattatagtgacggttccgtgggcgattccagtatcaacagttcttttaaagaaagtttttatctgtgatggaacagcagaagtggttatatcccagtcatctgggtttcgtccaaggatactgtctcttatgcatccgccaacggcatatgctttgaagccgtgttcttcaattgtatgtataatgttcctgacagcttccggcatgtcaatatgaaagttttcaggcatgatttccccctataataatatttattataaatgtgaaaaaagctcacatctatctattataagaaaaaattacattttcatcaagattatgattttcttaattcgtcgtatcattaaatccaaggaatatagcagccataaatgtcataagataaggcagacgcaggcgtatgagcaaagggcgtctgtattaagtgcggaaatgggggattatatgaacgataaatcattggaatgtattagattttatgatattcaggttaataaaatggtaaaaggtcgtggaggagtaattctttttacagacagagggtgcagactttttctcgagtgttcaagaaatgatgggttttatctgagagatgaggcagtgacaaaagcagttagtgatgcaggctttgaaaatgtggatacatatgtgagaaatcaggatggagaactttttactgttggagatgatgggcacagatatgtaatgaagaactggtttggaggcagggaatgtgatgtcaagtctgtgaatgacgtgatggaggcggtaaggactctggcaagacttcatatttgtctaaatgttgtttcgtctaatggtgtaagatatttaaggaataatgtaaatacaaatattacaaagcaatgggaatgtatggcgcttgcagagaccgcagatgagcagcccgagtcagaattaaaggccagtgaaagcatcgtacataatgctgtacattttgacaggggagcagggttacgcaccaatatggaaagacatacaaaagaaattaaaaaggcagctaattatatgcgtggcaagaaaaagaaaaatgaatttgaacagattgcgcttggtgcggttgatacatttttcagggaagcggatgaagcgagcaggaatattaattcaaaacgttttgatgagcgctttgacaggatggaacagactaatgagcttgtgcatggaagctataattatcataatgtgtttcttgatgttggtaatggcggcaatgcagtgactaattttgaaaaatgtcataatgactgtcaggttgcagatctttaccagtttttaagaaaggttatggaaaagcatgactggaatattaatgtggcatacagactggttgatgaatacgacagattaaagccgcttgaagatgatgatattgacatgcttgtgacattattgagctttccagaaaaattctggaagatcataaatcagtactataacgcaggaaaggcgtgggttcctgctaaaaatatagataaattaaagattgttattgaacagaatatgcgcagaagagaattaattgataaaatgtgtggtatgtgataaaatctgatgatacgagggaaaaagtatttgcgaggaatgcttatgaaaagaataattgcagtgtgtatgcttatggtgttaattgtaagtcagacagcatgcacattttccagaaataatgacagggcggtgataccaggaagcagtattacccccgcaccaggtgccgcaaaggagattaagggtgatggagagaatcctacacttacaggagttcttacattgagagatgctgacacgggcagaatgcggtttgtagatataaagacaggaacagaatatgaagtcccttatacaggcagtacagatattcaggatgcttacggaaagataaaagcagcttctaccatggatatgggtggaatatatgatgtatatgtggataagaagggcaaggcggtgaagatacacggaaacagtgatgcctgggtaagatatgatgtttcaggaataaccgtagatgagaattcaaggaagttaagcattggggcttccaatatgatatatgaaagttacacagttgtgctttcaggagaagaacgtataagtattgcacagctcgttgaccaggataagctggttatcaggggcgttggagagaaagtatattcggtgaatgtaactgcaggacacggatatcttaaacttacaggtgtagatgcacttgttggtggttatgtaagcataggtaataaacaattactgggtgttacaaaggatatgctggtgactgcacctgttggaacacatacggttaatgtacgtaatggcaacctgtcagcaagtaagacagtgactatagctaaagatgagactacatcagttgatttttctgaagtacaaagtgatccggttaagatgggggctgttaatttttcagttactccgaagggcgcggttatgagcattgatggtgttgaggttgattattcttcccctgtttctttgacttatggaactcacagaattaagctggtagccaacaattatcaggaatactctgagattataaatgttaactcagcttatgttacgaaggttatcgatatgacttcatccggtacatcaacaagtacagcggctgataatacaagtggatataaggtatcaataacagcacctaagggagcggtactttatgttaatagtgaatacataggaactgttccgtgttcatttgataaatcatctggaaagaagacgattacactttcgcagaatggatataatacagttagttatacaatatcaattgctaatacagcaggagacctgacatatgcatttccagaaatgataagtggaggtacccaggagactacaacacaggtacaggttccaacagtcactcctgcaacaacaaagtcatctacaaagcagagtacgaaaaggagataagagttatgaatattttattttcaccaccagatataaccgaggaagagattcaggcagtttctgaggctttaaggtcaggatggattacaacaggtccaagaactaaagagtttgaaagaaatattgctcagtttacaggctgtaacagggcggcatgtctcaattcagctacagcatgtttagagacagcactccgtctgttaggaatcggtgagggcgatgaggttattgttcctgcatacacttatacagcatctgcaagtgtcgttgcgcatgttaatgcaaagcttgttcttattgatgttgaaaaggacacatatcaccttgattatgacgcgcttgaagctgcaattaatgagagtaccaaggctgtaatacctgtagatataggtggtgttatggttgactatgacaggataagaaagattgtcgagagtaaaaagaatatatttaaggcttcaacaccccttcaggaggcacttggcagagttgcaattgttgctgattctgcacatggtttcggagcaagtgagggtggtgttatgagtggaatgaaggctgactttacaagcttttcatttcatgcagtcaagaaccttacaacagcagaaggcggagctcttacatggagaagtattccgggagttgatgatgaggatatatataagcagataatgctttactcacttcacggacagtctaaggatgcgcttgcaaagactaagcttggtgcatgggaatatgatatcaaaggaacttattacaaatgtaacatgactgatattatggcttctattgggcttgtacagcttaagagatatccgggacttcttaagagaagaagagatataattgagagatatacacaagggattgcagccgatgatgtggatattatgaagcattttacagatgaatatacttcaagtggtcatctgtatcttgtaaggcttcttggaaaggatgttaaggagcgtaatgaactgattacaagacttgctgaggcaggtgttgcaactaatgtacattttaagccgcttccaatgcatacggcatataagaacatgggatttgatattaaggattttccacattcatataatatgtatcgtaatgagattacactgccgcttcatacatgtcttactgatgaacaggtagaatatgtaatagagcagtttaacagaatgaaataatcggacattagttatacaacaacaaaaaggggattgattacgatggagttaagaccatggcagcttcttcctgatgaaatgagaactaaggaagtaagaaaatactataatatacttatgaaacacagaatgtggttagagatgaaaagagtgcttgatgttattgttgctggtattatgctggcagttttaattattccaatgggaataattgcacttgcaatcagacttgattcaccgggacctgtttttttcaggcaggcgagagtaacacagtatggaagaatttttcgtatatacaagttcaggactatggttgacaatgcaagtaagctaggggcagcagtgactgtagataatgattcaagaatcactaaggttggagcatttttacgaaagtacagaatggacgagtttcctcagctttttaatatacttgcaggggatatgactcttgtcggaacaagaccggaagttcctaagtatgttaagaagtacaccaaggagatgtatgcgacacttcttcttcctgccggacttacatcaaggacaagtattgcttataaggatgaggacaagcttcttggtgaggctgttgatgaaaaaagtacagataatatatatctgaatgaagtattaccggcaaaaatgcgttataaccttgaaagtatgaaacattttggcgtgaaagctgatgcggctgtattgtgggatacatttacatcagtagttggaagtgaaagaatgactgttaaaaagtaggtagagtatgtttattacaattgctgttattgcatataacgaggagaatacgataaagaatattcttgatgacataagcaggcaggattatgatcatagtcttatggaggttgtgcttgttgattctgcatccacggatggaacaaaggctgttatgcagaagtttgctgatgagaataagatgggagcaagacagataatcgtgcttgacaatcctaagaagacgcttccgtgtggatggaatgtgctgcttgataattatacaggggaagctgttataagagttgatgcacatgcacatattccggaagattttgtcagcaagaatgttaaggttttagaagaaggcgagatggttgttggtggtgtccgacctaatatagttgatgaagagacaccttggaaggatacgctgcttcttgctgagagttcgatgttcggctcaagcatagcaccttaccgtaatggtgggaatggaacggaagaaaagatatatatgaaatcgctgttccatgctgcatatagaagggaagtttttgaaaaaatcggacattataatgagtctcttgcaagaactgaggataatgaaattcattaccgtatgagaaaagcagggtttaaattaagattctgtccggatataatatcataccagcatacaagaagttcacttcctaagatgcttaagcagaaatatggcaatggatactggattggaaagacaagcaaggtatgtccaggatgcctttctgtatatcattttgttccgtgggcttttgtcatggctattattgttacaacagttgcaagtgtgtcatgtaagctgcttgctgtgaagtcgtttttttctcgtattgtatacggaattacaggacttatgtggggagcatactggctgttggcagtagttatgtcgattgttgcagtaataggagctaagaaggaacgcaataaaacatgttttgcactgccatttttatttttcctgttgcatatttcttatggaattggtacagtatgtgggttagctgctaaaaagcctgctaaagaaacgaggaacagatgatgggtgagactaaaaaggacagaatacagcttctggtaagaagatttttcttgtttttaacagatacatttttattgaatgcatgcgtatatctgtcgcttattatgagatttgatgtaggtattgtatctatagaacctcagtatattagtaattatgtagagaacgtgcttccgtacacgataatgtctctgcttatattctggctgttcagactttatcacagtctgtggcagtatgcgagtatagctgaggtgtacagaattgctgaagcgtgtattattgtagaattagtgcatttcttaagtaataagattatgggtaatatgcttcctagaagctgttattttaatgcggcaatataccttattattgcaatatgtgcaagtcgttttatgtacagaatgataagaactgttcttaacaaatacagaaatattaagacttccaacaatgtaatgattattggtgccggagaggcaactaatgtcattatgagagaaatacagaattcgagctatcttgccaactctaatattgcatgtattattgatgatgaccgccgcaaggttggtaaatacatacgaggcgtcaaggttataggaacaagggacaagattaaggaagcagcaaagctttatgatattgatgagattatatttgcaattccatcagcatctaatgaagttaaaagggatatattaaacatttgtaaagagactgattgtactcttaagattctgccaggtgtatatcagatggtagatggagagattaatgttaattctatccgtaatgttgatgtgcttgaccttcttggaagagacccgattgaagtagatattgaatctatcatgggttatgttaaggataaggtcattatggtaacaggtggtggcggttctattggttcagagctgtgccgccagcttgtaagtcacaagcctaagcagctcattatatttgatatatatgagaataatgcctatgatattcagcaggaattaaagattaattatcctgatgccaatgttgttactcttattggttcgataagaaatgtttcaagacttgaaagcgtatttgcacagtataagccagatattgtatatcatgcagcagcacataagcatgtaccgcttatggaagtcagtcctgatgaggctgttaagaataatgttgttggtacatggaatgttgcaaggatggctgataagtatggggttaagaagtttgttatgataagtacagataaggcggttaatccaactaatgtaatgggagcaacaaagcgtatttgtgagatgattgttcagacgtataacgagatatccaagacagatttcgttgctgtaagattcggtaatgtacttggaagtaacggctcagtcattcctctttttaagagacagattgaggctggtggaccagttacggttacagatcctaatattataagatatttcatgactatacccgaggcggtttcacttgttcttcaggcaggtgcatatgccaaaggtggagagatattcattcttgatatgggcgagcctgttaagattgatgatctcgcaaagaaccttatcagactgtcaggttatacacttggcgtcaacatggaaattaaatacacaggactccgtcctggcgaaaagctctacgaagagcttcttatgaaagaagaaggtcttcaggagacagataacaagcttatccacattggaaaaccaattgagtttgataaagagaatttctttgataaccttgagaagcttaaggaagaagcttattcagaaactggtaatataagagaatcattgaagaaggtggttgatacttatcatccgaatgaacattaatagagaagacctactaattatgttgttttcaagagttgagtaggcatatttctggtgagatttgaattagatattggagaagacctactaacatgctttttataaggatgttggtaggtcttttttatagaaaattgttggaatttattagctgggagatgagatggtgggaaaaagacttactatatagcatatattactaagattagtgtgcttttcaagttgctagttgatttttgggggagcgaaaaacatctactcaattaacaactttggttaattgagtaggtgttgtgtgaaagaattgcaccattaaagcttcattgactataaaagatattcattaatattaatatcaatggtattggaattgagaggaatagaagaagattcgaaggtggcaataaagttcctgcctaatacataaccggatttagcgtaatcgttaatcttctttaatgttttgttcatataatcagaatctcccataatgccgaagtgttcccatatgaattcctgacgggtattaatattgaggcaggtaaaatcaggatggacggttaccccggtagaaagcacaagcggatattcatacttatatggaatattgtgctgttttagtttgttggcgattattaattcggatttagaacgcacctgttctccgttatcagagtagaagtcaggagtatcatcaggaatgtcaagagaattatattgaacattattccagagattcaatgtatcttcggcaggtgtatagactggtgtaataagttcctgtcttatctcattaagagaattgtataaatgttcaatctgttcaggagaatagttcttaagaaaagtttcaatagcatgaagttcatgttggatttcatgcttgactttcagatcatattccttctgagccagactcttcgcaagattaagattagatttcttttttatgtatgttcctgttctgtcagtagaatctgttctgtgataatattgatgggcgttgccacgcttagcaatgcggagtgttccgtcaggggcattacttagtcttgaattgatagtgttgagaagcaaaataagttcggattgacgattggaaacagcactgatagttaaatcaggtgataaaagcattgcatttaatattctgttattggctatatggttcatatatcaacctccttatgtaattatattaatactatacaatataactatgataaatacaatatcaaaaatatatataaatggtgaaatgataagaaaaaattttgctaggataggggatgcctacgaaacaaggtaaagtctgacgaatagtgggtgaaataaaacaggaagaaagttgttggaagagagaaagcctacgaaattatgccaagctgtgttatcagtaggtttttcgacagcagattcttaaccaggacaggaaaataaagaagaaaagacctacaaaaaagtaaaaaatatgtagattagtaggtgaatgctatatgaagagtcagaaaaagagatgaaaaagcgcactaattaaataaaaaagaggagattagtaggtctttcggcatagtagtgcgaaaaaccagctaatctcccctgaaaaccggccaatttcctttagaaaccagctaatctcccctgaaaaccggataaaagtattcataaccgggtaaaaatatccagaatcagataaataccttgaaagtaagacaaatacactaaaagcaagataaaatctagaaatataatatctcgaaattagtcaaacttaaatgtgttctcaagtgtatcccaaagctggtccttatcacttaagttaagctttgttccatcgcttaaagcatagccttcacctgaagctgagccgttgtaagtacctgtaagctctggccattcaataccgattgccgggtcattccatgcgagaccaccctcgtcgttaggatgatagaagtcatcgcacttgtagcagaattctgctgtatcagtaagaacgaggaatccatgtgcaaatcctttagggataaggaactgcttcttattctcttctgtgagaaggattccgtaccaatttccataagtttcagagtctgtacgaaggtcaacagctacatcaaaaacggctcccttgatagctcttacaagctttgtctgtgggaaatgcttctggaagtgaagaccacgaagaacacccttagtactcatagactgattgtcctgaacaaagttaatattgataccagcttcttccatatcacgctggctgtatgtttccataaaataaccacggttatcgccgtgaacagcaggagtgatgacacaaagtccttcgatacctgcgacattcttttcaattgtaatctgtcccatgataaaatctcctttgaaatattaaatctcaccgatttcctttaagaatctgtgaagagcatcctgccatgttggaagcggagtgaatccgttagcagtaagcttgctcttatctaaacggctgttaaaaggtcttgcagctttagaaatgccgtattcagcagtagttacaggtgtaaccttagtagaaagacctgcctgtgcatagatttccttagtaaagtcataccatgaaatgtatccaccttcattagttgcatggtaataaccgtatttgtcagtttcaaccatatcaacaagaagtcttgcaagatctaatgtgtaagttggtgtaccaatctggtcgttgacaacacgaacctcgtcatgagtctttcctacattaagcatagtcttaataaagttctttccattaacaccaaatacccatgcaatacgcacgataaagtatttatcaagagtgttagaaacagcaagttctccggcaagcttagtctctccatatacattaagaggcttgtagtccttgcagtctggttcccaaggtgtttcaccctgaccatcaaatacataatcagtactgatgtataccatcttgcagtcaagctgtttgcagacattggcaatattctgagtaccatctgcattgatagccttaaccttggctttcttatcatcatcttcagcagcgtcaacggctgtccatgctgcgcagtgaattacaacatcaggtgaaaccttagtgataacttcagaaacctgggcagcatcagttatatccataggtacatattcggctgttgtgacagcgcttccatcagcaactcctgaatattcaggtgcgatgtcgctgccaacgcctgtatgacctctgcctatcagttcattcataacgtcgtggccaagctgaccgccaacgccggtaactaatatcttcatgtcaaatctccttacagaataaatgtgttaattagcggttgccatacattttctcatagtagttctgatattcgccagaaatgattgtctcccaccattccttattatcaagataccactgaattgtcttcttgataccatcttcaaacttagtttctggaagccatcctaattcattgtgaatcttagttgggtcgatagcgtaacgcatatcatgtccctttctgtcacctacatgaacgataagtgattcaggcttgccaagctccttgcagataagcttaacgatatcaatatttctcttctcgttgtgtccaccaacattgtatacttcaccaacacgtcccttgtggatgataaggtcgatagccttgcagtgatcctcaacatagagccagtcacgaacgttaagaccttcgccataaactggaagtggcttatcgttaagagcattagcaatcataagagggataagcttctctgggaagtggtatggtccatagttattagagcatcttgaaatagtaacaggaagtccataagttctgtggtaggcaagaacaagtaagtctgcgccagcctttgatgagctgtatgggcttgatgtatggattggggtctcttctgtgaagaaaaggtcaggtctgtcaagtggaagatcaccgtatacttcatcagtagatacctgatggtatctctgaataccgtactttctgcaggcatccataagaacctgtgtaccaagaatattagttgtaaggaaaacttccgggttctcgatagaacggtcaacgtgtgactcagcagcgaagtttacaaccatatccggatgctcttcttcgaaaagtttgtaaacagcttcgcggtctgtgatgctttccttaacgaatctgaagttagggttagacataacaggctcaagagttgaaagattacctgcatatgtgaggcagtcaagacagatgattctgtagtctgggtatttgtttaacatgtgaaatataaagttacttccgataaatccggctccaccggtaacaataattgtcataattaatctccttaatatttaaaatgtgttcttatatgaaaaatgttttaactaaatgcacttaattattcatgaagcttgtcgacatatttgccgtccaagacatcctttaagtactgaccatactggttcttctttaatacttcatataccttgaggacatcatctttgttaatccagccgtttaagtaagcgatttcttcaagacatgcaatttttctgtgctgatgagtctcaacagtcttaacaaagttagtagcttctacaagactttcatgtgttcctgtatcaagccatgtaaatccctgaccgagaagctctacatttaaagtacccttctctaagtagatacggttaagatcagtaatctcaagctcgcctcttgcagatggctttaagttcttagcgtattcaacaaccttgttgtcgtagaagtaaagacctgttacacagtagttgctcttaggctgtgctggcttttcttcgatagatacggcctttccttcattattaaattcaacaataccaaatctttcaggatcatcaacatagtagccaaatactgttgcaccctttcctgattcagcattctcaacagctgccttaagtcttttcttaagaccgtgacctgcaaatatattatcaccaagaaccatggcaacagtgtcatcaccgatgaattcctcaccgataataaatgcctgtgcaagtccgtccgggcttggctgtacagcgtaagtaaggttgacaccgaactggcttccgtcctttaaaagctctttgaatctaggagtatcctgtggtgtagagatgataagaatatctctgataccagcactcataagaactgagagtggataataaatcattggcttatcatagattggaagaagctgtttactagttaccattgtgagtgggtaaaggcgtgtgccagaaccaccagctaaaataatacccttcataattgaagttcctccttgtttgttaaaatgttatgttaattttcaagtagacattttttaagtcatgtatataataaaaggtgacgcagcgtcaccttcaagtgttttttgaaaaatttttacaaggagtaatatatgcataaagagggatattattcttcgggggaattcgcgaagaaagcaaatgtttcagtaaggactataagatattatgaccagcagaacatattaaagccatcacttcttactgatgagggagtgagattttatacagattcagattttacaaggttacagcagatactattgcttaaatatcttggatttacactggatgatataagaaatatgacaattggtgattcagattatcatgtgcttaagaattcgcttgaacttcagaagcgtatgatacaggacaagattgcacagatgcagctcgtgtgtaaagctattgaagaaacagaagactctattaaagagggaaaaggagttgactggagtaatatgctggagattatccatcttactaatatggaagacagcatgaagaatcagtacattaatgctggaaatatatctgcaagaattaatcttcataacaggttttcagttaataaacagggatggtttccgtgggtatatgagcagtgtggtattgttaaggggataagaattcttgagattgggtgtggtgatggaacattgtgggttgacaatataggtcagcttgccatgacaggaaagagaaatgaattttcagggaagaaaaaaaacatatatatagagcttacagatatatcagaaggcatgataagtgatgcgagaagaaatataaaaaaagcaacagagagctggaaggaaagagatattgatgtgtcattcaggttcagagtggcttcatgcgaaaagacaggggcaaagtatgaatcgtatgatctggtgattgctaatcatgtgctgttttattgtaaaaatgtcaataaggcacttgatgaaattgtgagggtgttaaagcctggaggagtgcttgtgtgcagtacatatggcagcaggcatatgcaggagataagccgccttgtgtcgggatacgataagagaattgcacttgaagcagataagctttttgaaaaattcggacttgataatggagataagatattaaaaaaacatttttcagatgttgagagaagagattataaagatgcgcttgttgttgatgaagcagaaccgctggtagattatatactatcatgtcatggcaatcagaaagagtaccttgtggataagtatacagattttaaaaaatatgtagagaaaaagcttgtgaaacccatgacaataaccaaagaggctggtgtatttgtgtgtagaaaataatgtatagcaattatatctataatatggtaaaatcaaaagaaacatgttttgttacaggggtagtttgaacatgcatattatggaaatactctgatagaatgaaagattatttattgggggcagagaatacagttatgaagaaattaaagattgctgttgatgcaagaactttaggcagcagaccaagcggtgtgggcatgtatcttaatgacttcttagaacagctcataacatatgatgaatttgaatggattctttttacagatgttaaagagagtgaatatattaagagatttgaggctagaggaatcaaggttattgaatggggaaagcctgtatatagaagtgcgggtgtgtatgcatattttgcatttattaagaaagaattaaagcaggtgaaaccggatatattctgggaggttaattcgattattcctattaatctcggtggaagctttaagacacttatcacaatacacgatatgtttcctattcagtatgtaagatactttggaaaaatatacagctattattttaagtttaatcttggcgtgactttaagacatacagatatgattctgtataattcggagcagactaaggacgacacagagatgtattttccaaaggctaagaagattccaagctgcaatgcctacattatatctaatccgcttacaagatatgtaccgcctaaggatgagaattatttcttgtatgtaggtaatatggagaagcgtaagggcgttgatatccttgttaaagcgtacagaagatacagggaagaaggcggaacaagacctcttattcttgccggtaagatgcaggaggatgatattgagcagcttcttgagactgcacttacagaggttgaaggtcttacttatcttggttatgtatcacacactacaagatatgacttgtataacaattgttcatgctttgtgtttccttctatggcagaaggcttcggaatgcctatattagaggtaatgaagcataataagccaatacttgcaagtaatcttaaaatatttgacgaggtagtaggtgactgtgtggaaagattcagtcttgccggtgatgatgatgataaggttataagtcttgtgaatggaatgaagaatatagataagaagattaattctggacttgttgatgagaatgcatacagacatgcgttggacaagtatacaccggaaagacttggtggtatggtgagagactttattaacagccagatgaataacagatagaatgttgaggtttatatgggtttatcaaaattttttcttaatacgggagaagcattgagaccggtgctgacaaagattattcctatgaagctattaagtaagatgaaagcaggaataattaataatgccacagacaagctgtcggcagactctattgagaaatatgagacaggaagatacaaatgtggtgccaatataataggtaatattaagggcgataatggacttggacaaagcgcaagaattatgtgcaggctgcttgatgagaataaagaacctcatgttataaaggatttctttgttccaccaggaggttcaagaagcaatgatacgtatgatgacagactcacagaggagcttccttttgatgtgaatattattcatgttaatgcaagtgaattcatggtagcatatttaagccttggaaaagaagtatgggattacagatataacataggatactgggcatgggagctggagacatttccagaagagtggcttccggcattcaagcttgttgatgaagtctggacaccgtcggatttcgttacgaatactttgaagaaatatacagacaagcctgtgataacagtcccacactgtgttgcaccgcagacggatactgtgaagtttgatagaaagcattttaatctgccggaagataagttcttattccttgtaatgtataacagtggaagcgttatggaaagaaagaatccgcttgccgctattaaagcatttaaagaagcgttctgcaaagatgaacagactaaagaaaaatacaaggatgtcggacttgttatcaagataagcgaggcagaattatctgcagaagatgaaaagattattggttctgtaatagaggactgcgacaacatttattatatgtgtggtcatatgggaagatgtgaggttaatacacttcttgcagatgtggatgtgtatgtttcacttcaccgttcagaaggcttcggacttgttatggctgagtcaatgtatgttggtacacctgttattgcaactgactggtcaggcaatacagagtttatgaacagtgatacagcatgcatggtcggttacgacatgatagagcttgataaggactatgagccgttcaagaagggcaatgtatgggctgatgcacatgttgatgaggcagcagactatatgagaaggctttatgaggataaggatttctacgaaagaattgctgggaatggtcagaaatatgccagggaacatctggcgtacaagcgttctgcggatattgtcagtgagaggttaaagaaaattcatggagagaattgatgtttttaacaagagcatttgagataatcaatagagagggttttcttacattcaagtatgcgttatggcagaaaatgcgtgagaatatgactgatgaaaaaatttatcagttatatataaagaatgtagaaccaagacagaacatcatatcagaaaatcaatgtgttcaggtagtgtctgttaaagaaaataatactgtaaagcaagtgatggaagcggtagaaaaagtatctacagaatatgttgtattgtgcagtgatgattacgaattgtgtgagaattatgagaaaaaagtgtctcattatatattaattcagaaaaaagctggcagaaatctacaatacatttatagtgattcagatactattaatgacaatggaaaacgggaaaatccagattgtaaacccgattattcatggaacacactgctttcatttaattatattggcaatgtgtttgctgtaaaaagacagttttttcttcatagaatgaatgagtttgtagataattttggttctgatagtaagtttgacagttacaagacttcattgttcctgttatcagataattcagcagagaatgttggacatattcatcagattcttgcccataaaaaggcggattataaagaaaaatcagatatttctgattataaatgttttctgcctgaattaaagaacaaaaatgtatgtgtggttactgataaacataataaaattgttcagcatatacattatcctctttctgaggatgattgtgtcagcatcattattccgtccaaagataacccggaaattcttaaggtttgtcttgaaagtataaaaaaatatacgaaatacacgaaatatgaaattgttgttattgataatggaagtgatgaagacaacagaaatgaatataaaaagctgatagctgaatttggagaaaatgcttcgtacacatacgaaagatttgattttaatttttctaaaatgtgtaatataggggcaaagaaagcgactggcaacatgttattatttcttaatgatgacattgaaataatcggacaggattatgaagacacagactggctttcagtacttgccgggcaggcaaagcaggaaagtaccggcgcggttggtgcaaagcttctgtatccggactcatcatatatccagcatgtgggtgtgattaattatgaatcaagctgttttgcgcatctgtatgcgaaggcagtagatgatgagaatatcaaggctcacagaaattacgctgattatgattgcctgtgtgttacaggagcatgctttatgattgagaaggctaaattcgataaagctggtggatttgatgaagcatttgaagtgacacataatgatgttgatatatgcctgactctgtatgaacagggatattacaatgttttaagaaatgatgtggttcttttccatcatgaatcattctcaagaggtgatgatgaggttgatgaagagaagaacagacgtaatatgcatgcaagggatatggtatatgaaaaacatcccgaacttgagaaatacgaccctttctatagtccgcttcttacgcagacggagaataactacagatttggagatgagatatattctgtaatatacagaaaacctcagaaagctgacagattaaagctgactgccggatatattgaggtatcacctacagttaaggtgacagaaacaggatatcatgatgatatgcagtttaggggatttgcatataacggaaataaagcgtattataatcccgtaatttttctgtggaatgaacaggattgttataggattaaggcacagtcagtatgtgacagagtatttcatttaagaaaagatgtagacaggaatattaactatgcaccgtttttttgtggaatagatacaacagatatggaaagcggcacatacagatgtgctatcagagctaatggtaaatattacgatgcacaggcgtgtatcgtgattaatgatgaagatgaagatagtattgcacaataaggaggattatatgaagactacagcacttattatggcaggtggtaagggagaacgattctggccaaagagtcgtgttaatatgccaaagcagttcctttctcttacagatgacggaaagactatgatacagctcacagttgagcgaatcagcccattggttgatattaaggacgtttatgttgcaactaacaagaactacagagaacttgtaaagcagcagcttcctggtattccagaggagaatatcttatgtgagcctataggaagaaatacagcaccatgtgtaggtcttggagcagttcatgttgcaaccaaatatgatgatgcagttatgattgttcttccatcagaccatctgattaagaataatgaagtatttgcagatacatttaaagaagcagttcagattgcagaagagggtgctaaccttgtaacagtaggtattactccgaattatccggagacaggctatggctatattaagtataatcaggcagataagaagaataatgcttattcagttgagaagtttgttgagaagccagaccttgagacagctaaatcataccttgctgacggaacatatctgtggaacagtggaatgttcgtatggaaggtatctacaatattagactgctttaagaagttcatgcctgacacatatgaaggattattaaagattaaggctgcagttggaacagcagatgaaaatgcagtgcttgaggcagaattccctaatcttgagtcacagtcagttgactacggtattatggagaaggcagattctatctacacacttccaggcaacttcggttgggatgatgtaggttcatggcttgcagtaggaagaatcaagaagaatgatgataacagcaatgtaattaacggcaatgtagttgcagttaatactaagggctgtgtaatagaaggtggcgaaaaacttattgccacagttggtttaagagatatcgtagttgttgatactaaagatgcaactcttattacaactaaagagaatgcaggcgaaatcaagcaggtgcttgcaaagcttcgtgaagaaggaaagaatgagtatctttaattagaaagaggaattttatggataaaagagtactggttattattccagcttataatgaggaagagaatattgtcagagtggttgataatcttatcaataactatgggcagctggattatgttgttatcaatgatggctcaagagataacactgctaaattatgcagggaacatggatataatctggtagatcttcctgttaatcttggactggcaggtgcatttcaggctggcatgaagtatgcactggttaatgattatgactatgccatccagtttgacggggatggacagcataatccacagttcatagaaggtatggagcagatggctgaaaaggaaaatcttgatattgtcataggatcaagatttgcatcagagaagaagccatttaccgcaaggatgctgggaagcaggcttattgaattctgtatacttgttacatgccataagagaataaaagatccaacatcaggaatgagaatgtttaacagaagaatgattcacaaacttgctacaagcatgaattttggtccggaaccagatactgtggcatatcttacaagatgtggggctaaggttggcgaatatcaggttgagatgaatgacagaatcgctggagaaagttatcttaatccaataaacagtatgaagtatatgtttaatatgaccacatctatactttttgtacagtggtttagaaagagagggctgtaagtatgacattaagtttaaaagttgttttaatagttatttcgatacttacatgcttttatattgcaagaaagttaagaaaatcacagatgaatattaatgacactgttttctggatattttttgcacttgtgcttgtgttattaagtgtgtttccgggaattgcaggatggggagcagatgttttaggatttcaggcagatgttaatttcgtatttgttgttgttatttttctgttgatattaagggttttcgttatgtctattaagatatcagttcttgaagacaaattaagaaatcttacagaagaaatagctgtcagaaataatatgtcagagaaaaagtaagctaaggaaggaaatagttatgaataaggacataaatactaatcacacatttgcaatatgtgcgtataaagagagtccataccttgaagagtgtatacaatctcttatgaatcagactgttaagtctgatatattgatagctacagcaacaccaagtaagtatattgatgatattgcagcaaaatataatctaaaggtatatgtcaatcatggggaacatggaattacacaggactggaattttgcgtattctaaagctgaaacagattatgtgactattgcacaccaggatgataagtataatccttcatatgtggaaaatcttatggcatatacaaaaaatgcgaaaagaccattaattttctttacagattatgcagaaattcgtgatggaaacattgttgaatccaacaaattattgagaattaagagaatcatgttattcatattgagacctaagtcaatgtggggaagcagatttgcaagaagaagagtactttctatgggatctccaatatgctgtccatctataacatactataaaccaaatcttatggaaccggtgttcttaaatggtttcagatctaatgaagactgggaggcagaggaaagaatatcacaattagatggagaattcatattctgtaacaagattctgacatatcacaggatacatgaagattcagaaacatctaagataatacatgacagtaaaagatcagaagaagattatgcaatgtatcgtaagttctggccatctggtatagcacgtatactgactaagttatacagcagcagtgaaaagtcaaataatatcaagtaaaagggaataattaacaatgaaggaatacgatgaagcaactttgaaaaaagtacagcagaccgaattgggaatacttaaggattttattaaggtatgtgatgagaataatcttacatggtttggcgatgcaggttcaggaattggagcattaagacataaaggatttattccatgggatgatgatattgatgttgtcctgccaagaaaagattttaacaagatgatagaagtctttaaaagagattatagtgataaatatactatagctaatgttgagactatggaaaattatccgttgatgacgacaagacttatgttaaagggaactaaatttgttgaagagccattgaaaaatctgaaatgcgaattaggaatattccttgacatatatccatatgataatattccggacagtgatgaggaattaaagaaacaggcaaaacgtgcatggttctggagcaaagtacttatattaagacatgttgcatttccggtgcttccgtataaaggctttaaggcaaagcttacacatgcagttacggggcttatccatgcaggaatggttgtgttcagaatatctcataaatggattgcaggaaaatgtcttgagatagccaatatgtataatgataaagaaacaaagagaatggcatttttgtttgatactaatccatattggcacataatggttaaagaagaggcatttcctttacagatatatgattttgaggatgtcaagatgcctttgccagcatgcgaagataaaaagttgagaaaaatgtatggtaactatatggaacttccaccagtggaaaagagaaaaaatcactatccatataaacttgaattcaatgattaagaggtttgaatgaattttatatacaaaataatgggtgttgacaaaaaaccggatgataaatataaatatatctggtttactatgggaacagcctgttttgctttagcaacactggtaatgacaatcataataagccgtttactaggagaaacacaggctggaatgttttcagtgggtttatcaattgcacagtggcttgttacaattgcttattttgaaataagaacatttcaggttacagatgtaagaaatgaatattcttttaagtattatctgacattaagaattttaatgtgtataataacatttctggctagtattgtttatgttgtatttaataattatgatatacagaaagtgattattatattgcttgtctgcttatataagatatcggattctatagcagatacatttgaaggagaatttcagaaggaagacagaatagatatttcaggaaagtctgaattttacagagtgtttttcagcatactggttcttgttatagctgttgcagtaagcaaaaatcttatattgtcacttattattatgaatgtagttgcatatggaatgattgtactccttgatatcagcattgctgttaaacgtgtaagtgtaagaatgacaggggacatgaaaagattatgggaacttgtaaaaatgtgtattccactagcagtcagcacatttcttagtacttatattattaattcatcaaagctgtcagttgacagggttcttggtgatgaagcacaattgtattacactgcagtttttatgcccaatatggtgattaatctttttagtggaataatatttaaaccgatgcagactgccatggcagttaattattatgaaaagaaatataaaaatttctggcatattataagcaaaatgattttaataataacaggatttacattcgtatgtgaggttggagcatatatattaggaattccggttttatcatggctgtacggagttaatcttaaagaatataaacttacactgctattattattattgtgtggtggagttaatgcaattaatattattttttattacgttcttgcaattatgcgtaagcaaaaatatatgacaattctgtatatcatagtatgtctggtatcatttttaataatggatactatgacaggcaggatgggacttatgggagcgtcattaggatatctgatacttgtatcattgctggcagcattattgttagtgtatatcattattcagaccaggaggaatacaaaaaatgaatagcaataaacagtatgaccctaaaatacttaggaaattacagctgtcagaattgtcagtttttaaggattttataaaaatatgtgaagaaaataatctgcagtatttcttgtttgccggatgcgctattggtgtagaacgacatcaggggtttattccatgggatgatgatattgatataggaatgctaagggaagattatgacaagataattaagataataagagaaaaatatagtgacaaatataatgtattagacatagattcttataaaacatttccattttataatgctgaaattgcaagaaaaggaacaaagaatataccatttgtttttagagatgctaatgttcctatgggaatagatgtggcaatttatccgtttgataatgttcctgatgataaaggggcacgaaaaagacagactatgtcagtatttttctggagtaagcttcgaattttacgtgagtttgacagaccggtgctttttctaaagggatggaagagaaagcttgtaagtgcaatctgtataatagctaacagaattcttaagtggactcatttttcaagaaattttattaacaaaagatatttaaagagtgcaacaaaatataatggacagaagacagagtgggtatcatgtttctttggagagatgcatccgttaaagcaggccataagatatgatgatttatttccacttgcagaaggtccttttgaggatattgttgttaagataccaaagaataatgatgtatatttaaagcgtatgtttggtgattatatggtgattccacctgaaagcgaaagaaagaatcacttatcagaaatattagaattcggaccatttgaagaagaaataaatgttgattagaatgtaataacatcggaggatataatggcagaggttaaggtgattagtaaaaagaaaaaactgatagtgacatttataataatgctgatattagtatttttatttaacagagctatgtactggacggaattcagtacatggaaaaacaaagttatggtagcagtaataagcctgacaggtgttattggaatgccattatttcttacatatgttaaatcagtatctgattatatcgatatgtttataagcaataagataaatcagattaaagcattaaaggataaccggaaaaaggtgctgttatatacagcactttttgtggttattattatagcagctgttttatcagaaaaacttatattaagcagaatatctggcagctattcaaatcatagaatgtatttctgtataggtgcaggaatacttatatttgcaattgtgttgtgtggaaagattgcatataagcgtgtcgaggttatatttgcagcagcagctcttataatgggaattacttatataatggtttctccaagaaatctgcttgtaacatgggatgatgaaactcattatttaagaagtgtctcaatagcagatgcctttgataataccaagtataatgcagaaagctcattttatgattcacaggcagcaacatatctgtattctcagggagaaataacagaggaagaatacgaagcaattcttaataatgtcgaatatcaatatgaactgaaattaacagatatcagatttggaagtgagataggaaaagaatttgttgcatatattccggcggcagctggcataattatgggaagggcgttgggactgtcatttttccatacatttatgctttctaaaatggtaatattattcacttatgttttagtaatgtattttgcaattaaaaagctaaagaatggtaagattcttctggctgtaattggactatcatccacaacgatgttcatggcatcgacaatgtcatatgattactgggtaatagggtttacaactcttgggtattcattctttatttctgaacttcagaacagggataagaaattagaatatagaaatatgataatgatgaatatctgctttttgctgggaatagcaccaaaggcaatatattttgtattaatgtttgttcttttattcatgccaaaggataaatttgttgataaaaagcaaagaaagatatattatacattaattgtaggtgtagcagtatttcttatgatgacatttctgcttcctatgcttattggttcctcaggaactggtgatacaagagggggagacgctgttaattctacagaacagattaaatatatactttctaatccgggtgagtatacaggaacgctgttaaatttccttaaagaatatcttgatcttgactatgccgaagaatttattacttcaatggcatacatgggatatggaatgggaacaactataaccttgatgttaatggctgtattgatgtatattgacagggatgagaaaaagataaaaataccatgtgtaagaggcgcttatttctttagtgccgcagtatgcatagttttagtagcaacggccttatatgtatcatttacggaggttggtgccaactatattgcaggatgtcagccgagatatctgctgcctatcctgtttccgacagcatattttataggtgttgacggagttcagacaaagattaataaaaatgtaatgacagttgtatcaataagtataatgtcttacttttttatggcaggaatgtggaatacatgtttttagtaagtattaagtgtgatatatgaggatgtaaaaatggataaaaagaaagaaaaaaagaatataaaagattttattcctgctgttttggtatcattagcagcaagttttatgcttatggtatttgcaccaatagagatatattattccaatcaggatcagttctggtttgagataaaacagctgattccggttgtggcatgcctttttgtgcttttatttattgtgagtcttattatattaggcataatgtttttaataaatacaaaggtttataatattggacttgcaatgtattttatagcatttataagttcatatattcaggggaatttccttgttaagaatcttccgggattagatggtacacagccggtatggaaggattatatatctgaagatataaaaaccattgttgtatgggttgttatatcagcaatagttatagcattttcaataaaattcaagccggtaattatgagaaaagcagtaagtatagtatcagtatgcatgttccttatgattgctgttactatggtaactgtagttcttacaactaaggtggttgataaagattatgaaatggttgttacagacaaggatgaatttgagatgtcttcagacaccaattttataatattactgttggatgcaatggaaggtggaacatataatgaggttgcccaaaaccatcctgaatatgcagaaataatgaaagattttacatattatgataatacagtatgcggatatactttcaccaaacaatcaattccatttattttatcaggaatatggtatgaaaatgagagaccttttgaggattatgcggcagatgcatatactaattcaccatttctaacaaagttaacacagaaaggttataaaatgtctctttatgagcctgaattatatacaacagatgaggaactgtataaattcagtaacattataaagaataaaacaggaataagttcatatgttacatttttaaagagagaaatacagataagcggatataagtatgcaccatttgtacttaagagattctgcatggtaggagctcaggattttgaggatttcagagctaatcctgatgattgtaaggcatatacatatgataacgaaacattttatgatgaagctaaaaattctgaactaacaacaactaatgataaaacatttaagtttatacatatatggggtgcacatgttccatttgtctttgacaaagacatgaacagaatagaagaaggtacttatgcacagaatgtagaagcatgtatgacaatgacagatgcatatcttaagaaacttaaagaaaatggtgtatatgataattctgttattattgttatggcagatcatggatatgggctttcttatggaccaagaaacagacagcatccagttctttttgtaaaaggaaagaatgaaagtcatgattacacagtgtcagaagcccctatatcttatgatgatttacaggaagctttttcaagacttcttgatggggcaacgggtgaggaagtattcgattataaagagggagacgaaagaaagcgcagatatctttattttgagtatgaacatgaagaaattcttgaggaattttatcaggaaggatatgcgggagatttagatacattgaaagcaacaggcagaaaatatatatatagtgagtaaatgatattatgtttttataatggtatagatgtatagatggaggagtaatcatgcaacagaagctaaagccgtatataaaatgtctgatatttatagcaggattagtagttattgtggcattatcagattttctttttgcaaaaacgggatatattaattatataatcagacaagcagattctaaagagaataatgagaatgtatttattcttggtgcatcacatgcgaggtgtgcgatagatccggctgctattgagaaaaattcggatgacagagtattaaatatgtctataccaggagaaacaataaaagattcatattatcttatacaggaacttaacagaactaacgatgtggaaaaagttatactggatatagattataactactggtatggaaatttaggtgaaggatgttttgctgaaccgtttctatataaccagtataggtggacttcaccggtaaaatggaagtacctgattgaaaatacagatatgatggatttcagaaatgcatttactaaaaaatttgtatataaatacgaattagaagacataaaagctaatgtgaaacagaaaatgtcgaaagactataaggatgccaatatatattcacttgatacaagtgatgcaggtggtccatatacaggtaagggattctttgcattaccgcttccggcaggaaatccagttggagaggaatatgtcaaaggtcagatggggattgaaaaacaagatgttaatccttatccggaaaaatattttagaaaacttgtcaaatattgcaaagataataatattgacttagtctgtgtgacatcacctataacaccatcaagtaaaaagagacttggaatagaagaggcttacagaaagctggaactcttatttgatgaacttggtgtcagatattatgattttaacttatgcttacaagaagtgttagaaactaaagatacagattttatcgataaagaaggacatatgggaggcgaacttgcttatagatattcagctgtattagcagaggttcttgaagaggatgagaaaaagacgcttgatacttcagattatttttatgatacatatgaaaagatgtatcagagtataggagaatagatatgtcattcacaacaacagtatattttgtgtttttattaataggactagtattttattatctgattcctaaaaattatagatggacagttctgctcgttatgagttatatttattatctgtcatatagacttaaggcagtagtgtttattttatttacgacaataacggtttatttgttaggaatcatgcttgaacgtatccagaatggagctgatgcgtatctggcacagaataaacaggtgctgtcaagagaagaaaagaaaagttacaagaataagataaagcataaaaaaagaatatatcttgttattgcattattgcttaattttggaatgcttgcagcaataaagtatagtagttttgctataagtggagctaactatatattaagagctgttggaactcataaacagttttcattatttacaatagttgctccaattggaatatctttttttacatttcaggcaatgtcatatataattgatatatatcaggggaaatatgcatgcgaaaaaaatttctttaagtttgcactgtttgtatcgttttttcctcagataatgcagggaccaataggaagatataacagacttgcaccaactctttttgagggaaacagctattcattaaagaatatccagtttggaatccagagaataggatggggtatttttaagaaacttattatggcagacagggctggagtatttgtaaatgctgcatttgcagatagcaaccagtttcatggaatgataagaataataggacttcttatgtattcagtacagttatatatggatttttctggtggaattgatatagttatcggttctgcgcagatgtttggtgttcgtatggacgaaaacttcagacaaccatatttttctaaatccataggagaattctggcgtagatggcatattacactgggaacatggatgaaggattacatattctatccattttctttatccaagtggtctaataaggctgctaaatggggaaagaagcatttaggagatcatcttggaaaaatgcttccaatatgttttgcaaatctgcttatattctttattgttggtgtatggcatggttcagaggcaagatatattgtatatggattgtataatggtgttataattgcattaagtaatcttttatcccctgtttataagaaaggttttaaggtgtttcatattaattctgaaagcaggatatggaaggcttttcagatattaagaacatttatacttataaatataggatgggtatttgatgtaagtgtcagtggaatgcatagcgcaataactacattaaagatgtttattgtaaatcttgactttgcacaggtgaatgcacagacatttgctgcaattggattagagacaagagattttgtgataatcggaatcgggtgtatagttgttttaattgtcagtataattaaagaaatgggagttaatgtaagagaagctcttgcgttaaagccattgccagtaagatgggcagtatattatgcattttttgctgcaataataatacttagttatgtaacagataacagtggatttatgtacgcggcattttaatcagtagaatggagagagtatgaatcagattaaagaaatatatgaatacagggaaatgataataagtcttgttcgaaaggatttgagaggaagatataagggatcagttcttggatttttctggacgtttttaaaccctttgttacagcttgttgtatttacacttgtattttctattattatgaaacaggaatacgagcagtattacatattcttatttgttgcacttgtaccatggatgttctttgcatcgagtgtacaggatggctcgacaagtgttttaagagataaagaaatggttaaaaagatatattttccacgagaagtactgcctattgcaactgtaacaagtggatttgtgaatatgcttcttacgtttcttgttatatttgttgtcctgattttttcaggaaggggaattaatccggttgcgttattatgccttcctgttgttatgatagttgaatatattctctgccttggtgttggacttatcgtagcatcagtaacagtatatcttagagatttacaatatattcttggaattattgtcatggcactgcagtatcttacacctgtaatgtatggagttgatgttgttgagaatgcacatgttggtaaatggctgattacaatgtttaaccttaatcccatgacatcaattattaagatatacaggcagattctttattataaagttgttccagaattaagtgaccttttattatcacttgttatgggaattgtatttattgttattggagaattgctttttacgaagcttcaaaaaggatttgcagaagaattttaacagatatatgcatatagaaagaaagagagattaccatggaaaatcaggtagcaattgaagtaaaaaatgtcactaagagctttaaggtttactatgataagggaaaagaattaaaagaaaaaatgcttttctggaagagaaacagatacgaaaaccgtgttgttctcgatgatgttagcttcactatcaaaagaggtgaagctgtcggtttagtaggaaagaatggttgtggtaaaagtacaacacttaagatgttaacaagaattatttatccggattccggttcaatcacaatgcatggaagagtttcttcacttattgagcttggagcagggtttcatccagatatgacaggaagagaaaatatctacaccaatgcatctatttttggacttacaaagaaggaaattgatgccagactggatgatattataagtttttcagaattaggccagtatattgataatcccgtaagaacatattcatcaggtatgtacatgagacttgcattttcggtagctattaacgttgatgcagatattcttcttgtggatgaaatacttgctgttggagatgcgaatttccagacaaaatgttttaacaagataagagaaatcaaaggacagggaacaacaattgtaatcgtatcccattctttgggtcagattgagcagatatgtgacaggtctatatggattaaggatggcaggattgaaaaagagggcgatcctaagtctgttcatcttgagtatcttgattatatgaacaatgagagaatggatgaagaggaaagagcaagagttaaacagcaaagaattgagtctggtcttgaagatgaaaaccgttttggaacaggtaatgtaaggtgtactaatgtcagacttttagatgataatggagacgaacagggaatattcaaatgtggtggtaatatgacagtacagtttgattatcatgttaataatccggttgagaatgctattatcggggtaaaaatcaatagaattgatggtgtatatgtatatggtacagatacacgaatagacaaattcaagaattttgaaatcaaacaggatggaactgtcagcctgacatttaaggatatgccgcttattaagggacagtattatctcgatataagtatagagtattcagagggacttccggaagattatcttaaacatgcagcaaagtttgagatagtttcaagtctggaagatatgggaattgcacttgtttcacatgattgggatatttcaaagataagatagttttcaaaaaggttggagtgaaagatgaatagaagtaaatatatagataatattcagtttagtgaaaataataataagcttcatgcacatattgtcggctggtatacaggtggaaagatagacgatcatcagttttatgtagttgttgatggccgtgaagcagaatcacattttgagagagttgaccgttttgatattgcaagccagaacaatatgagcagcggtaaaagaataggttttaatctcgtgagtgatatagacggatatgaagctatagaaacattgcagctaagggtaagaaatgctggaaaagacgagcttttattagagatgaataaaagaaacatcaaaaatatagttgcccagacagctatagaatacaatattgatgaggcaattcttatcaactctgaaggaaaagaagcaagattaaaggttacaggatgggctgtaggacatggcggagatctttcagtaaaatttacagataaggctggaaatgaacttaagcatacaagcaaatattttaacagagttgacctttatatgagaggatatgcagatgatcctaaagataaaataggcttcgaaacagagattttaactgataaagaagacgctgttattcatcttagtatgggcagatataaaaaagatgctgatatattctcggaaatcaggaaacaggcaagagcaagaaagagagcacacataagacagtttacatcaattgcaacacctggcaatgttgcacatcttgttggatatggatttaagcacggattcggagatttaagagaagaagcttacagaatgataactaatggtgaagaatcacaagaggttatttatcagaattggtttgaaaagcataaagtcacaaaagaagaacttgaaaaacaggcaaagcacaagtttgactatgaacctgttatcagcattgttgtgccaacatacaacactccaattaaatatttaagagagatgattgattctgtagtgaaccagtcatatccacactggcagttatgtattgcagatggaagcggcggaaacaaagcacttgaaaagactcttaaggagtatgctgataaggataagagagtaaaatatcagattcttgagagtaacagaggtattgctggaaatacaaatgctgcactagacatggcagatggagatgtattaggacttcttgaccatgatgatacattggagccggatgctctttatgaagttgtaaaatgtttccaggacagggaagttgatgctgtatacactgatgaagataagattcttggacctgactggagaaatgttgaagcacattttaaaccagattttaatctggatttattaagatcaaacaactacatcacacatttcttctgtgctaaaaaagagattattacatcggtaggtggctttaaagagaaatacgatggcgcacaggattatgatgttattttaagatgttatgagaaatcaagaaaagtggcacatgtagctaagattctttatcattggagaatgcatcctaattcaacagctgctaatccacagagtaaatcttattgtcatgttgcaggacagaaggctatacaggatcatcttgacagagttggtgttaagggtgaggtaataatgagtgaagtattctgtacatacagagtaaagtatgaaagagaatccagcccattagtttcaattgtaatacctaacaaggatcatattgctgatcttaaattatgcatagattctgttcaggagaagagttcatatagaaatattgaatttattgttgtagaaaataatagtacggaaaaagaaacatttgagtattatgattctgttcagaaacagtatgataatgtcagagttgttaaatgggagaaagaatttaattactctgcaattaacaattttggtgtaaagtttgctaatggtgagtatattttactccttaataatgatacagaaatcattaatccagaatcaatagaagatatgcttgcaaactgcatgcgtaaggaagttggtattgtcggtgccaagcttttctataatgatgatacagttcagcatggcggagtaattcttggatttggtggagttgcaggacatgcatgcgtaggaattgataaacgtgacccgggttattttgcaagggcattcttaagttgtgattatagtgcagttactgctgcatgtatgatgatttctaaggaactttataatgaagtgggtggtttctctgaggaatatgcagttgcatttaatgatgtagatttctgcatgaaggtaagagaaaaaggataccttgttgtatatgatgcattttcacagtggtatcactatgaatcaaagtcaagaggattggatgatacagcagaaaaaatggaaagatttaaaggcgaagtagacagattccaggctaagtggaaaaagcagctcgacgcaggagacccatattataataagaatttctcacttacgaaagctgtatttatgctggataaagaatagctggttgtaagtgtaattacacatggataaggaagatggtatttttatgaagataatgaaacaaaagataaaactgctgtgtccacagcttatatttttgattgtgacattctgcatattcatgccatcatctttatttcttggtaatcttgatgaatttgcagtgggattcgcggcacttataccgcttcttatcgcatcgtcgttaattacggcggcatttgttatactgataggtctgattgtgccaaagaagatatataacatatatgcagcagttatatttggcggtgcacttgctgcttatgtgcaggggaattttcttaatcctgatttcggagtccttaatggaaggcagattcagtggagtcagtttaaggttaatggaattataagtacagttgtatggatagtacttatagttgttccgccagttattgtatgctttaagaaagatataatgacaaatataataaagtggggcagcctgtttctttcaagcatacaggttgtgacacttgtggttcttattgtatcttcaaaaagaagtgttgattattcatatgtagttactaagaatgatgagtttgcgttatcttcgcagggcaatgtagtggtattcattgtggatacactggataatgaggatacacagaattatgttatcgacagatactgtgaagaattaaaagattttacttattttgataatatgataggcggaggtgcaccaacagctctaggagttccacttatgcttacaggttatcagtatgatacaacacattctttggctgattacagaaagaaagcatatgaagaaggtactcttattcaggatatgtcagataacggatatgatgttaagttgtatacttcaagtgagtatcttaatggagttaatcaggaggcagtatccaatactgcaggtggacagaaatacaggatatcagacaaagtgcaattttttaagaatatatataaaatgtcggcattttatgcatttccacagattataaaacagtatttctggttttatggtgatgattttgcagcatgtcaggctccaaagaataacaatgttattcaatatgaactggatgattcacagttgtatgctgattttaagaataatggcggtataacagttgatgctggaaataaaacatttacactgtatcatatggtaggggcacatgcaccttatgagatgaatgaacagtgtgtagatgtgggggaaacagagacttctcttgataagcagatacagggtgttttcagatatattaatgaatatatgcaacagatgaaggataaaggtgtgtatgataacagcacggttataattacagccgaccacggcggatatggattgtatgaacgtcctgctgtatttgtgaaaatggctgatactcataatgatgtaatgcaggttaattcagattctgtaacatttaagaatctgtatgctacttatggcaaggcagcacttggacagaagagtaattatggaaatacgctttttgatatggctggtgtttctcagtcaagatatcatgtagcaccatgggatgtgtcaaaaggtatgtacccggcagatgaatatcttaaaaacagagattattcggtgttcagaatagaaggggacgctgtaaatccacagatatctgtaattaaagatgagcagcagatgaagaatattaataattaatgatgaagcagcagctaagcctggaaggtttatagctgcttacttttatactggtaatttagtttattatctgctataatccattctgttcacgcaatgaacaaaaatatgaccgaacgaataaactgtgagaggggatatttatgaatgagaataatcagctggttcgtgctttagggcttaaagaatcaattagtatgacaattggaaccgttgtaggtgtaggactttttacctgtggttcagcacagataggaagtgtaggctcatggataataggatttacctttgttgcacttcttatatctatatggccatgtcttatatatggagagatgtctgcagcacttccttgtgcgggtggaacatataattatgccaagagaggacttaacagagtatgggctaatatggcaggatggcattatatagtatctgttgtagctattggtgcaggtgagacgcttgcatttgccaattattttaagattcttatggaacagcttggaataagcatcgttaagcttgattcaagaattatagctattatccttgttgcagttttccttattcttaatttcagaggtattgagcagtcaggtaaggcgcagacagcatttatgtttttcttctggggctgttcagtgtgctggttcctttatatgatacctaaggttcatgttgaatattttggtggaatagcaatgaactcattgcctacatttaatgagatgatgtatatatttggtcttgtatggtggtgctatacaggatttgagacatgtgtatctatgggagcagagactaagtatccacagtatacacttccaagagcattaaagatttcggtatttatggtatttgcacttaacgcattattccagtggtttcttgtaggtcttgtacctaaggagttttatggaattcttgcagcggcagatgctccatatgcagaaggacttaaggcagtcggacttgttggatttcctattatacttttatgtatcggtattgcatttggtggagatttatctactattaatccgggaattgctgcacctgcaagatacatttatacaatggcagaagatggcgcattaccaaaattccttggaaagattcatccgaagttcaagacgccatatgttgctgtaattgtggttggtgttatcaattttatacttattgcaacaggttcaattaattacatagcatcggtatcgcttatatcacttgctatatgttatatgataggctgtctttcatatatggggcttaagaagaagtatcctgatatgaagagaccttataaggctcctcttggagttgttggatgtatatttacaattgttgtgtattgcttcatgttaatatttgcggataaggcagcacttattacatcaggaattataacagtattatgtgtaatattctattttgcatattctcacagaaaagagtgtgttatgccgacaattgaggaagagattggcgttatagaagagccggatgagcagactaaggctaagatggacagacagtacaccatatggaaggtatgcacaattattgttacatgcattgcacttggaatctatataattccaatggtgctgtaaggaggaaatatgaatcgttatcagtttgaagtacttacatatattgaaaagaacggtaagaaagagtatccgatgagaactctttcagatacattaaagatttcaggaacagctatatctaaagctctggatgagttagaaaatgaagctcttattaaaagatgtgaagatcagatggagattactgaaagaggtcttgaggcacttgagccataccgagtaaagagagcggttattatggcagcaggatttggttcaagaatggttcctgttacattagacagaccaaagccaatggttgctgttaatggagtaagaattattgatacattacttgatgcacttgtttctgtaggaattaaggatataactcttgtaaggggttataagaaagaaaaatttgatgagattctggagaagtatccatttatcaatcttattgataacgatatatatgataaaaccaataatatatcatcagcaatggcagcattagaacatattgaccagtgctatttatgtgaagcggacctgtatatatctaatccggctattatcacaaagtatcagtactgcagcaatatccttggctcttattcgttagagactgatgactggagttttaagcttgataatggacatataacagattatcagaagggtaatacatattgctttaattattatggaatatcttactggacaaaggaagacagtgcaagattaagagaagactttgcacaggtatataatgaagagccggagggcaatgattatttctgggagtttattccacttgtgcttcgcaaggaaagatatgaggtagaggtaagaccttgtgagaaatcagatattatggagatagataatttttatgagctggtacagttagattcttcttataaggattatccgggacaggaacagtaaatgcagatataaagggaaggtgaatgtctatgatatgttataagggaaaggttcttacagttgacagcaatgatacagtagccggttatctcgttgaggataaaggaagaattgtgtatgttggtaatgaactgccagaacagtataagaatgtgcagacagttgagcttgggaagaaggtgctggttccggcattcgtagatacacatcagcatatggcatcattttctacatttcacgcaggacttaatgttatggatgcagagtccaatgaagagattgcacagatggttaaagaattcgtacagtcaagcggtaataaaaagacacttatagcattcggtgcgtcaccatattcagttaaagaaggaagacttataagcagggaagaattagataaggtttgccctgataaggaaattatggttgttaaatatgatggacatgcgtgcataattaacagcaagcttcttgataagctgaaggggaaagtaagtaagttaagaggttatcacgaagataccggcgagatgaatcaggaggcattctttgaatgctctaattacattaccaattcactttctattattgaactgtttaagaatatgcagagtgccattgattttcaggcgtctcatggaattggctgtattcatactgtaagtggtgtgggttttacaggcaattttgatattacatttgaaaaaatatttgcaaaatccttaactaatggatttcaggtaagagtattcccacagtcaatgaatgttgatgtcgcattaaagagaaaactgccaagaataggcggatgttttgaatgtgcgcttgatggatgtttcggttcacacgatgcagctatgaatgaaccgtatattgattctttaggcggtgacggagtactttattatgatgatgaaaaggttattgatttctgcaagaaggctaacagagccggactgcagatagagatgcatgcgattggggataaagcgtttgaccaggcatgcagggcacttaaggcggcacttgacgattatccaagaaaagaccacagacatggaattatacatgactgtcttccaactgaagagggaattaagatatgcagggactataatatacagatgcctgtacagagtgctttcattaactggaaacaggaacctgatgagtatcttgaaagcattatgggtaaagaaagaacagaaagacttaatccgctcagaacatttaatgagaacggaatagttgtttcgtgcggttctgatgctccatgtacatcaccggatcctattgtatggattgacaaagctgttaataatatgaatcagtctcaggcagtatcggttcaggaagcactaaggatgtgtacgtataatggatattatgtaacatttgacgagaagaaaagaggaagccttgaggcaggaaagattgccgatatggtggttctttcagatgatttgtattcagttgacaagaaggatataaagaacattaaggtagagggacttatactttcggggaaaaagtatgaatcatgcagagaaaatgtaatcaaagcagtgattcgaggaatgttctcaggaaacatggcataaggagatatgtataatgagaaaagaagagttttatgtattgaacagtttgtataatggaagcattggaagagctggctgcacttatgatgttgaggagacaaaagctcttaatgacacagatatttataataaacttgtaaaaacagggtatattgaaaaggagtctggtagtattacaaagactggattagaggcgcttgaaccatatagggttaataatgccgttattcttgcagctggcgcatctacacgatttattcctttatcactcgaacagccaaagggtctttttgaagtaaagggtgaacgtcttattgagagacagataaagcagcttcaggatgctggtattaagaatattacagttgtacttggctataagaaggagatgttttactatcttgaagacaagtatggtgtaaagttcattattaatgattcatttaatataaagaataatattgaaagtctttatcttgcgagaaaagaactcaagaatacatatatatgtgtaagtgacagttattatatagagaatccgtttaatcagtttgaatatcatacattttattcaggttattatggaaaggaaacaacggatgaagtatatgcaagaactgacggatttggaaagataacaagaattgctaaggataataagattgatggctatgttcttatgggacattcattctggagaaaagaattctcagaagcatttattaatcaggttgaggctgtccgggaatctggaatatataataactgctattgggagattcttgtaaaggataagctggatgaaatgcctgatatttattttaaggaatatcttccgggtaatatatttgaatttgattattttgatgagcttagaaagtttgattcacagtatcttggacatacacatagtgagataataagaaatattaagcttgtattcagatgtgatgaggaagatataattgatttcagaaatgtaagcgaaggaatgaccaacacatcatttatattcaagattgacggagttgattatatatacaggcatccgggcgatggaacagaaagtataatcaatagaagaaatgaaaaaaaatcacttatcaaagccaaagaagctggtgtagatcctacatacatatatgcagatgttaatgagggctggaagatatccatattcattccagaattcagagagcctgattatgaatcatttgaggactctaagaagatattggctgttttaagaaagctgcataaggcagatataacagctgattatggaatgaaaccttgggaagatgcacttgatatggagaagcttcttgagaagaaagatcctgtgtgcttcgttcagtatgaaggactgaagaacagcataggacagttgtataagatgactctagcagatggagttgaaaaatgtttctgtcatggcgatacatataagccaaactggatgataagaccagatggaagtgtcatacttattgactgggagtattctggatattctgacccgggaattgatgttggatattatgtggttgatgccatgtatgattttgataaggctgaggaattcataaaggaataccttcaggaagattataatgagacaacaagatttcattatatggcatatgttgctattattgcgtactactggtttgtatgggctatgtacagggaatcatgtggtgcagatatgggagaggcattggagaactggcgagacatggcagttaaatatgctgagtaccttttgaaataaataatattaaaaggacactgtattatgtaagaacagtgtcctttttttatgcaaaatgtgtaaaaattatattgagtatgtaaaaaaagtatattgaatatgtaaaaatacctttcaataattaataataagtgatatgattaattattgtgttggatgattctgacataatcaatcaaatcttcaaaagaggagttatttatggaaatattatcgacagcattaggttatgtaatgaatttttgttacaaactactgcatgattatggattggcaattatattattcactctgataagtaagatagttctcttaccagtatcaatctgggtacagaagaattcaatcaaaatggttaagatgcagcctgatattaacaggattcttattaagcattatggggataaggatgagatagcagaggaacagtctaagctttataaaaaagaaaaatataatccactggcatcacttatacctcttattatacagataatacttctgcttggagttgttgcagttattaaagacggaattaatgaaggtgttgcgaacatgaagttctgtggctatgaccttacatggattactacaaaacagtggggattatcaataataacaccaattatagcaggtgtctcagcatggcttttatgtgttgcacagaatgcaagtaacgtattacaggcagaacagagtaagcttaataagtatggtatgatgatattttcagtaggtctgtcgttatatttaggatgctttgtatatgcaggagtagctctttactggactgccagcaacatatttgcaattcttcagttatatcttcttaactgggcgattaatcctaagaattatgttgattatgaggctcttgaggaaactaagaaagaacttgcagagattgaagctcttggtacgaaaaaaggtaaaagaaacaaagaagatattaagagagaaaaagctgattataaaaagtttttctctgttgttaataaacatcttgtcttctattcagagggttcaggtttctataagtattttaaagggataattgaatacatacttaataatacgaatattacaatccattatgtaacaagtgatcctgatgatcagatattcagaattgcagaaaaagaaagtaggattaaaccttattatataggggaaaagaaacttataacacttatgatgaagatggatgcagacgttgttgttatgactatgcctgatattgagaattatcacattaagagaagttatatcagaaaagatattaattatgtttatgttcctcatggcatggacagccttaatatgacaatgcgaaccggatcaatggatcattatgactctgtattatgtacaggaaagattcagaaagaagaaatagaaaaaacagaagaagtgtataatcttcctaagaaggagcttgttgagtggggatattcactgcttgatgagatgcgtgaggattatgcaaagatgccaaagaaggaaaatgatattaagtcaatacttattgctccatcatggcagaaagataatattgtagacagctgtcttgaggacatacttgataatcttaagggacatggttataagattacagttcgaccacacccacagcatgtaagacatatgcctgagaagatggaaggacttaaagaaagatataagaatgatacagatatagagattcagactgatttttcatcaaacagtactgtttttgaagcagatcttatgattacagactggtcgggtatagcatatgaatatgcttatactacatgtaaaccggttcttttcattgatacaccaatgaagataatgaatcctgaatacaaaaagattggaattgagccacttaatatatggatgagatatgaaatcgggcgtgtacttaagcttgatgaaattgataagacagctgatacagcagcaaagatgctggcagcttctgatacatataaggacagcatagatcgatttgttaaagaatatgtgtataatcttggcagtagtgcatcggttggagctaaatatattattcaggaaattcaaaaagcaattaaaagacataaggaacaagagtagagtcggattataggaggggattatgcaggcaattattttagcagcaggaatgggaaagcgtttaaaagaacttacccagaataataccaaatgtatggtaaaggttaatggagtatcgcttatagacaggcttttgcatcagcttgagaaacaacatctctcaagaatagtgattgttgtgggctatgaaggacagaagctgattgattatatagcgacattgggaattaagacaccaatttcatatgttgacaatgcggtatatgataagacaaacaatatttattcacttgcactggcaaagaattatcttatggaagaagatactctgctttttgaatcagatgtaattattgaggattctgcaattgatgaacttgtaaaagatccgagagatacacttgccatggtagataaatatgagagctggatggatggtacatgtgtaaagcttgacgaatatgataatattgttgcatttgttccaggaaagagctttgattttaaggaaaaagaggaatactataaaactgtaaatatctacaaattcagcaaacatttttcacaggatatatatgttcctttccttgaggcatattgtagtgcattgggagaaaatgaatattatgaacaggttcttagagttataacgatgctggacacacctggaattaaaggtatgagattatcaggtcagaaatggtatgaaatagatgatgaacaggatcttgatatagcaacgacactttttgctccagatgatgagacaagaattaaccttatgcataaaagatatggaggattctggagatatccgggattgttggatttctgttatcttgttaatccttattatccgcctaaaaagcttaaggatgaactgcgtgcaagctttgatacacttttgacagaatatccttcaggtatgggagttaattctttacttgcagctaagaattttggtgttcataaagacaacataatagttggaaatggagcagcagaacttattaagtcacttatggaaagcttttctggaaagacaggcgttatcagacctacatttgaagaatatcctaacagatattctgttgaagacgaagtggtatttacaccgtcaaatgataattatacatattcagttgaagaactgatagagttctatacatgcaacaaagtagataatattattattattaatcctgataatccatctggtaattatctgaaaaaagaagaaattataagattaataaaatggacagacggtcagggaataaagctggtggttgatgagtcgtttgctgatttctcagatgaaccggataattctcttatagaacagaaatttatcgaaacatatagcagattatatgttatgaaaagtatatctaaatcatacggtgtaccggggctgaggcttggaattcttgtttcctcagatacagaaacgattgcagcaatgaaaaaagatgttgcaatatggaatattaattcatttggagagtattatcttcaggttgcagaaaagtataagaaagattatgcagctgcaatggacaaattccgcgtagaaagaaaaaggttctataatgaactggagcagatatctggtataagggtcatcccatcacaggctaattattttatgattgagataactaatggaatgacagcaaaagaacttatgataaaactgtttaagaatcattatttgcttataaaagatttgacatcaaaattacatgatggaaaacagtatataagaattgcaatcagaaatgatgcagataacaacaagatgcttgaagcattaaaaaaagaacttaattaaaaaggagataaaaagtatgttgacattattaaatttaaatgtagcaggttacattgacccatctgttatgacttatgccattcaggctattgccggagtgataattgctgttggtgcatttcttggtatttatttaagaaaggcaaagaaaaagcttaataacaagcttggaattgatgaaaacagaaacaaggaagttgagacagatgatattgttatcaacgaatcaaaataataaattcattttcaggacgccgtttatatacggcgtctttttcttgatttgttattgataaaagtataaaatagtatggcgttatatcaataaaaacagtgaggtaattatgagtaacaatacagataataatatgcaggaaactaagccggatatatttgataagattatgcatctgccgggtctgagggtgtttgaaccattgtataagaagtataaggaagtacttttgtatcttttctttggagtacttacaacagtggtgagtataggttcatatgcattctttaatgttgcacttggaattaatgagcttattgcaaatgttatatcatgggtgcttgcagtactttttgcattctttactaacaggatatgggtgtttgcagcaccaactaagactgtggaagaatttatgaaacagttagtttcatttgcaggtggaagagtattaactcttgtaattgaggagataattcttcttgtattcattacaatgctgcatttcaacagtatgttaataaagtttattgcgcaggtagttgtaattatacttaattatgttataagcaagctgcttgtattcagaaaagataagaataagaagtaaaaggagaaggtaatggaaaagaatgtattagagtttcttgaaaactcacagagaatgtatggggaaaagacagcatgtgcggacatgaataatgaacttacttatacacagcttatgaatcaggcaaagttcataggaagctgcctttcgcttaagattaagcctacacagggagttcctgtgtatatggataagacatgtaatacattatctttatttatgggaattgtgtatgcaggcggatattactgtatgcttgatacaactcatccggttgagagaattaatcttatattagatacgattcaggcagatattctggttgtggataataagtcagccaagaaagcagaaaagctcggatttcagggcgagattattaatcttgacgaattgcttgaagagtatgacggacaggttgtggattcagaggctcaggagagactggaaaagataagagaacaggcacttgatacagatccattgtattcaatatttacatcagggtcgacaggtgttcctaaaggagttatagttaatcaccgttcaacaatagattttattgactgttttacagaaacatttggaattactaatgaggatgttataggtaatcaggcaccttttgactttgatgtatcagttaaggatatatattcaagtttaaagacaggcgcaaccttacagcttattcctaagatgtgcttctcatttccaaccaagctgcttgatttccttgatgacagaaaggttacaactattatatgggctgtatcagcgttatgtattgtaacaactcttaatggattcgagtataagagaccatcttcacttaacaagattatgttcagcggagaggttatgcctataaagcatcttaatgcatggagagtgcagtatccggatgcaatgtttgttaatctttacggaccaacagagataacatgtaattgtacatattatattattgacagagagtttggtcttgacgagaagcttccgatgggaaagccatttgccaatgaaagagtattcctgttagatgatgaggataagcttgttgatgcaggcagaccaggcgagttaggagaaatatgtgtatctggaacagctgtaactatggggtatctgcgtaatcctgaaaagacagcagcagcatttgtacagaatcctcttaatgacagatatctggaaactatataccgcacaggtgatcttggttactatagtgaagatggtgaacttttcttctcatcaagaaaggacttccagattaagcatatgggacacagaatcgagcttggcgaaattgagacatacatgaatgctatagagggactccttagaagctgttgtatatttgatacagatgagaataagattctcggattctttgagatagaaggagcaagtgagcttgacagaaagggcgtaacacatgccctcaaagataaagtgccacagtggatgattccaaatgtgcttgttaaggtggaaacaatgccgcttactaagaatggtaaaattgacagaaaagaacttatgaagatatataaagaacaggaggtataggatgctaggagttaatgaattaaaagagattgccataaaatgtggaacaccatcgtatatatttgacacagatgagctatgtgcaaggattgatgccatgcagcagattctaggatgtggagttacagtgtgttatgcaatgaaggccaatccgtttcttataagcgtgcttgacaagaagcttgataaattcgaggtatgttctccaggtgaatttgcgatatgcgaaaaagagggcataaacagggagaagatagtcctttcgggtgttaataaggaaaagaaagatatcctctacacgatgaagacaggtgctgttggaatctacacagtggaatcgcttaaccagcttgaacttatcaattcatgtgcagttgagtgtggtattaaggttaaggttcttataagagttaccagcggcaatcagttcggtattaatgagcgtcaggtgtatgagattgctgacagaaaggatgaacttaagggaattatcatagagggaatccagtgctattcgggaacacagaagaaaaaactaagccagatagaagctgaggtagtatggttacaggcaatagcacatacatgtgaggctgaacatggtgttaagcttaaagagattgagtatggtcctggtctgtcagttgattactttgttacagacaaatgtgatgccatgaatactgattttgacgagcttaaagagtttgctgtgatgattaaagaaatgtccgaaaaattcaatgttactcttgagatgggacgatatattgcagctacctgtggaatacttataagcagaattgctgatatgaagatgaatgatacaacaagatatgcaattattgacagtggaattaatcatattaattattatggacaggcaatggctatgaagaaaccaagatgtgaattcattccaatggagtacacagaagggtttgctgatggcgcagatcatgaggtggaagtgtactcacagggagtgcagccatataacatatgcggttcattatgtacagtaggggatgtaattgttaagaatcttgaattaaaagatgctaagattggcgatatgatagcattttataatattggagcttattcggttacggagggaatatatctgttcctgagccgtcggatgccagcaattgtgatgtattccaataagaatggttacagagttataagaaaatctgtagaaacatttttaatcaacagcagtgatacacaataattttacaattttgtaacaaaatatgattgactatatgtgaatgagaagatagaatgttttttgttcacagatgtgtgatcaaaagattttaatattttgcgaggtttattatggatcagttattagacattttgaatgaaattaacagcgatgtagattatgaaatttgtgatactcttatcgatgatggtatattcagctcatttgatattgtatcacttgttggtgagttaaacgatgcgtttgacattgatatcacaccagttgatatagtacctgagaactttaattcagcagaagctatgtgggagatgattcagcgtctgcaggattaatccggaaagcggggtaaaataatatgtcactagtttctaccggatttctggtatttttattagtgggagtaattgtatattatcttatacctaagaaggcacagtgggcatggcttttgatattaagctatgcctactatttatgttcgggatataagactgttgtattcatattacttacaacaatcgttactttcacatcaggaatccttttagagagaacagaggataatcttgccaaaagtcttaaagcagaaggactggcaagagaagataaaaaggctttaaaagaaaaggcaaagacatataagaaaagagttgtagtacttgctcttcttctggtatttggtgtgcttgcagttgttaagtaccataattttgcgattgagaacgtcaatggcataattaaggcttttggtggcaatggcaggatatcaacatttacactgcttcttccacttggaatatctttctattcattccagtcgatatcatatgttattgatgtatatagaggaaaagtaaaggcatgtaataacatttttaagtatgctttgtttgtttcgtattttccgcagataacacagggacctatcggaagatatgacagacttgcaccacagtttttggcagagcacaagtatgatcttgcagttatccagcatggattgcagcgtatggcctggggacttttcaaaaagtttattatagctgaccgtgcaggagtcgtgtctgatttggtgtttaataatcccggtcagtatcatggaatatatgtaataataggtgttcttgcgtattgcgcacagctatacggagattttgccggtggaatagatatggttatgggtgcttccgagatgtttggaatccacctggatgataatttcaggcagccattcttctctcattctattggagagttctggcgcagatggcacataacacttggtacatggatgaaggattatgtgttctatccattcagcttaagtaaagccatgaataagctgggtaagttcttcaagaaacacagcaaaacaagatttggtaaatatatggcgaaggcattgcctatctgtctggctgatttactcatattctttatagtaggtgtatggcatggagcagcatggaagtatatcgtatatggtatgtacaatggtataatcatgagctttagcagtattatggcacctgtttatgaaaaaatgtttaaaataacacatattaacaagactgcacgctggtacagaggatggcagataataagaacatttatacttgttaatataagctggtattttgataacgcagctactcttacagatgcattcagacttatgggaaatacatttaaacatgcatcattcagcatggacgccgttgtaaaaatgtttggaagccagctggatttgattatattacttgcaggctgtcttgtgtggctgattataagtatacttaaagagaaaggcattgtaatcagagaagctcttgacagaaagccgctgattatcagatgggctgtatacatagctcttgttatgtcagttgcaatgcttggctatatttctaatacatcgggtggatttatgtacgcccagttctaatcagaggtgcaggataccatgaagaagaaagcatttaaagagatattaaaatatgtgagggtgatagtattctttgcggttataactatacttgttgaagcagttaattatgtaatggttcagccggggtatgcaagatatataatccatacggttgacaatccggatgatggctctgattatgattgtattgtagtgggagcttcacatggaagggcttcaattgacccgcattattttctggaaatggaatatgcagttaatccaattaatatgtgtattcagggcgccacggttattgataattattatatgatcagagaagcgtgcaataataatgacgtaaagaagataattcttgaacttgattatcagtactggaataagaatctgaaacgtgattcggattttggagatcttcttgtatatggacagcttccgtttacaagtcttaaaatggagtatatagtaagccaacttatggataaggacttcaggacaatatatttcagaagatatgcatttgccaggaattggaaaacggctaagaaatatatggctataaagaagactgatgaatataagaatttccagatagagggtgttgccggaattgatacagaaggaccatatcagggactgggatttttctaccgtacaaaggtaactgataagaagggaaagcttaatccatcaccgtggacatatgaagatcttaatcctaaggtgcagaaatatttccagaagatagttaagtattgtaaggacaatggaattgagcttatatgtgttactgcaccaattacaccatcgtcggttgtttcgggtgctgctaatgaggctgatacatattttaagcagatatgtgatgagaataatgtaaggtatatagatggcaatcttattaagaatgagattcttaatgtaagtgatgatgatttttctgactgggaaggtcatatgaacggagagcttgctgagcagttctcagaggtactcacagagatacttaaaaagaatgattgttcagaatatttttacagcagttatgatgagtgcatagaggcaattaaagcgaggggcaatgagtaataaaatattaaaatatgtcagagctgtggtgtttattgccatagtggtcgggcttgtcaaatgtatggattatgcgatgatgccatcaggctatataagatacattatacatgaggccgacaatgcagatactgatgaaggatatgacaatataataattggagcttcacatgcaagatctgctataaatccagtaaagctcgatgaagccggggcatctgacaatgcatttaatcttgcaataccaggcgagacggtaacagattcatattatcttttaatggagagtgaccggcataataatgtaaaaagagttatatatgaccttgattatcagtactggtgcaattatgcagagagggagtttgaagactgtttcatatatacatggcttcctttcagtaatgtaaagcttaagtatatagctgataatctgctcacaaaggattttcgtactgtatattcaaagagatgggcttatgagatatcaccgtctgctattatgaataatcttaaggttaagagcagtgcggcataccgcaactacagtatggatgcagttgagatacatgatgccggaggaccttatgctgccaaaggatttttctatagagatatgaagatggacagcctcgtgccatctgatattgttgcatgggatgagagtggaatcagtgataaggttctggattcatttgaaaagactgttcaatattgtaagaagaataatattgaactggtatgcgttacatcacctattacgccgacaacatcagttaacggttattcggaacaggcaggagcatattttacgaggctttgtgaagaatatggtgttgaatattatgatttcaatctgttaacaatggatacacttccaagaacagatgatgacttctttgatgaagaaggtcatatgcttggagaacttgccgatagatattcagatatactggcatcagttcttcttgacaaatgtgacaaaagtaccgctttttatggtacttatgcacagttagagctggcagtttatgaaaattatgtgacaaaacagtgaaactgacaaaatatgcttgctataaacataacaatgtgctaaacttcattcactgcatatgttgaatctgcaggtagtaaagagtcgtgatgtactacatatctgttattgcatttgggacacttaggctgcgccagaggaagtcatatgtattaataatacgcctgctatgcaggcactttacgccggtgtggcggaactggcagacgcacaggacttaaaatcctgcgggacttatactcccatacgggttcgattcccgttgccggcatattaataaagagctatacataactatggttatgtatggctcttttttcttgccatatagaagtgcaagtcgtacaattaaggaagattattatgatgggagataatcaatgattaataatagaaaacgtattattataatatctgctcttggcgcggcagcagttgctgcggctgccatgtgcattatgatgacaagcagaataagaggcggtaatcctacgggcgaggctttatcacagaatattaatccgatagaggctgcttcacagacagaagaacctactgtatatgtagataatacggtcgacataattgacgttaattcgaagacaagaccatttgcagtatctgttaacaatacaccagtagctgtacaggtgcagactggacttaataaggcatatattgtatatgagcttccaacagagagttatacatgcagacttcttgccttgttcaaggtagaggattcagatgttacagatgaagcaccacaggagattattgggtcaggcaatgtaagtcagacagatacggttattggaacaataagaagtgcaagacataatttccttgatttctgttttgaatcagatgcgatatttgtacattttggcggaagcacttacgctgagagtgatgaggcaaagactggtattaactggattaacggcttctataacagtgcatattattggagacataatccggaagggcttgcaacagagcatacagcatatacatcgctttacaggttaaagagtgcagtacaggaaaaaggtttcaatgctgaggctgagaatgcatcggacacagtactgcttaattatgatgtatcagatgttgacctttcaaaaagagaagattcagtcagtgcatcatctgtgtatgtgccttacagcagttatcagtacacaacatttacatatgatgctgcgtcaggtaattatttaaggtttgcgagtggcgagccaagtcttgaccacgaaacaggtgaacagtttaatactaagaatattatcgtgcagaagattacacacagcatgatggatgataattactgctggaatcttcatacagtcggcaggggggaaggttattacataactaacggttatgctgttccaatccagtggagtaagtcagaccgttattccaagacagtgtatacatatgcagatggaacagagattaatgtaagtgatggaagaacttatattgaggtgtctgatgtaactatgactgttgaagtggaatagtacaacagatggaagcatatacttctattattcaacaataatggaggtgtgcattgtgaacaagacaatcaaaaaacttaatataacaatgataatagggattctggcagtatgggtgtcagggtcattatttcattttgtgtatgactggacaggaaagaacacatttatagggatgttctttccaatcaatgaatcgacatgggagcatatgaagctcgtatttctgccgatgaacctgtatggaatatacacatggtatgccttgaaagacagatttgcagcaagtggctttgcaattcttctgggtgcaaatgtggcaacatgggcaataccatttctgtactacacatatatgggcgtactggggttttctagaatgtggcttgatattgcctgcttttttgtggctgtgcttatcggatttgctttagagtatcatgtgttaaagaagtcaggaaacgaaagctttgtgcttggaacatggataatggctgttattgatttcgttatggcagcagcatttgtttcctgctcatatggtgcgcctgctcttggaatatttgcaaaaccttaaaaataacagttgacaaaatttaattataatagtatgctataactgtactaattattatagtacagttattacacaagcttgtaaccagtttaaataatacacagaaaggaatggaacatgttcacaatagatgtcatgtcgcgaatgccagtctatgaacagcttattaagcaggtggaagaccaggtgcttaaagggattatgaaggaaggcgataagatgccgtcggtacggtcgttgtcgatggagctgtctactaatccgaatacaatccagaaagcatacatggagctggacagaagaggaattctggtgagtgtaccgggaaagggctcttttatatcggcagaagcgttaaagattgtcggtaatcagtctaaggaaaagttttcagatcttaaggagattgtaagaaagcttgcatacgcaggggtgagtaagagtgagataacagatatgattgaggaggtttataagaaaatatgatagaggtaaaaggtgttactaaatcatttgatgactttacagcacttgacaatgttacctgtaatatagcggagggctgtatatatggtatggttggttctaatggtgccggaaagtctacattgctaagagttctgtcaggaatatataaggcagataagggagaagcaataatcgatggaattaatgtatatgagaatacatacatgaagaataagctggtgttcgttgcagatgaattattctttcttgcaggtgcgaacatgaagagcatggctaagttctatagttcaatatatgataattttgatatgggcagattcgcagagctcacgaaaacatttggacttgatccgtctaagagtatatcaaacttttcaaaaggaatgaagagacaggcagctataatacttgctctttcaacaagagccaagtatatgttctttgatgaaacatttgacggacttgatcctgttatgcgtaatcttgttaagaagttaatatgtggtgatgttgcagaaaacaacgctacggttatagttacatcacattcgttaagagagttagaagacttatgcgatcatttgtcacttcttcataaaggcgggctggtgcttgacagcgatgtatttgaactaaagacgagtcagttcaaggtacaggtagcttttaaggacgattttgatgagagtaagtttgagggcattagaattacaagataccgtcaggagggttcagttgccaacatgatagtaagtggcgacagggaacagaccatggacattataaatgccatgaatccggtagtatttgatgtcctcccgcttacgcttgaagaggtatttacttatgagatggaagcgctcggttatacatttgatgtgaagggggataagacgcatgaataataagaaagtattcagctttcatatgtttttacagacattgaagcagacaaggcttgcgggctttataatgatggcggtaattacacttatatcagttgtaccgattatttcatcattaagctatattaaagaatatgaacaggttaataatgtaggtggaatttcagggaattattttcttgtattagtattcataattgttgtacctgttatatcattggtagtatggagttttcttaataagagaagcagcagtgatttttaccattcaattccatatacaagattgtgtatatatcttagcaagacagccgcaataattacatggattaccggaatacttgttgtgtcatatgtatcacaggcagttttattcatggctaacaggaagtattttaatgttgattatgcaacaatgtttcgtatgtacctttcgatatttatatgcagccttttatgcatggcaattataaatgtatcaatatccatcacaggaaacatattaagtaatatatgtgttacaggacttataatgtttcttccaagatttattgcgttaatggttacagaactgactgtatttcatggagaagcttacatgataagtaacagtggtgtggggttacttgattcttcaaacaatatgattgttggctgggtattttctgtatttgatatatacaatggtccatcaggaacagcagatatggttctaagtcttacaagtaacttatatacattcgtgcttgcacttatatatatagcacttggtgcactcctctttgtaaagagaaagagtgagacagcaggaaaagcagctaatggaaaggttctgccaatgattatcagaacacttatcggcttttcaattgcatttataggtgtaatgatagcatatacaagttttgataatgatgagacaatagcagttgttgtactgtttattgtaagtgcattggttgtgtttgtttatgaatgtatagtaagtaagaagatgaatgttataaagcagtgtattccatcaattcttcttggatatgttcttgcagtggtaattggaacaggagctaattcatttggcaaatatgaggcatcgtacgaaccggatgcttcaaaacttgcatatgtatcaattcagtcaatggatatgtactatgcttcagataacggatatttcagttctatatcatcgaaggttcagtttacagatgaagagattcttaaatatgtatcggagaaatttggggcatataaagataaatgtatatcaaatggtgttcataattatatttataacggcagaggttcagtgactaattataaggttggtttcagacagaatggtgttacacattacagaaggattcagcttacagacagtgatgccaataaacttgcaagtctgttaaagaaggatgagaattttgttaaggcttatatggaacttccggatagtgacaagatttctgttaattatataacaggtaatatggaggattctgactgtaaggatatatatgaaacaattaaaagtgaaattaaacagattggttttgagaaatggtatcagatagttacttcagatgctgatacattcttgatgtcagtacagttttcaaaaaatggcgttacttatgatatggttcttccaatcagtaagaatatgccacaatcttataataagtatattagtatacggaatgaatatgccattaggaataatgaaaaagagcttgggacaatgagtgatattttaaagcagtatttaaatggcagttctagaacatgggataaatataccagtggatatgaaacgctttcagcagttcttgtatataatgataccagaacatatattgatctggattcgtatgtaagaaaagatgaagaaagagcacaaaaagtattaaatggacttatagagtcccttgacaagaagaattttaataaaaatataaatgcagataatccttgcattgtattaaattatgaaaagtataatcctgacaatggtgaaactgtccgggctgatgctattatacagttagatggttatacaaggacagaagactatatatctgatattgattattattaattactttttgtgttgaaataatgtaatataataagtataattaatgggatggtgcgtgggcatcatcccattatttaagatagaaaaggaacaggattatgtatgattatttaatagttggagcaggactttttggttcagtgtttgcacatgaggcagcaagagcaggaaagaaggttcttgtaatagataagagaaataatattgccggtaatgtatatacagagaagatggaaggtattaatgtgcatgtatatggtgcacacatttttcataccaataataagaaggtgtgggagtatctttcacagtttactacatttaacagattcactaattcacctgttgcgaattataagggcgagttgtattcactgccattcaatatgtataccttcaataagatgtggggtgttgtgacaccacaggaggctgcagaaagaatcgagcagcagagaaaggaagcaggaatcacagagcctaagaaccttgaggagcaggctataagtcttgtcggaactgatatatacgagaagcttattaagggatatacacagaagcagtggggcagaccatgcaacgagcttccatcattcattatcaagagacttcctgtaagacttacatttgataataattactttaacgcactttatcagggaattcctgagggtggatatactaagatggttgccaatatgcttaatgatagcgagctttccggaagcattgaggtaagacttggtgttgattatcttgcatctgctgatgctaaggaagaattagacagtcaggctgaaaaggttgtatatacaggtgcgatagacgcatactttgattataagcttggtaatcttgaataccgttcagtaaggtttgaaacagagactttggatactcctaattttcagggtaatgcagcagttaattatactgatgccgaaactccatggacaagaattattgaacacaaatggtttgagttcggtaaggatgagaatggcgacgaccttccgaagactgttatcagccgtgaatacagctctgagtggaagccgggtgatgagccatattatcctgtaaatgatgagaagaacggcgctttatatgcacagtataaggagcttgctgacgctgaaagaaaagttatattcggcggacgtcttggtgagtacaaatattatgacatggatgctgttgtggcagcagcacttgactgtgccgcaaataatatataattgcaggtggtggggtgacccataataaagtcacccctgaaaattgtcacttgccttgcggtcacataactgactatatatatcaggaccaagtcctgtctgtaattctgcatatgcttttcttaactgttcgtcagtcatatgctcacgtcttctttcgattgcattaatgctgtcgacaatcactttgtcctgattatcgtgagtttcccaattatacatggttttcccttttacgatagatttattgttgttgtctgttggaagattttctgagttattcataaattcacctcattataatatataagatagtttttatataagatattatctgcattaatttcctgtctatacttgaaaaacatggcatagcattgtaatattaaaaagtgtgtaaacatcagagggagagtataaatgttaaatctaaatggtatgctgtctattgttatgccggcttacaatgaggaaaaacttatatatcacagtatcatggaaacattgagaattgttgaaaagtttgttcctgaattggagattattgtggttaatgatggcagtaaggataataccaaagctgagatagaaagagctatcaagcaggatagccgtgtgcgtatggtaagttctgaaaagaacagaggcaagggtaatgcaataattgccggagtgtcgcaggttgaaggaaagtatgtcgcatttgttgatgcagaccttgaacttaatccatcacagttagaaggttatcttaagaaaatgcttgatgataataaagatgttgttataggctgtaagttccttaaggattccaagcttgattatccgtttaagaggaaagtgataagcatgggctattatataatgcttctagtcttgttccatcttaatgttaaggatacgcagaccgggcttaaggtattcagggttgaggcaatcaaaccggttgcacatcttataagaacatcagggtttgcttatgatatagaacttttagtggcgattcacagaaggggtttttcgatagcacagatgcctgtggaggttgtatatgtcagggattccggtgtaaagcgtatagggatgaaggatatatggcaggcattctgcgatacatgggcaatattcgggagagtttacttcaaacattattatgactaa

SEQ ID NO: 613 - DNA, 46845 bp, unidentified
  source 1..46845: mol_type = unassigned DNA
tgtgacaactgcgaacttccgaagaattccttaatagcagctgttacaggcttaatattaataagtgactgtggagatattccgctaagatcctgtgtagacattctctcacggaccactctttccattcttgagataccaattctgaactggttctgaagaagttctcctacagctctgatacgtctgtttccaaggtgatcgatatcatcctttgtaccaacaccatattcaaggtgcatattataattaatagaagcaagaatatcttctactgtaatatgcttaggaataaggtcagcaatattcttagtaatagcttctttaatatcctctaaagactcattctcagcaagaatctgtgcaagaacaggatagtatacatactctgttacaccaagctccttagcttcttcttcgctgatatcaacccatttggtaatatcaaccgcacggttagaaagaatcttaacaactctgtcagatactgtaccatcagcagccttaacttctacagtaatgaatactgaaggaacagctgcatcctggatagcctgtgctgattctcttgtaagcttctcacctgctgttgcaataacagttccgttttcatcaacaacatcctcagcaagaacctgtcctgtaattctgctcttgaaagaaagcttcttattaaacttatatcttcctacatgtgcaagatcatatcttcttgggtcaaagaacatacctgaaataagtgcttcagcactctctacagataatggttctcctggtcttaacttcttataaagttcaagaataccttcctgatagttagtagaagtatccttctccatagtagcaagaagcttaggttcctcgccaaaaatatcaagaatctccgcattagtaccaaatcctaatgctctgataagaacagtaataggaaccttcttattacggtcaaccttaacgtagaatatatcattagcatctgtttcatactctaaccatgcacctctgttaggaattacctgacagctgtacaagaaaatcttaccatacttatctttctgtatatcataataaataccaggtgaacgtaccaactggctgacaataactcgttcagcaccattaattacaaatgtacctgtcttagtcattaatggcaggtctcccatgaaaatctcatgctcgctgatgctttctgtctctttgttatgaagtcttactgtaaccttaagaggcgctgcatatgtagcatctctttctttacactcttcaattgaatacttaacttcgtcttcacataacgcaaaatctacgaattccagacttaatcttccattatagtctgcaattggagatatgtcatcaaagacctctttcaagccttcattcaaaaaccactggtaagaatccttctgcacctcaataaggttaggcatctcaagaacttctttctgtcttgagaaactcatacgcattgccttgcccgacgttattgggcgtaatctgtttttctccattgacgtttcaccccttagttttcttcacattaatatattacattatcagtaaatgtgcaaagaataagcacaatttaccacaatagtgcattgtccatagtacatcaaagatatatatatgtcaagggatttttgaaaatttccatgaatattcagaattgtataaagataatagtgtttctgccatagctggcataataaaataaagatgtgatttatagaaaaaagaaaagacaggagccgtgaaggcccgctgtctttcttattatattcattagaacaatcaagtgaattacttaagagtaaccttagctccaacttcttcaagcttcttcttgatttcctcagcctcttccttagaagcctgctccttaacaaccttaggtgcgccatcaacaacgtccttagcttcctttaatccaagacctgtgatttcacgaacaaccttgataaccttaaccttctgatctccagcttctgtaagctctacatcaaattctgtcttctcctcagctgctgctgcgccagcacctgctgctgcaactacaacgcctgctgctgcagatacgccgaattcttcttcacaagccttaactaaatcgttaagctctaatactgataaacctttaataacttcaatgatttcctgtgttgtcattattataatctcctttttaatattattctaaaatcgaaagagcatctatgctgctttcatagttaattcagtgttaaactgattaagcaacttcctcgttcttctcagcaatctgcttaataacacgagcaaagtttgtaataggtgactggatacttccaagtaactttgaaagaagttcctctcttgaagggatagtagcgattgtagcgatacctgctgcatcgtagaatgttccttcaacaacgccacactttaactcaagagcattagctgtcttagcaaagttagctaagattcttgcaggtgctgtagcatctgtcttgcagaatgcaatagcattagttccttcaagagtatcagtaattggctcgaactctgttccagcaacaactctctttactaaagtgttcttataaaccttataaaccacaccagcttctcttaactgcttacgaagctgtgtatcctgttctactgtaagaccgctgtagttaactacaacaacgccctgagcgccatcaaagttatctttaatctcatcgatagtagatgtcttaaggcctacattctttaaaatagccatgaataattacctcctgttagattcttgcttcatatagaagcgattttgcctaagtgaagattattcgtctatagtttccctacaaacaaaaccctctctgccagcgacagagagggaataattaatcaaatccttaaatcctcggtaggcgtgttacctttaaccatcatcagtaatactgaatccggacctgctgtctacggcaaaatattatgttaacagcaaaatgctgctcacaagctgatagtatactatcaaaatatattaatgtcaaccgtttttaatcaaaaatctgattaacccacatacttggctgtgcttaacttaacaccaggtcccatagtagaagtgagaactacacttctaagataagctcccttaagtgaagatggcttagccttaacgattgcatccataatagcctggaagttgtctgataactgctcctctgtgaatgaagccttaccaattggcacgtgaatgatattagtcttgtcaagtctgtactcgatcttaccagccttgatatcattaacagcttttgttacatccatagtaactgtaccagccttagggtttggcattaatcccttaggaccaagtacacgaccaagacgaccaacaacacccatcatatctggagttgcaacaacaacgtcgaactcgaaccagttatcgttctggatcttaggaataagctcctcgccaccaacgaaatctgcaccagctgcaagagcctcatcagccttagcacccttagcaaatactaatacacgtacagtcttacctgttccgtgtggaagaacaacagctcctctgatctgctgctcagcgtgacgtccatcacaacctgttctgatatgagcttcaattgtctcgtcgaactttgcaactgcactcttcttaactaaagaaacagcttcagttgcttcatataatgtctggcggtcaatattcttggctgcctcaacgtatttctttcctcttttcattataaacctcctagtggtaatatcggaaggattctatctttcctcccacaataatcatgaatcaaatgtagattagtcttctacaacgatacccatactcttagctgttccttcgatcatagaagtagctgcttcgatagatgcagcgttaagatctggcatcttaagctcagcgatcttctgaacttctgctctcttaatagtagcaaccttagtcttgttaggtacgcctgatcctgacttaatgttgcaagccttcttaagaagtactgctgcaggtggagtctttgtaataaagctgaagcttctatcagcataaactgtaataactacaggtatgataagatctccctgatctgctgtcttagcattgaactgctttgtgaattctacgatgttaacaccgtgctgaccaagtgctggaccaactggtggagctggtgtagccttgccggcaggaatctgtaatttaatatatcctgttactttctttgccattttggcacctcctaaaaataaatgtggtaattggcgaccatcataatattacccgctatccatctcccaagaatcacctttaggtgattcttgcaaatgaattagcgaagctaattcattttggtctcccacgtcccaggatcgggactgcttcttacaataacttcacatctgtgaaatcaatctcgaccggtgtttcacgaccgaacatctcaacattaattgtaaggcactgcttgccctcattaatattggtaatctcaccaactgtatcttcccatgcaccagagaggatcataaccttatcgccgaccttgccagcgaactggataacaggcttaacttcctgttcttcctcaaggcttatgccgagattcttaatttctgttggtgtaagtggtactggctttgatccaggaccaacaaaccctgtaacacctcttgtgtttctgacaacataccaactatcgtcgttcattaccatcttcacaagaacgtatccaggaaacattttcttctgagcagctttcttagagccatccttaatctccactactgtttcaagtggaacgataacttcaagaatctgatcgtgaagatttctgttttcaactgtcttctcaatgttagccttcaccttgttctcataacctgagtaagtgtgaactacataccattttgcgtcatccatacaatcacctattccttattttacaatgaactcaattccaaagcggacaattaaatccacaactgcaatgattacacctaataatacggacacagccaatacagctacggtttccttagtaagcgactgacggtctggccaaataatttttgaaaattcagctttcaaacctttgaaccagttctttttctgcttcttagcttttacagtatcacccatgaaatactcctcactgtactaattactttgtttccttgtgtaatgtgtgtgatttacagaacttacaatacttctttgtttccattctgtctggatgagctttcttttccttagtcatgttgtaattgcgctgtttacactcagtacatgccaatgttatctttactcgcacaacttccacctccaattattatttttgtaggtgttaaaacaccaattggtttctttgcccgcctaatcaatgttgggttgttgaaattcaggcacgcaaaaaagaccgcttccatagccgttctaatatagcacagtacattccaactcgtcaacaacttttttaaagaaaatatagtgacaaaaaatgaacttcatattataatatttgtacaaaaacatacgatatatataaggaaatggatttccttacattttctaccgattattacagacaaggaggtgactgttatgatcagcagcgtgtacagctattatcttgcccagtatggacataagactaactcaaagtacgatacacacactaaagcacaattaaagaatacatatggcagagttctgaaatctaacagtcagactcctacatataaggcagatatgtcagaggctgcgcagaaatatgcaatcgaccttaaagagaatgccagagaattaagtaacattgccaatgagctttcaggaagcgacggtcacggcatggtatttaagaaatcagcagtgtcagacaatcctgatgcggtaacagccacatttataggcgacagctcatctgccgatgatacaagccttgatatagaagtccgccagcttgcaacaagccagattaataccggacattacctgcagcctaacagccgcacagttaagccaggagattattcatttgatttgaacatcaataatctgacctatgaattccagtttaatgtagatgaagaagagagcaattctgacatacagaacaagcttgccagacttattaaccgttccaatatcggacttaatgcttctgtaagtgaagacagcctcggcaatactgcgctgaacattgaatcagacatgacaggtgtaagtgtaatcaagcctacaatatttaacatcaggcctaataacgatattcagacagacaatcctgatttcgtggaaggttttgatgagcctactatggagaagaacactaacttcattgaaacatatggtcttgaccgtgtaacacagtatcctggcaatgcaatcttttctgtcaatggagaagaacgctcatctgcttcgaatgacataacaattaacaaaacatttgcaatatcatttcataatacaactgacaagccggcaaccatcagtcttaaagatgatgctgattcaatcacagaaagcattacagaacttgtttccggctacaacagacttgtttccatcgccgcagataaagagaacgataagtttgagggcaatgccaagttaaagaaagaattttcaagaataatgaaggcttaccagccacagcttgaacgcaatggacttacagtaagtgatgagggttcgcttgaagttaataaggtagttattcagaaagctgcttctgacggcacactttccgatgtatttaacgctttggattcattcaagaaatcaatccaaagaaaggctgatgatatctccatcaaccctatgaactatgtaaacaataagattgtcgcttataagaatccacataagcctgtgaatgacccttataatctttccgcctactcaggcatgatgtttaatggctatatctaactaccataatataaaataaggcatccgtctggttcatgtaatacataaaccgacggatgcctttatgtttcttattattcattaatcagtctgcttcctgcatcatgtaactgcttaacaaatgtactaagccttacaagtgctttagaaacagccacatcatcatcagcctttacagcctctgaaagctccttaacgccagaattagcttctgcctcgtcaactgccccagcctcaataatatccttagttccattatatacttcaaaaagccagttaagcccttcaataataacattcaccgcatcatgagtctctggaaaaggaactcctgcaagttcatctgagactttctctattgctccaataagcttctcgctgtaaggaacagcttccttaagtacatctatctgctgctgtctgtaatcatccatgattctaatcacctttctttatgaacttatagaatatatatcggctggattggtggaaagttaatattaatcacatgtgaaaatgctacactcttaaccttccactggcaacttcttcacaaaattcatcaacactgcctttaaaaccaactcttctaatctgcttaatcaattcctgctccatgtgaccgtaaaatggatatgtatgatccgctgtgccttttactggaatcatataatcgccaaactcagccttaagcacttcatcataattttttggtgctttaaccacaaaattctcaaacggcatttctattacatcatcaaagcactctttacgcatcttataactgtcattatcaatccataaagccatgctgcttacatagtcagcttcatctctgtaacataacgaagatactttatctatcagtttccatatataattcttagtatcttctcttaattcaatattaacattacataattgaccaaactcagaaacaaatttatctaaagagccctctctatttaattcattccatttccctaaaatttgcattccaagctttataatctgcttctgcatgtctgcaaattctttgtctttagaaatataatccaacggaaaaatatctatcccagccctctgatatggaaatccatgaaaatacttcatataatcattaaaattccataattcttcatctgcaataactcttaactgtggaacaaatgctgcattttgcaaacgctcacaatcagcatacatgcctgcaactacaaagccgtatggcagttccccaggaagaatcctgataagttcattgtattcatctctcataagactgatgtcaatatcatcatcccatggaatcattcccttatgtctcacagccccaagcaatgtaccaaagtctgcaaaataccttattccatttctgttacatatatcagatacaacctgaaatacttccatctgcgcagcccatgctcttttcatcatagaagatatttcaaaaccctctcttacttctgtattaaaaaaatcattatcaaacttcaaaccagcaccgcctcgtttaatcaatcaccaataaactcacatacagcttcctcatcaaccgtgccatcagacttccttggcaaaggttcttttcttaacacaatcttctgaatctcccagcggtaaccttttttctcgttatacttgtcaatacgtctcttgaatatatcctcagttgcactcttatcaataggcacaataaccgccgtaagcctgttattgtaaaatgttataaatccttctgcaactccattaatagctgtaatctgttcattagttcttacacggcttatcttctcacctgtaggcaacagaataatatccggattgcgctgcaacagaacaagtctgccggcattgttaatccttccgtaatcacctgtatgatacataccgtcttttaatactttttcagtagcctccacgtcattataatagcctttcatgacacatggtccacttacaataatctctccatcatcagcaatagatactgcattattatcaaaaagagtatacgaaccatcgtaaagctcattaacccctacacaacccgaagtctctgtcattccatatatattataaaccttcaaatcactgtcacagagattctcaaaaagtctgaacgggcagcttgcaccacctatgataatagtattgagttctttattaaacccacttatagctcgctgatagtcaatcatagaaggagtacctataagaatagttggattataataataagtatctgcatcaacatgtcttaagcctctgcctatacacaccatagcaccattatacagaggccatatgaggctgtatataaatccaaattcattatgaagcggaatctgtgcaagcacaatatcatcacttgtacattcaaccctgctgtttatcgccataaccgcattaagaatattatcaatagacagaacaaccggcttatcacattcattagctgtagccgtaaacatgataatatcgccctcctgcgtattctcatcatatataagtccgtcaacattatccttctcagcacttgatatgataatagaattctcatcagagagaatatactggttagtagatgtcagtgtataattaacttccgtcttcttaagaaggtcaaccctcgaatcatgaggaaggaagaaatcaacaagtgcaagctcctttcccgcaacaatcgttccgaacatattaacgatccatctatatgaagccggcccgaatattgcaatcctctttccttcaaatttctgaaaatgtaatgccttcttagttacatcatcaaaaagcttcgcataagtaaccttcatcgtatcataaacgacagccacagcgtctggctggctctcggcattactctttaacatattataaaatgtattcttatctgtcatgattttctccgttcttctatcgtcaattgttatgctacacaataactgttataatgtattatattatcatttttaaatctaattgccaactaaattagtatataataagaactataaaacacatgtcaatgaaaggaaatatatgaataatatctctgttataatgattgcgcacaacaaaaaagaaatcattaaatctcagattgaacaattatcttcaattcacaacatcagtatggattcaataacaatagttgataaccactcttctgataatttatgcgattttcttgtttctcaatcacgcttaaactacataatatgtgatgataaaattgaaaattattctttaattctcaacacatgcatttcagaatttgttaatactcaaaatgatatactcatattagaccctgacagctttcttcttcctgaaacattaaaaaaactttcgtcagcattaaacccagataatggtatatatgctgtatgcccgcaaaatatattagatatcagcaatgatatacactctttttctgcggcattaaactacgtaaataacaccgatgtatctaaaataaatttattcaaaattattaaacctgaaatcaacactattttattgagccataaattattatctgaacatacattatttgattcacaaattatatcagatgagttatgtttgacagacttctgtataaataacattttaaatgatcaatttacttatatggcagataatgtatatcaatattatattggcaatcataattcctattattcccccactaaccgtaattgtgatttagcatatatcagacaaaaatggcacatgaattacattaacactataccaagcagtaatcttatcagcatgattaacgaaccaattgataaagaacttaatgttcttgaaattggttgcgattgtggcgcaactttactggctatacaagcactttatccaaactcaacactatatggtatagaaattaaccctatttctgcgaaaattgcttcgcacattgcttcagtaaaaacagctaatatagaagaatctgttgatctctggaatgacattaaatttgattatatattatttggagatgtattagaacatcttcgtaatccatcaaaagtcatacacaactgccgccacattctaaagaaaaaaggtaaaataatcagcagtatacctaaccttatgcattttacggtattacatgaacttatcaatggtaactttcattatacagacacaggtctattagacaaaacacatatccacttctttacatacaatgaaattgtaaaaatgtatgaagaaaatgattttaatgttatcaacacggttgcatctaacttaacgcctttgttatctaaaaaagactctgatttcatagacgcattaactaaactatcatcacataaaaatgatatgctattcaaagcctttcaatatattacacttgcagaaataaaagatacttaaaacaattaaacattttattattaaaccacctcaataatgttaatgaaaatatatttttacagatataacaatatatgtgaacctgctataatcggcacatttaaaagacttggtttacatggctgggaatacttatctatcacttatactctttcaggaaaatatcacgaaactcatcatatcttgataaattaagaaatccatcatcatggatacaccacggtttatccatatatggcactacaactttataaccatttcttctgaattcttctccctgcgacacatcataaaaatcccagcctgtgaataaatcttctctccatatgatatcatactgtgtagctataaatagtccatcaactgcttccacttccatatatggcctttcattcatgtcagatgcaataaactctttcgctgttaagacattacttgaatatactcttccaactctaggaccattccacatacagccattctcaggcatgttcggtgttcctaccaccccaagcattccaacatttttatcttcgaatattttaagaatatcttccagcaaattaatattaactataaaaacatcctgatgcatatatattttatactttgcatcagtctcattcattgcagcattatagccagaagtcattgagtcagcattctttaccgttaaaacatctaataaatatccatctggtacagtcaatctgtttatataatgtaaacattcgctaatatatttatcatcgttataacatataataaaacatatttttttatcattcataatattatctgttaatatcctttccatatttcaacatttgaaatgctttatcttctttattcagtcttatgtaacactcacacaattttaataaaacattctttttatcaaagcatgctgttcttataatatactccacggctatcactgacagtttctcttcttctatcctgtttaccgcctgcatcagtgcctttgattctgtctgaaactcaattctccacaaaagaaatttaatatcacatattaaatcacatatttctcccagactatccacattcatcaaaatattttcttcaatatgtgcagctttttcttcccggtatatacatattgctatatacatataccccatccttgtatcttctaacatatcattctttctgaattcttcatcggcaaataaatctgataactcttgctttgacttttctgtgttctcattcagaagactattaatataccgcacataatcttttttagccatgtatcctccctttaattaaacaccctattaaatatctcttcaaatctgacatcatatgtatgtttttcttcaattttgccaaatccattctgtgcaatctgccttctttccgcatcatgtgacagataatatttacatttattcattaaatcgtcaattgaatcatatataaccatatcttcacctggaacgaatacatcatataaatccgcctgataattagacagtagaaatccgcctgctccacatatatccatgcatcttaatggaattccacttttaatgcttctgagtgtaatattgagattaattctggaatttctgaatacatatggcatttcattataataatctacagttcctttgttatttacatttatgaatcttacggatgcatccggtgtatagagattaattttattttccctgcctaattccctgccaacccgagacaatatatctgttctttcatcagtcgccattcttcttgcaaggaaataattagcatacacatactgtacagtttctaccccatcctcattaggcttaaccggacacactcgcatcatttcatcaagtacatcacctttcagcatatcttctaaaaagaaatacccatatatgctcctctgtactttcattattgcgtccagatatcctttcgtataatcattaactccacataatctatcataaagattatgtttttcattgtacatagagcctataaatgatatatctccagcatataactcattttttacctcatattcatcattaaacatcctctttaatctgtctgtattaacagccagagggcaataatatactgtttctataccttcattactaagttccatatattgtgttttatcaaatataaacacatagttacacggattaataatagtatatgaatacaataatatttgcgggctatcataaacaattgatatgtatgggacattccttttattacagttattagatataactgggctataattaaaagtaaatacgcagtcaaatgcccgtccatctacaccttcatcaaattccttttcaaatatatcatcaagttctgtacattttctctggttcaattgttctgaccataccactttgaacctatattcctttttttcgaaacattctttaacatcttcaatgccaaaattatagttataaaaaatcaatacattcactttcaacacctcatccgttctattgatgctattatactaaaaaaagctggaacttagcaaatatacctgctaaattccagcctttaattaaagttctattgtatattactgtaagagtgaaagcacaccctgtgtctgctgattagcctgtgtaagcatagactgtccagcctgtgaaagaatgttattcttgctgtactgtaccatctcatcagccatatctgtatcacggatacgcgattcagcagcctgtgtattctcagcgttagtatcaagattattgattgtgtgctcaagtctgttctggatagcaccgagctttgatctctgcttagatactgattcaatagcatcctgaatagactgcattgcatcacctgccttaacattagtacttacctctacagcgctaaccttcaagccatttgctgatactgcaagactaatcttaacatccattgtctgtccttcaagagcaccaacctgaagctttcctgaaaatccacctgttaataagtcctgcttattgaactgtgttgttgttgagattctgtcaagttcttcatttaactgttcaatctcatccttgatagactgtctgtcaactgatgtgttagtatcattagctgcctgtgttgcaagctcattcattctctgaaggattgaatgtgtctcattaagagcaccttcagctacctgaataagtgagataccatcctgtgcattatcagatgccttattaagacctctgatctggcttctcatcttctctgagattgaaagacctgctgcatcatctgctgctctgttaatcttatatcctgatgataacttctctgtagacttctgaagagcatttgttacaactcccatctgtctgtttgtgttgattgctgataaattgtgctgtactaccataattaaattcctccttgaaataaaaacttcctataattaaactatatgtttattatcatttctgatttatgttttatatatcggaggaatttttcaatacttaacccctgaattaaaatttattcataattattttcattcatccattctacaagttctattacccttttattatcaggtgcatacatattcattttatctaatatattaagccacaatatatcgcctgaattcaacaaattatagaatactccatctgaacataatgcagcatctacatcaaactttctttctatatcttcgctccaccctcttctatctttattaaaaaagtctggttcatcataatatcgttttgcatctttttcaaatattattctttttatctggtcaaatgtttccctataaaattctttttcaaaatgtgctccattaagattatcccaacaatttctgtctcccataaaatatttagacaaatctataacccatggattatatttttctataaagtatttctctaaatcatatgcattctgattgtatttaggattgggctgtatcgccattctaaaaccgtctggaatgtatttaactttgccatccaaatcaagataatatgaattacatctgaatctattaagaattatatggtcactatcatatttagtcattattttctccatgaataaatcaacatatgtataccatatccatattggcaattcgtataaattccatttatacattttgtcctgatactttctaaataaatttgtacgacaaaactcattagcttgagttgccatacatgtatttttatacgacaaaaacattatgcccatgtcatagaaatccataacaagataatctgcatccgattctaataataaatttaaagtttctttgttaagtgtttgttttaaagattgcagcctcgatttatcatagagttcatctactgtaattgcttgcacctcttcctttgtaaaggcaggtggcatcatagctgcaacaatattttgtttgtctagaaaatagccgagttctaatctatcatctgctattccatgttctgattgaactccatcgagtaaagatactcttgatatacaacttcccaaaacatttatttttatcttttgcttcatttctgtgatataccccctatttgtcttttactggttttatcaacactttgagtggaaaaagaacaatattcttttcccacttttgtagttcatcaattatttatcctgttttcaatagctttctttagcttagtagagcttgtactctgcgtatacggaaagaataccatagtagaaccatttttctccaggaactctttctcagcaagccatgccggatcatgttcataatcacttcctgagaattgtacatcaaaatgatatatcttaaacatatccctcgttccacagaaatcaagtggcaatttaatagcctcatcaacatatttacatgaacggaccatctctattctttcatcaaaaggcacaaaaggctcagcctgcttattaagtcttaccccttcatcagataccacacctactatcagatacctgcactgctccttagcccgcttaaacatattaagatgtcctatgtggaacaaatcaaacacccctgctatatatcccacattgtacggtttatctatgtctgatttattcaatcctgtcacaaaattattttcctgtactgctgccagtctttgtgccacctgttcttttctcttatttggataatcatttcccggatcatatatatgataatcctttattcccatatcttttaactgattaacaacaccattatatcccttaatacatataataatatgtctctctctttccggaatatcctttaatatgtcaggtgaattaatcggcactccctgcattgttgttccccattttgcactgttattatcaataatagagtaaatgtcataatcatctgcaaattgaaacaaaaatttctctgtgaatctgcctgatccaaaaagaatcagctttttggaatcatcaaatctttcaaaaatatcaacaaaaatttcctgatattgctttgcactgtaattaatcttttccctgttagtataaagaattctaccatctactctcttattctcataatatggtcttaaaggcttctgattccttaaaacatctgtaaatcttgatgacatacgctgccacatatcctcacattcagataatccatatcggtcaaataattcccttcttggaacaatcctctcaaattccttatctgtgccatcatatataattgttattgaacgatacattacagccttcgccggacaattctcccaataaaattcctggtcataatatatgaatctgctcttagcatccttagccgattcatcataaaaacaattgagtggaaccatatcaatatatcctctcgcaagtacaggtccaacatctcttccatccgcactgttcctatctttttcagataatacccctgtatgctctgatgaatcaagaattaattcatacatatcatccattgccttaaaaaatgcatttctatcttttttagcaatagcctttaattcattcatcgcaaccggagcatcaacataaggcattacaaatgtattattctcgacagatgaatcaactacatttattcctcttgcatgcaaatcattaagattatcctgcatctctttaagtttatgtattccttctttgtaaacagccctcttaattacatttctgactccatcatgttcacatatgctggttacaagtgcattatcatgtcctctgtcaagtgatatggttgcatgaagggtatcatctaactgtccgtccatgctgcattctataatgtaagcattagccatcttatgaaacatgccattctttattaaatcagtatacaggtactgctcttcaagaaacacactatccggatagttataaagagggaaataccgcatagccagttcttcaaccggttcatacccttctgcatatacaagctgtgtttcctgcaaagatggcattactgaataaaatttatcattcacaaatccagcctgtaaaaacatcgattttaactctgccatagaataacatcttcctgctatagaatcccggtctgcatccgacaatctcctgtaattctcaatcccatcaaaattgtgattagtatatgggtctctgtctccacatatatacttaatcgcatatcggttttctgttccaataacaagccttccttctgactttaacaatccatgacatatatttaataacttttgtggatatctactctcttcaataacatcaactccaactatataatcatatgcattacccgcaatctgattatttaaaagctgttctacactgcaatcatccactttttccttgcttttaagcagttcaagtaccgctttatctgcctgtctggaatatatatataatattctgctgtcttgtctgaaattgtaccagactaatgcaccttttgaaaaatccctaattattgattcacaatcctgtccatcaatatctaccatcatagccctccaaaactaattgttttttatatatgcctctctattctgtgcattttcataatctccacactgctcataatattcaagggctttgtccttatatcccaggcactcatatataactccaatattatagtatgcctgatatgaattcacgccttcaaccttacaatctttataaagtacagcctttttaaattctttaacagcattatcaaacaagccatttttcatatatataatacccataagaaatttaaaatccgcactatctccaaattcatcatatatatttacaaaagacatagcttctttttctgctccggaattcagcattgcatatccatatgtttcaaccatatcaataacatattccaacttagtatctaaatcatatgaaagtcccttagaaaaataatcacacgcctttgtatattctttctccatataataactcttacccagttggtataatatatatggaatttcttgttcataagacttttcacatgacattcgtatctcatcaagtctgttaacaagcagttttatatttcgttcagccttaacttttctttcatcatcattaagacaataccccatatgatttataactattcctgataaaaatgtttctactgcctctcctgaattagatataatctgctcatgtattttcccatatatagtacagaatttgcgattaaaagccctgcttatccactcccagcttttatcctgtttaatattattcatattaagaatattaatacatttaattcttcccactttataaggatatttgtttaagatatcacacaactcgataagcacagactcttcaccttgcagatattcatcacaatccagtattaatatattgtcattatccgcctttgatacagcaaattgctttgctgcaccaaaatcatcattccactgataatcatatacacaacttgtatattttaatgcaatattctttgtatcatcttgtgaaccagtatcaaccactattatctgtacatgcttattcacaagagaacgcagacaattctcaatatgtttttcttcattcttagctataatgcacactgataaattcatattttctcctatcacttttctaacagtgatttcataatatattcatgtactttctcaccacaacttccaggattagcaacaacatccttaagactctccttctgtctgtgtacaactgtttctaattctcctgcacttaactgtgacaagaactgttttataccaaaatatatgctctctcttctgcaaaaataatttgctttactcattttttcaaatccatctgaatccctcaatttagctttcaacaattcatctgatacttccatataacattcagaatacatcttatctgttatattaataatagctaattttctgtcatatgtacgctgtattattatgttatcgtcacttgcaattgaaaatcctacagaatgagcatattgcggattatacccattccactgtttagcagcttccgacaaaaaatccttattaatcacttcctgttcatatgtatatttatttacaccaataattgtatctgaaaatgctggaatcaaaacgacataatcatcagtcattacaaatgttttaaacattcttctcatcccagacatattttcccatgaattattgataaatgccgtattaatccttattttatcaacaccctcaatattcagctcatttccgcaaaatggtattttgactaattcatttctgtcgaaatctgccagccatatattatcagaatcttcgcctatagcactataattataattatcatccaatacattaaatatattataatcatttatgtatggattatatcttaataaataattggagcatccagtaattacccacatgcaatccttactattcactgcattgtaatcaatcatcccataggaaagattgctaattctatttgcaagcaccgctaatgtatatctatcctgtgaccattcttcagagcttatattatatttccagatagtaaagccttcatatggaagaaacgtcaacatatcatgaaacttaaacattttacctaacggccttgcatcatatttatctgtacatgtaattgtatagctacctttagccttaccatcttgttcgcaggtattgcagttactgaaagatatataattaccatataaagaactgacatatgttccattttcatcattacagatatatgcataaggctgctgccatgtatggctttcacatcctcttatatctcctatatatacacattgtatatcctcactttgtgttttcacagcatcacatatgtcctcagctttaaagattcctgccaatatgtctgatacaaaatatagatttttaccatcaatatatgctcccgctatattaagtctgagctgctgctgataagagcattcatcaattataaaattattaaaaataaaacacggtcttcctgctgctccaaacatgttaataacagagcttccatccgaaccaacatatgcatcacttattgctattgtatctgaaatatcattagtctcatcaaatattcctatattattattaataaaatatgctttaagttccatatacttctcatacaaatcttctctcatcgacttataggttgcctctgtaagaggatgtggccgccatattaaagcaatatctttcatatctttgacaagttcaaaaaaatgtctgagtttgactaatagaatctcccttgaattcagtatatctccaagcgttgtattaagcataactacttttttacctgcaagaatctttttccactgttctgaaacattattgttcatctcacatttatatataacattatctattttaggtgaacccaatggaagcattttatcatacacagtcgtacccctgcacgactccttaaaatattcagactgtgcaatataataatctatgttcttataaacaggaaaatgcttatgattatctgaaatagcacctgctgtaacataatatggtatgtatatcagtttattactataactttttattttgtccgaataataattaggatgtatagttgtaactttattagaatcatcataagggtaatgtatatacgctgcatccggtcttatatttttaagaacataattttcataattaacaacttgtacataatctggaaatctgttcccatcatatgctaatttccattgcttatcccgcttatcaaattcaaaatatggaataacaacaacatcacatctgcatctcttgtccttacttgccgctttccagacactctctaaagaatcccacatctcaactttatatggaaaaaatgctattgtatattgtgtttccatattagatatttgagtatatacatcttttaacagcgctactgatttcttttgtatctcataaaaattattatataacgacatattatacacacattcgcaatactcctctaacatatgaacaacttccagaccatcgttattctgttctaatattgttcctacatttatcgcatattcttgacattgcgccaatatctctataccatcatctgatgatatagggttaatctgttcatgcaaaccaatcaatatattcagtttatttataagttcatttttcattgtggtattcatgctgttatatacctttcatgcattattcacttctaagttttttccaatcacttttacataatttttgtaaccatatattacaatttaattaatatttattaaaagcctttagagaatattgcatctccaaaggcttttaatctacattaaaccatactctttcaataactgcgtctgatattctttatctgaagcagacttctttaaatcttcggttcttccatctgataaaagcaacgtaatcaacttatttactccgcctcttccacttaacatatctgataaaattgctgtgaaataaatcagacttctaattggcacattcggacacaccgttgactgatgctcatatatactaaggcttgcatctacaacaaatgctgaatcattccttatctgattaccgataaagcaggaaatacaaatagaccatatattcactatgattatatcatacaatcctgctttataccctattaaaagcaagattttcataatgaaatacagacataaccgagataaacagcccctgtactgcccattgttatatgaaattaatataacaaccgcaaaggtaatatagaaaaactgcttttgttaataatgttgcattgtatataaagtatattaataaaatcttaaacagttgtcaagatattgttaatcactctgatatattttaaatttttcaatcacgtaaatcaattacatcattagaacaatttgttttctgatactctcatacttataagctgattatttaacgactctgagcaatttctatttgatatgacatactttgcatttttataaacctttgtgacatctttaactgacaatattgattagcaaatatctgatattcgtggtgtcgcgctctgcattcttgcaatgcgtatggctttcaatcatcttaaagaactgcctaaagatttcaggtttattgctaatagatacagtatctaccctttggctgcgcagcagttctacagagaatctgtaagcagaataaactttgatataacccagttgattggacttaccaacaaagatgctgtttcaaccgaattcagaacattaaagcagataattaaaaacacacttacaaatctgctctacaaacagttttaacaacatagacgacgccaactgaatattctcgtgcggagaccggattattcaccaactgcaaccttgctttatgggtagcttatcatagcttcctaatgtcagcacaaaagtttaaatataaaccacccgttcatgtttctgacttgtagctatgtctggaaacatgcctaataaatggcagcttcttatagcaatgaaacaacatacaatactgcgcatgcataaaaaccgttcttagattccgagccagaggtaaacaaacccgcctccgccttgcatctctacccttgatgacgtgaaaaaaatgttaaacttctgtatccaacacaaaactgaactgttctttagttctttgatgtcggtgactatcctacagcagttctttttcatgccatcaaggtgcatcagactatctcatcataaaatatttacagttttccatgtaaaaaaagtgtcttttgttttttcatatgtcatttaacactatccattaccatattatttatatttataaatttatgctatttatataattaaaaagtattcgatccgcacttgaatttattttaatattatcatctgtgacagaatatttcctaattttatttattgcacttattttatcacattcagacataggcgagttaagaagcatctcttcatctaaaatataatatgaggactttgttttttctattgcaaaaggatcaagcatttcctcaacatcagagtcttttaacaactgtttcaaattttgttctgagattacaattttagaaccatttagattcagctgactgtcaaggaacagagcatcttccgcatcatttaaatcaaaagccgtttgtgatagcactattctatgcatcgttggccgcttattttcagaacaagaagttgttaacgcagcacctacacgacatttaataggattgttattgagaaacatgtgatgaaacattatataacttatttctccaatcttttggttttttaaagatatataacaagttgacaatggaatagaaataatcatatcaccgtaatattctttataaattttatctccatattcatttaaagctcctgtaaagatcttcatcttgacagaacacctattattttctgtattattaaattctattgtcccttctattattttttcttcatatgttattgttgacttataatataaataatacgaatttcctatatagccgttaaaagcatgtctggttgtattaataacaaaattatcgctttctggtatattattatgttcatataaaaaattctgtttaccaaagttttcatacgttttgtatgccacattcatcaaatttattttcaaggcatcagaaagaacaatcagttcttttgtagaaaaatttgctttcttacttaataattttgatattgtaggctggcttatttttgttttctcagaaagcgttttttgagataaattaaattcattcattttgttattaataatttttactattgaagaattaatctcatttaaaatctgctctgtattatttccttctgacataataactatccacctttctttagataactccttttcaatcaatattttacatgaacatacattatatgcaaatatacgaatgtcatttattcttaaaaaatattttaatattacttttttaatatatattcttatatttaagaaaattagccgaaacgctgtaaaaatcaacaattttttgcgcaattatacgatttgacattgggcaacttgtatactatactcaatccacaagatttaacttcattaatcattttagtttgtattcattagaccctccgtctaagaatgagactgctaaaaactttaatacttgtatagttaaatagacgtgacatattttaaatttcatcattcgatataacaatcgttatatctttatatatatttttgcaagataaatattatatacatcctaatgtgtttcaaacaataaaaataaggaggttaatatttttgtatttataaaagtcttgaaataattatcatatgtatgtttatattgcaaaagaagaaaacaatttaaacaatgagcagggaggtcataattatgaaaaagttaagcattaaaataaatctggataaagaagatttttatagaattttgaaagtatttttttcaattaccatttatatagttggtatattttcacacgaaatatacactaattatataattgaaaaagccaccaagacatcaactactcaggttttggataatttctctaatttaaaaagtgtaaccaatttaatagacgcatatacaaaattatcccatgagtattttgatacaatccaaaacaatagttccaataaacaaacatcagctgaaccatattggaactttattgatgtctgtaatccttatgagggggcagattctggtaattacaagacctacacaccaaaagaacagataaagattgccggtgaatttagatctaacggttttactaatctttgtcacaacacatatttgctttttaacctaggcgccaagtatagagaacttagtttctctattggccatgttgacggagaggcaatgctagatgtaaaaatctcgatatatcttgatggccagcactttaattcttacataattaaagctcaagaaatgcctataaatatatcaattccacttcaaaatgttcaacagcttaaattctcatttaacgacggagaaacaaatgtagaagcttctacaaaaataggagtatacgatatgataatcaaatagttttcctcactaataataacatttatatgatgatggttgaccaaatatcgaccatcatcatatatgcttaaatttctttaatctgttctaattattcaaacaatatattatccacaatataataccgtttcattaatcagattactataatgtcttagccacattttatagtcaagattaagtgataatatatattcaagtatctcaaatatgtcccctggcttatgatatacacatatagctaacttaggcttatacttgctgattgtttcatcgcagccttttaatgctgccaattctgctccctctatatccatttttataaatgttggtacatcatgttttttaaaaaaatcatccagcttaatcacatctacttctatatctccatctttgcttacttttgtgctgctactattggaactaaaatataatttatcattattatcatatacaccataattatatatctcccaattactatacctgcctttttcaattagctccttacaatgcatatattgttgtggttcgggttcaaaagaatatatctttttatatttactgctaccatatttgaaatactgcttcattgtatagcagtcaaagcatccaacatctgctattacttcatcatcactgaatctgaaaacatcgtaatattgattatccagtgcctttccattcttgccaagataacttccaaaatcaagaacatgttcaacaccaagttgctctaattctacctttattggtcttgcataaaccattgaatcaactataaataacgcatctggatatttttctactgcatcctttcttgaaagcactggtattcccatcaccagattctcctgtgaatttctatcactaaaacattcaaatttaatgtctttcaaagtcatttttatacttttcccataataaccagcaccgccaagtataagctttctgccatcttttatatatggttcaatatctcttcttaattcactcattacatccaaattatcaattgtaatctgtgttatgtggttatagtcatatgtaagactattcatgacacgcgccctataaatatctctagatatatcatcctgaagacatctaccttatatgaaaatgccatgctggtttctccttaatattacctaatcattaatatttattaaaagcctttagagaatattgcatctccaaagtcttttaatctacattaaaccatactccttcaataactgtatctgatattctttatctgaagcagatttctttaaatcttctgttcttccatctgataaaagcaacgtaatcaacttcgcgtccttcttatcgtgtccattctatggggtatattttagttcttgtcatccatcaacatactaaaaacatcactcttgtactctctgttaccattcataattccttctccttatctgattaccgataaagcaggaaatacaaatagaccatatattcactatgattatatcatgtgcttcattcatgattgtcattcgctactcgggatgagcatgtaaacatgttcccctcgctaatgctcattatatcacaccatcctgctttataccctattaaaagcaagattttcataataaaatacagacataaccgagataaacagattctataccgcccattgttatataaaatgaatataacaaccgcacaggtaatatagaaaagctgcttttgttaataagaagtacttgtatataaactacattaataaaatttacaacaaatgtcaatattttttacaaaaataagcaacgaaaatcatttctattccaacaactctcgttttaagtagaatttctttctggtcttacaatcttttttcactttatcaacatatttcttcataacatcgtcatataccttattgcaattaaccgttgcttcatacatttcattttctacatttctatcatgttctccatctggccagcctcgtttctcaatcttatttctaaattcatcttctgatttagaaaaataatggtttattctaattttagtacactgcgaatcataaaaatacttaaatggaattgttgaccctttatcacttatgcataatccatcttgtctttctttatgatttgatgtaccataacatctccaattaactccaactgctccaacattagttgctattcgcattttatgattaataaaattattttttatttgttcaagagtttccactaaattctttccatcttccataggcaataaatattcatcaccatcaataatagccagccatttcgtttcagatctgaatctttggattgcataattatagctctgcatctgtactggttttcctggataatactcatatgtcacaattccatcgtctatatacttttgaattctgtcttttaacccgtctgtactttcattatcatatatataaaaatgttgtactcctactaagagatgatattctatccactcttatatatacttctcattcttaaaaatagccatgattgaaagatcataaccgccttctggtacactccaccaaaataatcgagtaaaaataaagtataattcataattgaaacaaaaagattgatatctatctgtttaactaccaactgataacatacttcagatataacttccagcttttttattatattgctccattgtaagccatcattttcaagcacatttccaaattcaacagcttcaccctgtattaatgtacaatattctcttattttttgttcatcattattagtatgtgctgtttttataaaatcaactttctctcgccaacttttcttgattgccttaattattgttatgtaatctttcatatgaatttactcgtttattcacaatacaacactgtttcattaactaaattagtataatgccttaaccacattttatagtcagaattaagtgataatataaattcaggtatttcaaatatatcttctggtttgtgatatacacaaatagccaacttaggcttatatttactaattatttcagtacatccttttaatgcaactaattctgatccctcaatatccatctttatgaatgtgggcggttcatgtgttttaaagaaatcatccagttttattacattcacctctaagtcaccatcttgacttattttactacagctactattagaactaaaatataatttgccattattatcacatactccataattaaatatttcccaatttgggtattgtccatcttcaattatttttttgcatttaacaaattgttctggttctggttcaaatgaatatattcttttgtatttttcagtaacacatttaaagtattgctttgttgtataacaatcataacaaccaacatctgcaataacttcgtcatcgttaaatttaaaaatatcataatattgattatctctgattgtactattcttattaagataagccccaaaatctaatatatatttaacccccaattgttctaattccttctttatttgtttatcatacaccattgatgttattacaaacaaagcatctttatattttaatacagcttctcttcttgaaataactggtatccccataatagtatcttgatttggatttccatcactaaagcactcaaaatgaatatcgtctaaagttctttttatacttctgccataataaccagctccatctaatatgagtttagtctttttttcaataaatggtttcaattgttctcttaaatatttaaatatatctaatccatcaactgcaatttgcgttatgtaattataatcatatgtaatactatttaaaacacgggccttataaatatcctttgatatatcatcctgcaattgtccatatactctatttgtaacatttattagatttttatacataattttccctcattcaatcattgtgttatatttttttatatttttaaaagatattcccatagtttcaagttgaagtttcatatcatttccatacaacttatttgcaacaatatacactgcatctttatatttaaccgttgcttgctttggacgaaatacttttttccccataaattcattaatatctttattattgtcacaatatgcaaaaacatcatacccatgcttacataataaatcactaaccttcttgccatatgctcctgttccaaagacaaataaatttttgccttctaacccttgccaaaagctctcattaagttcttctttcaattttactcttattttcaataattctgagaatttgtacacagagtctcttaacaacatataatcattccaggtatcttcactgaaatcaaaattatttattattttatcagataataatttttcaattttattatcaaaccaactaattttatcagatatatcttctaacttttcattttcataattatgcgcaataatatagtttttaacatgctgcacgtattctctaaacatttttacataaatataatgccagtgatattgatttatattactatcgtgttcataattatcagttaaatacttatattcgttatatgtataaacaagcgtattcggatttctaaatgatgattccattcggtcttttctgtatttataataaggtttttcaacaaacatcgctctgtgagatttcaatattacctgatgataaaatgctgtatcctgaaacgctgcacctttagtctcattcagaaatatgttattttttataagaaaatctcttttatatatgcctctccatatatttaatcccaattcgtgcagtacaggcatacttattggagacaatatattattgtaataaccagttaattgaccgctaaacattttgactggattcatagtatatgtgccatctgcattactatacacatcttcataatctccttttatgaaatccaatttattcttttctgctaattcatataattcttcaaacatattagaagcaataaaatcatctgtttcaacaataccaatatacttcccttcagcttgttctatccccatattaatctgttttccataactttttatattactcataattactctgattctactatctctcctagaataattcattaatcgctcatatgttccatcggtagaaccagcatctacacaaataatctgaacctcctttagagtctgattaattacactttgtatacactcatctatataattaacaacatttaaagatggcataattattgttacttttatcataatcccctcacactaataattttctaaacattaatacccaaaattctattggtaatcttctctctattcttgtttatatttaccttatctaaccaacttccactaaaatgatgaattgaaaatgttttgtccgtaatttttaactgtttatacctatattccattggacacaaaaactcacttggtaaaactgcaacattcccatattttatatattgaaatgtgttatttcttatcaatccgaattcatccatatctttgctttgaatttgtggacaaggaatatatgaaccaggcgtcatattatcataagattccagacatttttttataaatatattacctttctctgcgccaaatcctagtcctgtattaataaaagattctgcctcaaatccaacatatgctctaaatcttctcaactcatctatatttttaatcaattgtacatctgtatcaagatatataccaccattattatatataatatctaatctggcataatcggaaacaaatgcccactttctatctttataagcttttgatataaacggatgtttattaacatcgtaattagattcatcccacctaataatactataatccggacataactttttccaaccatcaatatatttaatatattcgtcgggcattgaattatttccaaaccaacaataatgaattactgggggaatataatattcactttccttacaactttcatagtagttcatatcaatataactgtcattacaggcatatatgtaatctaaaatataacaatctatgccatctaaagctgtaatacagtctaattgaaggacaatttcctcatagtgaatagatgctatcaatatcttatcatctttactaatattagctaacatctgttcaggtgatattattgtatatctcttatcatctagttgtatatcttgtccccactttgctttatcattatcaacaacaaaatcagttactgatgataaacaataaaatggtaacacattcttatatgtaataagtctctttgaggctccaaatatatacaacttttccatcttattttttttcattaattgcttgatactaatattaactaaatttatcattacagacaccttttcattgttttcttaaaattcaatgcaccttatatatattcattaatatctactatatatttaaacccaagtgatttagcattatccaccaacttatagctcttgttttttattgctattaatattaaactatctctgtcagcctcttgtatttcaactgtatcaatgccatttatttgcagcttattttctaattttgtttcagcaaaacatgagatacatattcctctctcacatagtaattcattcaagccttgtccaactttcccagccccatatattacaattttttgattttctctaattttttctaatatttctaatggcaatttaaattgaaaaaaaccattatataagctgctgctggcaattgacaacattatataatctgctctatgttttttgacatctgacatatcaaagcaatcaattcttttataataattgattaaagcttttgattctaatcttataaatttatctaaagatatgttaaccctgtcatcataatcattttctaaatattcatatgttttaaccatgattttacataaagaccatatcttcttttgtatattattagttgattttgttatagaattatctcttcgcatatacccgtaatagcaatcatttacacttgaaactcttgttgcagtcattaatgcttttacataaaacaaatcatcttcaaatattatttctttttcaaacataatattatttttctttataaaatttctatcataaattgctgtgcatgacataagataactattatttttttccatactattacaaaaaaaatctttgccttctattatgtcagggaaaaaatcttcaccttttcttttaactttctcaccattaatttgaatttcattaaatccaaaatataatatatctaaattgtattcatatgctttgtaatataattcttctaatgtattttcttttatataatcgtcagaatctaaaaaaaatatgtactttcctcttgcacactcaataccaatatttctagaaattgataagcctttattattgttgttttttttatatataattcttgaatcttgtttctggaatttatttattatttcatcactattatctgtagagcaatcatttatgcatattatttcaatttctctaagtgattgatttaagacgctaaccaaacatttaactaagtatttttccgtattatatactggtataattactgaaacttttatctgactcatagacttttctcctcaaatattttttgattagtactcatttcttaatgctatttccgtatacaataaatcaaaatttttaatatcacattctgtattatattttttaattcttgtatattgcttttcctcatgttctctcataagtatttcattgttttctataaacatactgtcacattccattgccgatactttttcatttttctttatgtaattaaatatttttgaaaataaatcattaaacattttaatatcagaaacactaagtactctggctaatttaattacatcaccatcattttccaagtgtttttttgcaaaaacgatattatacattacataacatttcatatttaattcgttcacaatctctatacagttgaccccatatctaacattgtccatatattttttatacacatcatcatcagagatacaacttgatgaacttacctttgtgatataacaattttctttattttgtgattccatactgaagaatcttatcttttttaaacttaaatccatgaatccaaacattttcttttctatcattaactccttataacttggagttgcatctataacaatgtccggctctttgaataatgcttccgttacttgaaaaatataaattctgtatttgtcatcaattgcccatgtcgtaggattcgctactgtataaaatttcccgctttctgatttcaaacgataatatatcattccaaagaatccaactacattctcatcttctaatagcacatatccataatttcccttttgatatgaataatcttcactaaaatcatatgtgactagtggtttaataaatttatatacatctaaatccatcatacagccaaatctattataatttctttttagacatgatataataccaatcaaatatttgtcatcatatttttttaattcaattaccggcatggcttgtctcccttatctataattgttctaaaattgtctgtattgaaatcacatttaaatatcccatatttttcaattctttttctatatctttatagtcatatagtgccgtaacaatcattaaatcaatgttgattttaccctcttctggcatgacaatatttattccatctatatcacattgtacatttctgagatctaatatctctacaatattaatatttttgcaatttgttattatttcatttacaacaagttttccaatcactccatatccatatacagaaatatttttaacattattttcatgaagccatgaatcaatatatatttttgtctgatacagactgatccatcttgcaaacaaaccgtaaaactgcttatatttctgaagtgttttttctcttataatcagctcttcatttgcgccatcttccttatcaatatcaacttttctataagtttcaaaaaaacaatccgcctgattcaactgacacgctctatatcttgcaagactatttacccgcttatcataaggtgatatttttatctggtccttgtgacatcttattaattgttctttatattgcataacatctgtaatatcaagataatgtgttacatcatgaaacggcacatgaacttcgtactcatagatttcagttttcgcattacatctttttttaatcacttccaatgaatacataaatgcagccgtatgatctggatgattgtcatctctccatggcagaaaaattttagtatacttctcaaactttatagtttcagtgcaatcttttattcccattaatcctccatccggataaccaagccaaacataatcagctattcctgcctgtgtcatttcatcaataaattgatttttccgaatatctgcttcttgttctgactttacattatcatttccctgagaaccatctgtcattacaaccacactacatttttcaggatagagtgataacaaacctccacaccctatacattcatcatccggatgtggtgctattattaatattttgtcttctttttttatatttatagatattgatgacatattatttatttcctttaacatcgttatataattaaagattttttaatataatgggcgttttccataagattttattttcttccacaccaaattcaatcaactcttgttttatctgcttaacaattgtttcttctttaaccgcaattaaaactttatcataattactttcaaaggcaatatccacagaaatcacttcttctattctattattaatttcataccattttttatctgtccatttaatatgtttttcccctatttctgcacatagctgccgataataatcaacaccaactgcacccgctccatataatataatttcttcatttttgttaatttgaaacggaacataaaattgaataatgctattctgccaagaaaattccatatatttaggtgcaatatataatctattacttataaatttctgtaatttagttattactaattttgatgcatttttcatttcaaagtaatttctagcagcaatatatactttatttaaattcatcataaaataatcatcacttgtgttcataacagatttcttattatacttataaatatattgtttatcttcaataatacatactccttcttttgaatttaaaagataaatccaattgaataaacggtcttcatatctatatatatcttctggcaatatattcacaacattttttgctatgtccgatttatacattttagctaccatatatggtaacactccatctttttcaacattgtcaacataaatcatattatccacaatatatttcaactgtttttcatcattatatacaccttttaaaatagcatttgttttaggtattgtattaccatatttatcttctttaagcactcctgcacatacaatatcacattttcccatttcatttataagattttctattaacctgttttttacaaagtcatctgcatcaacaaagcagatgtactctcctgaagaatttataatacctttcttacgcgcagcaactacaccactatgcgattgcatatatatcttaattctagaatcctttttttgtaactctttgcaaatttccaagctcttatccattgattgatcatcaattattataacttctatattattatatgtttgatttaatacactttccaaacaattaaatatatatttttcagcattatacactggtataattatacttactaattcatttttattcatagtttaattctttctgctctattaattttaatataaattgagctgctctttcacttgcatgtccatcttcgtgaactccatagctatccaaaaactttttcactttctttttgtataaatcctcattaaaatctgaaatacattttattaattcatcattagattcactaatatcaaacggtaacgattcataatctatcaataaatctctttcttcttttatatatttaattctatcgggtgcaaataaaaacacaggattaaatttataagcagactcaaacataatactcgaataatctgtaatcattacctctgacgctgcaactaattcttgtgcatcttgatataagcttacatcaattacattattattaatatttccatcagacgcttgaattgctgccattgggtgcaaccgttttagacacttccattccccgccgaatcttttttttaatacattaactatttcatcaacattgaaataaaattgtggattatatgcaatatattctttattattctgtatattgcttctaaatgtaggtgcatacatcaataaatgaattttataatcaattccataataatcacatattttttgtttactttcatttttaaatagaacatcacttcttggtgacccaactcttataaactttccatcatatccaaatcccgttctacatgttttttcatcaaattcactcccagtaaagataaaatctataacacttgtttcctctttttgtcgctcagctaagccaggtatagacattgcagttttatcttcaagataaaattttttcagcgtaatacttgaccaatgcttggtatgaataacatattgacctcttttttttatatacccaattggcaaacgactatcatatataataactttagctgtttctatttcttgataatattgtttccaattagattcgcaaaccatacgaactgatttaggtttgtcttctcgtggactcctaacacaccacactaaatcaagttgagtgtatttttctaattcaagagtaatatacttttcatgacttccatcaaatcccattataaataatactttattatttactataggattacttttgtatttaactgctacattttttctttgatcttttttatccttttcatcattttccaaacttataatagataaaaaatttgagaaacctaactttctaacctgttctacaatctccttttcatgtacacttgcaattgcgattatgatattctgtttttctcttatattaattaagctttctggagaattaataataaggttactattttctaataattccccaaaaatatcagaaaactttaatccccactttctcttatcattatctactacagcaattatcatttttttatttttaatttgattaagtaaataatttgaatgagatgatgcaccaaaaatcactatttttttattttcttctattttttcgattttttcccactttattatattattttctttcatagcatttccttttattttaaattttttgcaaacatacatttacgacataaaatagataatgattcatctaaattcattcctctttttactaatctcatctgttcacttgaaattattgaatcataatcttctttaagtaaatttcccaaaacatgtttcattccaaaatcattacaacaaagtacaaccgttccatctggcaacaatacattatgattcagattcactgctctttcacaatatattctgccacatttctctccgccccgaagtttgttgtctttattttccaaattacctgccctatcagacatttccccataaattcttattttatctttagttttttctaaaaccttagggtgtggttcactttggcaattagcattatccacaaaaggtgtcccatcttttttctttgcattaattattatctctaacaattctaaatattcatccgtcacaggtatattcgcatatccatctttatctgcaacatgtaaaaccacctgtttaaatggcatgctaataattttcattagctttttctttgtcagccctattaatgtagtatacaaagtcatttcatagccttgttcaaaggcatattgcatcatatcaatactttcattgtttagaaatggctctacaaatcctgcccattctatcaaagcattcttaggcaacttatcaatacatattttaaaatcatctaatgtcatatatttttttcttttattgtcttttctaaaatactctttaagaaacacctcctgtggacaatatttacaatttacagagcatccaatagcaggtgttatctccaatgttggatttatcatcttattatgatgatactgagttgtatacaatattccatctggacaatcaactacttgataatttccatatttgtttatatattctttgataacacttttcccatgttccaagacacctattaaaatgacagaattttcctctattgaagaaccaaactctatgacaggaatgtcttcaattcttgattcattctgttccgtattagtaacacaaaacccttgtatctcaatttcattttccacgcataaatgatatattgcctgtccaacttttcctgcaccatatatattttttttcccatttttatattttacactatcaatatattgcttataactactgttcattctttaactccctcgtcatccatgataagttcccataatgtatccaaaatgttttattagtaacatgtattgtgttcgtatgaccacatgccccctgaaaaatcataggatatatgttcattccatgcacattctgtaatctatcattaaccttaactccatattttttcattacattatacgaatgactattacatgatgtcttattatatgttccatctttattaacaaaagaaactgtatcataataatctctcaattcttttataatatccattcctgctactgctccaaaaccactgcctaaattcataacaaatgttgcatcaaaagatgcaaaacacttttgatacaataattcatctggtttttttatcatttcaatatctgtatcaagatatattccaccatatttatatataatatccaatctcatataatcaggcacaaatccccatattttactttcataagcttctttcatgtatttatttttcgtgatatcataatttgtatcattccactcataaaattcgtaatcaggacataattctttccaatgttctatatttttcttaattaaattaggtttttcttttccaaaccatgcataatgaatctttttaggtataagcttatctttagattcatatataacatctgaataatttgatatctccaattgatttcttgctatctcatcaattgaaatacatctttgcatatcatagccatatacacttaattgattataaatactcctataatcaattgctgttatcaaaattatactgttaccatcatcacattttattgcttctttgatagatactattttaaatgctttcccatcacaaatatattctgaaccaatctttttttcatcattatctatataagctactaaattattctgtattccccagttataaagaatccctgccattcttttaccttgaataccacaaccaaaacaaaatatttttttatccgaaatgtatctaacgaattcatccaaacacatttcagataaacagctcatttcttttttcatattattcccccacatgctcttattttaaatatgcattttttctaaaatcacatcagctactaatttggaagcctttgtattacatactaacttttctgatgttctaaacctatacaacatatcaaaatactttgccatatcaaagtttaatatatttgcctctaaactatgattattgattgctattaaaaacggcaacactgcatttatatctggttcaatgtctggattattactgaccgttttctctgtatcatctgatagttcccacaataaactccctctatcattcatatatttttcaatatcatcagcatatataaacactggtatatcagcttcgctggcatcaaatgcagcactcgaataatctgttataaaagcatccattccagctaatatttcatacatatcgtcagcctgactctcatctattattctatcctgaagcttttcattcttatattctttaaaagttgatgcgagttgaggatgaactcttacacaaagataccatttaccaccaaatcgaatttctaaattgtttaatagtctctcaaaatcaatagtccagagttcagaaaaaacaaatctttttcccttttttgcgccttctctaaatgttggagcaaacataactacttttgaatcgtgtggaagattatgttctttcctaaatttattaatataatacaatctgtcaccatgcaatatatcgcaccttggttgtcccactttcaagaaatgtccattataaacaagtccttttctgaacattatctcacaataatcagaatcaactaccaaatcatctatcatatctgaatcatttttactaacaagatatgccatataagagaatgcttctccccttaaaagcccgattgttttaaatcccatatttgcatgccatgtgttaatataatattgaccctttctcttttttgtaccatatggcttacgataattatcaatccataccttagatttactgagccagtaagccctactgattaatgtattaggaactttctttatataatcaggaaatgctttatttctatcattaacaaaccatacaattttacagttagggttatttttatgtaactcctgaataatatatttaggattacagccaaaaccacctcttccttcaaatgtacatacagaaacaagattattatctatgggaaatattctgcatatataaaagcatatactattaaagaatgcttttatctttctttttgttatatatatcttttcttgtttagtttttattccaggtgtacattccatattaaagtatccttttattttcctataattagagatccacatctgtcaggtataggaattttgaccattctctctcctatttccagttcataatctagcactgcctgccttacacctcttaattctggtgcattataatcatgcaacattatataccctcccctattaactcttggataaaaatatctcagtccttctaaaataggcatatataaatcacaatcaatagaaactaatgcatatttcaacttttcttctggtattgtatcagggaaaaagccctttcttacaactacttgatttggatgtttcatttttcctaacactaaacttacacttgtttcttcaaaatttttcaccttatcaaaccactctttagatgaatatttattttctatatcaatatcaatatctttattatcaaacccatcaaatgtgtcaaataaaaacagtcttttatcagggaattctttattaatccactttgaaaaatttcctttaaatactcccaattctgccaattctccattaatattgttttgtttaatttcttctataagtagttccaatgtagctagcctattataatcataagattcagtatatgaatttcctaatatattcatcttatgactcccataatttttcaaatttctctgcatagctgccataacaatatattcatctttttttgttatctgtctttcatatttcattgcaaaaatataatcatattttatatctaatgtgccttctatactacaataaagtttacataacatctcattttcaagaattaatctttgtttttgtatacccctgcctatacattcatatactgtatcaatatatgaattagctaaataaatgatatcaatattttcacctatatcttctattccgataatgtttgttcccaaaaaactttctttattcggattagtttctacaaaagccaccaattcctccccttcaaaattatgactctcataaaatgccttaccaacttttcctgttccatatatcactacttttttcatgttttcttatcctccgtttaaaaactaatcatcgccttaaatattgcaatatcatctttggtagttatcttaatattttttgttgaacctgcagaaaaatataatttttttcccatatcagtcataagtgtattagcatatgacgagccgtgaataccaatattcttttcgaatccctcaatatatacatctaatatttctttgtatttgtaagcttgtggtgtctgtacaattctgaggctttctcttggaatatacttatctgtagtttttccatcttttgtttcaaatatctgttcatatactggatatgcagttacaccattgccattgctttcacatgtttctatacacgatgttattatattatcatcaaccataggtcttattccatcatgtataataataatatctccatcgttacatatattttttagattctctaaaccaattttaattgattcctgactactattaccaccagatataacatatttcaacttagctattccaaattgttcagcataagcctttaaaatatcataccatccttccaaacaaactacctctattgcatctatcataggatgtttttggaatttttctaatgtatatataattattggcttgtcattaacatttataaactgttttggtatcttgttaccagttcttgctcctacacctcctgctataataacagcaacattcatatttatttacccctctttttctgatattctttttctaatgacttctattgtataattaaatacttccttacaatcaagtacttctgaccatcctaattttttcaatttactattatcaagtaatgcttttgttgccgttgaaaatccaagcttttctttttcatctggcaaatcatataccactttcttccctacagaatttgctgccatttccgcaacatctttcatataccaattaccagaatctgatgatatgttgtatgcattttgattttcgcctttaaacattatgtaaagaatagcatatgctgcctgaaaaacatctatatatgaataatattgtcttccatcgctcttcaacacaatatcttgtctgcttgcagcattcttaataaattgagcaattgccttgctatctctaattgacattgttggtccatatgtcctacataatcttggaatcacaaaatttaagtcatattttttcccatatgcctggcacaatgcctctcctgttctcttgctctccggataccctgctcttaatgtattgcaatctacatacccacaatatttttcatcaaacttttctatatctcccctattctcaccatatatctcaacagaagataagaaaacaaatctattacaattatgttttacaccatattccaataaattgttagttccaataacattagatgatattgtccctattggatctaaactgtaatcaataggatgcgtattacttgctgcatgaattatataatccacatctccaacctctgttatctggttattaatatcacatgttataaatttaaaatccgaacaaatactataattatcaaacatctcctgtgcatgttgtaaactgcgtcccagaccatatattttataatttgcattatatgtatcattcatattaatcaatatatctataataacagttcctatcatcccactagcacctgatattaatacagtcttctctttcttagattcatatacattttttaattttttacataatatatcaatatacgattgataacgataatctttttccatactaatctccattattacaaaagctccgcacacaaatgcggagctttcattttaatctctatactatctttgattaaccgatacacctagcgactccattcgcatgttgagataactatttataattgtcctatttgataattaaattatacaaaatatatcggctatttatattaattcttaacctataatcaaaaatcactttctaaaccattctatattacttcttaacactttagctggatttgttatatctgttccatcatttttattaatcaatctgtgactgccaacatttagctttacataatgagaaaacatacaatcttctccaatatatatttgtgatttttcactgtccatatataaatatttgcaaaatgtagtccccttttctatattaattccccaaaaatcacatgcatatattttgcctgaccttcgtacttgcactttatttccaaacctaatctcagaattatttttagctgttagatctatactttcacctattttattattctctcccaaacaaatatatccattgttagcaatacatataccacagtgctttgatatatacacataattttccaattcaactctctaattattactgactattatagaacattcctcacattaaactgctttaattgacattaatgttctaactaatattttcccaaccttcacctgaatatcccttcaagctttaatatatggtctatacctccttttaacctgtctttactaactctaaatacaaaacgcagcatacagaggtacaatctttttattgtcctcatatccaaagtttttagaagacagttttattgcatattccggtttgaaagtatccatgtatacttttaaactttttgctcttgtattatctgctgatttcacttctattggtataagtctgccttcacgctgtataataaaatctatctctgctccacgctctgactgccaataatatgtgttataaccattaattgaaagctggacatttacataattttcagtcatgccacctttaaaatcattaagttcgtcaaccatataaagaatgtcattagcagatacatctttttttgcacatagcaatcccatatcagacacatatatcttaaatgaatcaatatcccggtaattttcaagtggtttctttatttgttccactttatatacctgtgacacaatacctgataaatttaaccattctattgcattttcaaactcagacgcacgcccacctttttttataagcttatactggaagcgggtgttttttttcgataactgtacagtaatattatcatatgcaagtcttgtcttctttatttcattgagattattatacttactcatatcattaagataacttgcaagtatagtatcctgtgtatgccgtaccaaaatataatcctttgtttctgcatattgcatgacacactctggcataccacccacaataagatattgtctgtatatattcatcgcagcatcatgtagcgctgacggtaatggtttatctgtatcaaagcagtcttttatctttgaaaccaaatcatcttctccaagagctaacataaactcctcaacatccataggatacattgtcttcatatccacttttccaacaggaaatgaaaatctggccctgttaactgcaacacccaacagacttcccgcaacaataatatgataatccggttcatcctcacagaaatatttaagtgaagtcaatgctctttcgcaaagctgtacctcatcaaaaactataagggttctttcctttactattgtttgtcccgcaatatgcgacaaaataggtatcagataatctggacttatattctcgtcaaatgtttcattaagcttagggttcgtctcaaaattaaaatataccacattatcatagtgtgtacgtccgaattccagaacagaatatgtctttcccacctgtcttgccccctgtaatatcagaggttttcgatgctcactttctttccattgttccagaaaagttgtaatttttctatacataatctaccctcctcaaaggttctgattacaatataacaaacattcatgta

SEQ ID NO: 614 - DNA, 7803 bp, unidentified
  source 1..7803: mol_type = unassigned DNA
tcagttaattcgatagctgacgaaggctatgcgtttgctgtccggtgcccatgagttgacattgatggtgccttgtccaccgaaaagctttaacaatgtcttgggttctccaccgtttgcgggcattaggcgcagctctacgttcttgtttgccaggtgctctcccggttccaggtcacctttgtagtaggtgatgaatacaacggattttccgtcaggggagatgtgggggaaccaggagttacgggtttcgtcaaaggtcatctgggtctgttcggagccgtctgccttcatgcgccagacttgcatgagtccggtgcgtacggaattgaaccagatgtattgtccgcagggggaatattccggtccgtcatccagaccttcggcagtggtcaggcgggtttcttcacctccttccgccgggatggtatagacgtcatagttgccgtttcgttcggcgcaataggcaagctctttgccgtcggggctccagccgtggaggtagctgggagccataggtgttattaaacggggagtgccgcccgtgatgggaagtgtataaatgcgcgatttatagtcttcttttgtcccgtggctgatggctatctgctgtccgtcggccgagaggacgtggtcgttgttgcagttttgggcaaatccggtgtttatcagttccggttcggcaggcgaggtgggggaaaggcggtaaagctttccgtcgttgttgtatagcagccattgcccgtcgggcgtccaattgggagcttcaatccggtagggaaattcttttacgacggtccggttaccgttagttacatccagtatttcgaggacgctggtaatctcgtttttttgttgagcggttgcggtcagtgcaacagttgcaaagaaggggattagatagggtttcatgttcatatcgtatttaataaatctccgcaagatacattttttattggaaactacatagtcggagcatgcttttttcagagagaatctgtagtgatggtcgaatgcgtagtgcttatcatatgaatagtctccgggattcttgaaatagttgtccacatactgccagttgtcggtgtcgagcggcgtgtgcgaagtcatgtacgatagggagcttttatctctactatctcgctgtccagactaatcaggtctttgcccaagcggacaatgcgggcatcttcgggcatgtagtcggtgccgacttccccctttccgcctccaccgaatgacaaccatcctgtaccttcgtcatctatcacggcacccgggtcgaaaggagccctgcagtggcctaatccttgggtgaactggctcaccagcatacgtcttaccgtccgattccacccgcgatacgatggatggcgcccatgaggctataccccatggcgagagggcctttacgtcaatcagtccgtgataagtccaatttaccatgtcatcggtggacagcatgaccagtgaatgggatgtattggtatgtgtttttgccgtattttcccacactgtccagttgctgggtgtcattggttccatacacatagagccttccgttgtattccaccgatgtcgggtcggccacaaaaatgaaatccaacagcgggttggcgtttccactgaagaattggggtgattctaccggacgcgtgtctttctttcttgaatcggaaagcgcccacacatcatttcctgcggatatagccgccagcagcaaagccgctgtaaataacttgattctttccatttttttatagtatgttatagaaacctatggtagccttttgattttggcttgtgttcttcaatcacctcaatcctttatttaagattgaaaaatcgggttattgaaaagttgccgcaaatattgggaattactatgtataatataaggtgtattatgtttttaataatgtgcctatatgtttcaagttatcattgtaatcagatggtgctgttttaaacttgctttacttgctttgggataattatgcggctatggattaaattgtttggaagggcattgtgttttatgcaaatatattggtagaagagcgtttttttattctaacgattcttgaaaagaaaaagcactgattattccagataatcagtgcttgaatatcgagccgctagccagacttgaactggcgacctacgcgttacgaatgcgttgctctaccaactgagctatagcggcaataagcttttgtttacggggtgcaaaggtacatctttatttgaaaaggcaaaaagaatctctgttttttttagaaatattttagtgggataattttctatttgaatgtcctgaactttattgccataaaaattggataataaaacgaaaagaagcatctttgtcgtaggtcctatagcaaataagtctgatactgattatgaatttaagaatctattataaatatctttcttcacgcatagcgtccaaatggacggtgttgttggtagatgtaattatcgttgtgatttccatgctttctgcatgttttttgcaatataggctttcgtccgtatcttatgaaatttctttgtatgtatggctgaccattttggctgtcttgtgtaatgtctgtttctttcatattctccgtacttatgtgggtgttatccgtttttcctcttttgtggatatttatcgtgtgttttggagtcttacgataagctatgctgtactgtttttagggaattactgttggtctgtttcggggcttggagaaactttgccgaacagcattctgtttatggcatatatgttcaccttctctctgatggcttgtatgcgcattgctgtgaagatgctttatgaagctattgcttttgatgcacgtcattgcgtgaatgtttttatttatggattccatgggactggagtcaatgttgcaaaatccttgagagttagtcgtaataatcattatcgcctgcgtggctttatttcggacgaacctgatatgataggtaaacatacgatgggatgcagggtatatcccaatgatgagcagctgtttgaccgtctaaagaaaaagaaagtggatacaatcattatctctccaagcaaggtgtcggatttggaaaattccggaatgctggataaactgttctctcatgatattcatgtaatgaccgttcctcccttaagcgattgtatggacgatggactgataaaggacattcaaatagaagattggctccgtagagaaccggtacaagttgacgtgcgtaaaattacggcccatatcgaggggcgtagagtaatggttacgggagcggcgggagctgtaggaagggaaatcgtccgccagttggctacactgaatccttatcagttgattctggtagatcaggcagaatccccattgtatgatgtacagttggaattgtctgatcattggaagaatctggaggtccgtgtattggttgcagatgttgctaaccgtacgcgtatggaggctatatttgaagaaacacgtcctcaacttgtttttcattctgctgcgtataagcatgtacaactgatggatgattttgtatcggaggcaattcaaacgaatatatcggggacagtgaatattgcggacctggcggcaaagtatagagtgtcccgtatggttatgatatctgctgctaatgcacgtcatccggagaatgctatggaatatagtaagcgtgtggcggaaatatatgtgcaatcatctgattgcaggttgaaacgcgacacaggggaaactgatatgttcatagtacgtttgggtgaggtgtatccgacgaatactcattgtttgattaccttgtctgaagcttgtatgctcaccctggaagtgggagtcatgggggatgggggagaagtgtacattgtgggagggcctggggatggacttttggattctgtaatcggtgaaaagataaagcgtgaaaaggcatctgttgatgattatgaacatatgcgggaagaagtgctggccttggtgcaacatagttatactgaaaaaaaggctattttgattggactaatgaaaaaaatagtgccaatttttccgctttcttctacccgatgaaaagacgtgaaagtgacagctttttaatgctttttctgaaacttagaggtggaataaatgtatattataaaaataatatattacctttgtgcccgatttatatttattacaagaactcaaaagattaatcagaatatcttatgcgtagattaataacactattctttttggtatttactttgtcaggggtagcttttgctcagcagatgtcagatgatcaggttgttcagtatgtaaaaagcgctcagcagatgggcaaaaatcaaaagcagattactactgaattaatgcggcggggagtgacaaaggaacaagttgaaagaattcagaaaaagtatgaaaactctaaatctggaagtccgcagagcaatacccaagatgagaagcgttctcgtcaacgtggtgaaatgagtggcgtagtcaaagggctgcgtacaacctcggaaacttattctgccagacaaacggatgttgcaggggattctttacaaatgatggataatcgttccttgtctcaaaagaaggaaacagaggatccgacttcgcaaatttatggtcataatatttttactaacgataatttgactttcgaacccaatgtgaatgttgctactcccgagaattatcgtctggggcctggtgacgaggtgattattgatgtgtggggagcttctgaaacaacgattcgacaaacaatctctccggaaggaagtattcttgtgaataatttaggaccggtttatctgagtggcaaaactgtaaaggaagccaataattatttgaaacaagaatttgccagaatatattctggagtaaccggaaatgttccgtctacccaagttaaactgacattaggagaaatacgttctattcaagtaaacgttatgggtgaagttgtggtgcccggaacttataccctctcatcatttgcttccgtatttcatgctttatatcgtgcaggtggtgtgaatccgattggtagtttgcgcagtattaaagtgattcgcaatggaaatacaatagcggatttggatgtttacgatttacttatgaaaggaaaaatgaaagatgacatccgtctgcaggatggtgatgtaattcttgtggatccttaccagtccctggtacagatattaggtaaggtaaaacgtccgatgttttatgaaatgaaatccactgaaaccgtaggtacattattgaagtattcaggtggttttacgggtgatgcttataagaaagcattacgtataatccgtaaaagtggacgtgagcatcaaatttataatgtggatgagatggattattccgtattccgcgtagatgacggtgataagataacggttgattccgttttacagcgttttgagaatcgtgtggaagtccgcggtgctgtatatcgtgaaggtttgtaccagttggacggtatgatgaatacagtgaagcagctgattaagaaagcggaaggacttcgcggagatgcattcttaaaccgtgctataatcgatcgtgagcttgaagacttgtcgcatgagattatacaagtagatgtgaaaggtttgctgaacgggacagctgcagatattcctttgcagaagaatgacattttatatattccaagtattcatgacttgaaggaagaagctacacttaccatccatggtgaagttgccaatccgggtacatatctctattctgataaaatgacagtagaggatttggtgttgcaggctggtggcttgttggaggcggcggctacaacaaaggttgaagttgcacggcgcatgaaagatccgaagagtacatctttcagtactacagtaggccagaatttctcttttgatttgaaagatggcttattggtgggagaaggaagccaggatttccatcttgagccttttgatgaaatttatgttcgtaagagtccgtcctattttaaacaacagaatgttatggtgggtggagaagtcctttttagcggtaattatgcactatcgaaaaagaatgaacgtttgagtgacttgatagctaaggctggtggagtaactcccgatgcttatataaaaggagcgcgtcttatacgtaggatgaccgaagaagaattccgccgtaaggaagatgctctgcgtatggcgcaagcgggaggcggagattccatatctgtaaaaagattggatttgtccgatacctattctgtaggtataaatctgggagaggccttgaaaaatcctggttcagatgctgatatggtgcttcgcgagggagatgtattatttgttccggagtacgtaagtacagtgaaaatcaacggtgctgtaatgtatccgaatacagttttatataaaaagggtgaaagcttgaaatattacatcaaccaggctggtggttttggtaatgacgccaagaaacgcaaggcctatgtaatatacatgaatggtacagtttctcgtttaagagcaggaaacaagaaagccattgaaccaggttgtgaaataattgttccaagtaaagaacagaaaaggaagatgactaccactgaaattctgggaatgggaagtacgacagcttctattgcagcgatgattgcgactatggttaatctctttaagtaatttgaattatgagcgaagaaaaaatacaaaacataacctctccacaacctgaggaacaagaaatagatttgatagaactggcccagaaagtatgggctagtcgcaaattggtttttaaggcgtgtggtatcgctgcccttgttggactggttgttgcatttagtattcctaaggagtattctacaagtgtgacgttggctccggagagtggtggtaaatctggtggcggaagtatgggagcccttgcagccatggcgggtatcaatttgggtacttcttctggtgaagatgctttgtcacccgaactttatcctgatattgtaagttctactccttttctgattgaactgttcgatgttaaagtcaaggatcagaaagcaaaagtagacacaactctgtatgcttatttgaaagaggaacagcgttctccttggtggagtgcaattttctccgctccttttaaggtgttaggatggacattgtctttgtttaaggatgaaccggaagagggggatgcaaagctggatccttttcgtcttactagagatgagtctgccattgcagatgctttaagtaaacgtatctctgtttccgtagacaaaaagacaggtgtgacaaccttgtctgttactatgcaggatcctttgatatctgcttcgctgacggataccgtgatgcattgcctgcagaactacatcacagattatcggactaataaggctcgtcatgatttggcatttaccgaaaaactttatggagaagcaaaggccagttatgagtctgcccagaagaaatacgcaaattttgtagatgcaaaccagaatataatattgctgagttatcgcgcagagcaagagcgtttacagaatgaaatgaatttagcctatcaagtatatacacaagtgtctcaacaattgcagatggcaagagctaaggtgcaggagattacaccggtatatacggttgtccagccggctacggtacctttgaagcctgcaaagcccaataaattgatgattttgatcggcttcatgttcttggcaggtgtcggcagtgtgggatggatattatttgtaaaagatttattaaagggatggaaaaagcaaacaatatga

SEQ ID NO: 615 - DNA, 17809 bp, unidentified
  source 1..17809: mol_type = unassigned DNA
accctaagggagctctattaaagttacccttttttaccaccgatatgaaaaagaatttttttgctaatttatggttgacttttcatagctggtctccgttacttatatcactatattcgcaagctatcacgcaatccaaaacatcatctccttttcaacgctccaaccagcatttgtctgtgtttataaaaccaaattaaaatcagaattatcaacatatatcgtaatataaaattaaataccataaacccatccgtcagaagaaccacaaatcccaaaataagtacaagtgcagtgcgatttaataaaaacttgaaactgtacagctcgcttaccccgtatttgtttgcaataaaccaatggaataggaataacatcccataagaaaggaatgttgtgtatgctgcgacctgatatccaaacaggataattccaaaatagttaagcacagcatttaagccagcagcaagtatcgtgccaagtgaaataaaccctgttttcttatggtaatactctatatttacgggcaagccatacataaaaacgaaaaagttaccaaaggtcaacgggataatcaaacttatgccgccccaataattacttcccgccattatctttgtcacttctggcatcacacaaaagaagccgatcgttaacaatgcaaacaccataacataatcttttccagctcgttcaatacgctttttatctccgctatctaatgtgtaaaatacccatggtgaccatgcgttctccatagaatttcctacgatatatagaattgtacaaattgtgtaaatatagctatatattcccgcttccgagctgcccaccatatcttttatcataattcggtcgacttgcgaaagtaacgactgcgagataacgtgcggaagaagaggaagtcctatcgccagtccatatttccaatatgctttattgtaaagtgttcttccgtttctccatattaagaagcacaatgctactccgatgccaatgagtggaatcgccgagccaagtattcttccaagatatctttcattcgggaaaacgaacaaaataagaattattgataaaactgtgttgccgaggacgttgatgctcgacatgatcaaaaatgatcggtaacgaaattcagcattaagtttaacgccatatagataaagcatatacgcgccaaaactctgaaacagcaagcagtttgtcacaaaccgtgaaaaatcaagttcattacaatatattggatatgcaacattagcagcagcagtaatgaaaatgaaaatcaaaacactcaggaatacaatagaggatagatattttttaaagttctccttaaaatccaattttgcgttttttattgttccgtaaaaccccactcctaagattgcagtaaaaatctgctcgtacgcaatgtaggcattatatacaccaaaatcacttgtagataaaagccgcgtaaaaaccggaagtgtcagaaacgcgcatccctttaaagctatatttcctatcgtgtaccaaagcccagccttaacagcggactttcccatttcctctttcttaatactgtccatctgccagtctccttctattaaaacttttcgtgcttctatacggaagcattatcaagcatttatacactattgtatataacagcactgtcacactgacgttagctatacctccggaaacacaatgtgcaaactgccagacataaaaaacagcaagaaaactctccttatgtctcttgaagtacctattcagataaacgctaaacacacctaaaatgaacaatccaataaatataaatgcctcaccaaaattgatataaaactcaccaataatagttggtgtcaagccacccccggaaaaagtaatccccacctgttctttaagccataaagtaaaatccaaatccggcccaggcaacaacatcagaaagtttataaggtaggtatatccatattgaaaatccacttttccgggaaatgtattatacatataatttatgttaatattccccacatagagcgaagtaaaaaaggatgtcaatgtgctactaacacctccagacatcgttgtgcgaattgccccaagtaccgatacacctataatgcacaacagtccataaaagacgattctacccataggcattttcttttttccagcatacatcacaatcatacaaatgaatagtgtgccaacaggtgcacgaaagccagacacaatcaaagtggcagaagatactacagtcacaaaaatcatagtaaatttgcttattagtggccgtagatcttttcttgtttctatgtatatgtcaaaaagcatacagaccagtaaaattgatacctgagccgtgtatagtaaagcgccgctacccgatatggctgccactcttccattttctacatcgccaagcaaatacgatctgttttttataaaataatatagcgctgcagaccatgaaacagccaaaaggaaataaagtgttttaattctcgaaaacgaaaatcgaattttaggtttatcctccttttcatgaactggtctttttttcgcgattaaacaaatgccatttccaatcgcaaacgccagcaaaccgcccaaaattatttttgtatacccatagctatagaatcttcccatattcatcaacccaattggtcctaaggctatggagtaaagaaaatatgctgtaaaaagcactgctggagaaatcaactcaaaatcattgttcaatagcaaggcaaaagttaaacacgcaagtaacagtgtgtattcaaatatactgtcttgccctgaagctaatgcaaaaacatacacaatggcactcacggaaagaagtaataaccctatcatttttcgtctatttattcgtagcattataagtttactctcctctatctataataagatttcttgattctatagctttcgactccatcttgcttttaatactttacctggtacaatacaaacaaaagtcaacaatttatttttgctgtttctaagaagttccgtaattgtataatcagcgcacaagccatatataatgtattgaagtccgcctttgatcctatatttagggtttatatctttcttcataaattcttccgctctgtgcatacagccaacaggagattttatgttatttgctcttctatttttcgtaagtccgtctgactgataatcgccgacatatatcgcctcgttaatgtgaatcatattgtacttacgtgccattcgaatccaaacaatgtcctcaccaaggaatttttcacctgaatactcaggaaacggaaattcctttaggcaatgggtgtaaaatacctcggctttatcagccatcgtgtcatccgaattaattcttgcttctatgtacgaagcaacccattcattaggttcaaactctttaccgttgatctttccatctggaaatactctgagaaatgagtatccacacaatccgtttctatcccaaaactttccataatatcgcagcacagtttcaatcgcatttggctttaaccagtcgtccgaatcaacaataaaagtcaagtctgactctatattttttatgccttcatttagtgccgtatgcttcccgccgttttccttatagatatagcggattctaaaatcagctgatttttgaactttccttacaacctgtgccgtatcatctaagctgccatcatctacaattagccattcaaaatcttttatggactgattatccagagaggtatataatttttgtatactccctccccgattataagtaggagttagcactgtaattctcatctgatttaccctttcatttgctgagcaatatccgcatccacaatttcctcaccggtcttatgcttcagctgctctttgcttgcttcactcagaccattgttgatcacacagttcatatcgcaggtgctgcacttatccagatcctctttggtgactttcccatcacggtagtcacggcaaatcttcagctcatacatactgtacggatgtttggtgaacagagccttaaatttgtgaaccagaacccaagtcgcaggcttccagatgtacttgtgcatagcaggacttacactgccaatcatccagcagtcacggtcgcagcaacgaacctttgcacgaaccttctctgccttcgggctgttccacagttcatcccaagtctgattgttcaggttgcccataacttccttgtccttggttccattgcaaggcataacatcgccatacggatcgatgaagaaagtgtcaaaactcatatcgcaaggcagcagacgcttctggccgtagatgtagttgatcagaccatgattaaagtatgcacgaaaccacttcttcgggctgttgctgcggagcagttcattgaccagattctcgaagttcttagcaaccatcggacgatcatggatgatgttcttagcctcaacgaagtagaagctgttgtgcaaagaggcagttgcgaactccatgcccatctcatcggagatcttgtagagcggaaccaggtcaggagcgtttttgtcctgaacggtcatgccgaagccaacgtccttcatgcccatttcacgaagaatctttagtgtgccatacccctttgcatatccgtcttgaagaccacgaatctcattattggtctgctccaggccctcgatagaaatacggataccgatctgcgggaactctttacacaggtcaacgatacgatctgtgaagaaaccgttggtggaaataacgatacgatcagacttcttatacagttcacgcacgatatccttcaggtcagtacggataaacggttctccgccggtgatgttcgtgaagtacatcttcggcagttttttgatagtttcaatactaatttcttcttccggtttggaaggtgctttataacggttgcacatggagcaacgagcgttgcaacggtaagtgacgataaccgtaccattcaatttcttttcttcagacatgattaactcctattaacaatcaaagtttcaattttatttaagaaccacttggcacataccgagaacacaaccgcgccgcaaataactgcgaccgctgtgaagatatatgcaagtaagccattaccaaacagatggacaaggtgaaatttttcaagcacacgataaattaccatgtggcacaggtaaatctcgaagcagattccaccgaggaatttggcgactggattgaccagccccccctcccgattacacccgagggtatagaccaaagccgctacacagaagaacaacattgtaagcgtattgccacctactgcaaaataagcaactgtggcaatcagcagaattgctccagcgataactttggattttactgcaaattcagcaagctctttccggtaaaggaagattagacctcctgcaataaaataaattgcatcataaacgatattggttctaccggcattgaagtaacttccacacaggtagttgaacactaatgccgcggctgccactccccatgccctcttcttatttccaatcaggaagcagaaaaacggaaacagcatataaaacacaaaaatgacagccagcgtccagctcacaccgataaccgaaatattggcatttggcaacaatccttggcataaggtcaagtttgcaaaaacttcatacagcgaattcttgctcggcgaaatcacaaaatccagcgcgcagagcaatgcgaagtacgaccaaatcttgatgtatcttttgctgtaaaactcctccacgctgatcttacggtctatgattttctggtagtagccacagcacataccaaaaccgctgaccatcatgaaaagaaaaacgaggtttgtgaaattggggataagtttctcaaatacaaatcctcccaattcatattttccgtttgaaaggacgtgcatcagagcaatgccgataatggcatacgcttttaacccattgattccctcatatctatccgcttttgtactcacacccatcctccaaattactgataaactctcataattttctcgtaatactcatcaatggtatcaaagctgatgcccttgcagttttctttatactcatcgcacagttccttatcatcccagagcttccggatcttgctcttcaactcgttgccatctccgctcttaaatagctcaccagtcttaccgacctgaatcaattccgggatgccaccgatatcagcacccagcaccggtgtgccgtacatctgggattccatcacagagaacgggcagttctcataccactcagacggatagatggagaaccttgcttcccggatcagcttttccagtgcctcacctttctggaagccaacattcttgatgttgcttacacccttgatactctcttccagcggcccagtgccagcgaagataaactgcacatccggcagctccttacagaccttgatgagtgtgtcgatgcccttctcctcagagaagcggccgaagtagaggacgtaatccttcttttctgtctctttccactccaccttatcgatgaaattatgcattgccacggtcttcgtcgcaaacagcggattgctgtccatcttgctcttcatgaactcagagcagcagatcatggtatcaatgtacttgtaagtccctttccacttccagaactcggcctccatcatgccgatggcagacttcgccgtggagccgtggatgcacttgcctttcatgcagttcacgaaatggccgccgaggcacttctcacagttttggtggatgttcggattgttcagcatgtggttaggacaaaccagctggtagtcatgtgcagtgaaaacgatcttacaatcccttacagtctccttacgccacttgacgatttccaaaatgatggaaggtgtcagctggtagttaaagttgttcaggtgacatacatcgggcttgaagtcgtccagaacttttctcagctgtactcttgcttccttgctgtaaatcgtcttgattgggtaggtcagcttcgacagcttgctcccaccgtgaaaatccatatcggacgtataagcattgatccggttgccaacacagcggccttcgtgctccattccgaagtactgaacttcatgtccatgctgctccagcgcctcgcccaatttaaatatataagtttctgaaccaccattaggatatagaaatttatttatcattaaaattctcatttatttctttctcctatataatttcaatgttgcttgcacaatctcatcccaattatatttactacaaataaaatcagccgcctgctttttgtgtgcatccaccttttcagaatggtcacaggcgtcctgcaacttcgattgtagatcctttacatcagcctttttgaaaatcagagctttatcttccacaacctctgcacactccggaatatcagaaaccagacagcagttgccgtagctcattgcttctaacaggcttaacggcattccctctaagtcagatgggagtgcatacacatatgcattgctatacaactcctctaattcttgcccttgaacaaatcctgtaaatataattcgtttatcttctttagcaagttctttcatttcattttcaaattcacttgtatccgaactgccaccggcaataaccaattttttttctgtatcaacctgtttaaatgcttctattaaatatttgattcctttttccggaactaatcgtccaaggaacaaaatatattcatctttatctaatccaaatttatttttaataatctgtggttttctttctatatgattacttacgccatttggaataaacacagtttttctgccatatattttttcaaaataatcctgaacacctttactaagtacaataatttcatcagcatactttacggcattcttttcgcctttatgtatgaattttgagccgaagccagatttccatttttcgcgttgccagtcgatgccgtgaactgtgactatcacacgcttgtgaaagagctttggtaaccaacagaaaaatgcaggtccctcagcatgaatatgtaccacatcatatttgccaaaagcacagcataatgctgcaaaaaatgaagatgaaacagccgcaagacctttcttttctattgttggaactgtcttaagctttattcctttatattctttaagtcgttttgaatcatactccgaaccactcacatgatgaccacctctgttgtagcaggtcacattatgcccttgggcaaccatccttgtgcaaagttcctcaacaactatctcaactccaccttctcttgaaggaatccttttttgtccaaacattgcaatactaagcttttccttacattgctccatcatttcttaatactcccacagcagtctgccaaataattttaatatcccccttaacactccactccccaatatactgagtatccagcttcaccacttcctcaaagtccgtgatattactccttccactcacctgccacagtccggtcagtcccggcctgaatgacattcttgctctgtggtgtggctcatacttctcccactcatcaagtgtcggtggtcttgtccccaccaggctcatgtctccttttagtatattgaaaaattgtgggaattcatccaggcttgttttcctgatgaactgtccaattccggttttcttctttccgtttggcaacaccttattgcctatgattctcgggtcgaagtccatcttaaacatcattccgtcgcccactttattctgtgccgcaagctctttctttcgctcctcggcatccatatacatgctgcggaatttatacatcttgaactttctgccgttcctgccgactctctcctgcgagaagaatatcggtcccggcgatgctatgtatattgccggtcccacaaatatcattatgataagtgtgaacaggcagcccaccaatcctccgactatatccatccccctctttaccaaaagcgcactagtatttgcatagttcacgctggatgtaactactgtgtagtcgcctatcttttctatctgcttgtagccaccctgagctgtaccgttttttgctattcctgtatgcaccgctattcccatctccaggaatatatctgccatcttctcaggatattcatcctcgctgcacggtgggatgagcacctcatccacccactcgtcacacgcatagtccactatgccatcgtgatttgcaactatcggtatgttgcatatagtcttgcccttttggtctgagtccaatgatgctgctactacctttgtatagcctatacagcttttctccaccgtacgcagtgtatcacgaagcatagcatcaggtgctatgacaaacagtgattttcttgatgctccaaagccctttttcttaagaatgctcttgagcgccagtcttgctacatatgttattgtcacatagatcggaaacatgatataaaatgataatcgcgagtatatatcagccatctgcgtggtgaacagaaatagtgctgtcaccagaaaaacaagcattgcatgcttacaggtcgatataaattcatccagatatccgcgttttaggacgttcttgaatgaatctgccattatctccacaaagaaatctatcagaagaaatgctacccccagtatacggtagtccttgtccacatatgggttattaaagccgaagcgtatcacatatgaaataaaaaacgcaataacaatgcatgcgatgtctataagcataaaatctatatgctttgtccatcctctgcctttctttctgtacattctttccaaattctccttgtggtatcttttattttcctttatacctgttctaggggaggtacctttgtacccccccccgaatatttttagcctgttttgttttttgtatgttttattcggttatttgtatctttttctgtatctaatcagggtttttcaataatatattttcaccttttttttattctttgtcaatgaatattaggttttctttacaattttcgacacattcgctaatcgctatggtattgtagcgcgcattattatacattattatatgccatactgcttatttttcctcaaacagcctctgcttcctctctatcatctcatcaatccttgcgatatactgccctacatccttgacattctcgcatctgtcaatgcggtgtgtgccatccggatttggtataggccagacgcgcttggtgcttgctccggctccgcacgccacgatggtctgcttttcctccataatcagtatgttgtatacgccggccttgccctttgccgcatagcccacgttttccatgttgcctgccatgcccttctgcctgtagaggtagtatggctcaagccccatctgcttgcagtaggttgcgcagaggtccatatgctcctgagtgttgaccatctgcatatcctgatagcggtccttgaagattgtaagccttgcagcgcgctttactgcgagcgagtggatggtgacattgtcaggcgccagctcctttacgagctccatcgtgtgccttacatcatcaagtgtttcctcgggaagtcccataatgaggtccatatttatgttgtcaaatcccagctcacgcgcaagcttgaagctctgtatcgtatcgtctaccgtatggtgtcttcctattatatcgagtgtctgctgcttcatggtctgtggattgacagatatacggctgatgccgtttttctttagtgccataagcttttctctcgtgatggagtccggtctgcctgcctccacggtaaattccaggcagtcctttaaatcaaagctgcatttaatttttctgataagcctgtcaagctgcgcagggcttagtgtggtcggtgtgccacctcctatgtagatggagtttagcttcttgtgatagaatttctgcgccgtgtagtctatctccttctcgagtgcgtcaaggtaatcgtccacgcgatttttccacacaccaagcgggtatgacgtaaacgagcagtacgcacaggtgctcgggcagaaaggtatgcctatgtacaggctgtagccgttgtcataatccaccctatcgagcagtgccttctcgcgctttgctatgcctattgagaggtcgattttctcatcgcttgcgaggtaggtttccttcagatagtcgtaggtttccttatcgctcatgccgtcctctatgcacttcatggctatcttggtcggtctgatacctgagagtgtgccccacggaaggctctttcctgtgcccttttctatcatggaatacagggcgagcttaaggcggtttttggtttccttgcgtcctgtgccggtcacggatatttttgtgctgatactttcgctaaccttatttgccgtccactccaccacaatctcatcacccacatagtctatcttaaatacctgtgaggcatccgcaaattcttttatgccatcgtctgtcatctcgtggtgtgtgcaggccaggttttttccctccacctcatcaggtgagcagctatagtacatctgcacatcctcctgtgggaagaactccttgagcagtgagtgtacatcatattcaaaatccggtttattaaatactactactatcataagtaagggttatacatcctctcgttttctatggttgttgtgtcgttgtggcccgggtacacctctgtatgctcaggcagtgtcatgattttttccttcactgtgcgcacgaggtctgacatgctgccgcccttgaaatccgtacgtccgattgagccgcaaaacagtgaatcgcctgtaaagatcacgtcctcatacgggaaataatagcagcaaccgcccggtgtatgccccggtgtgtgaagcactactatgtgaaagcccgcaatatcaatttcctgcttatccttcaaaaatacatctgcataaaaggtctttgactggcccatcatgtagctgacattgagctgcgggtcatcgagtgtggctttgtctgcctcatggatatatatcttaatgccgtagcggtctgcgagcggctttgcatcagtggcatggtcaaagtgtccgtgtgtgagtagtattgctactggctttgcgcctgattcgtccacttttttggcgagttgtttagcacacgcgcccgggtctattattatcatttcctttgtctttatattggtgacaaaatagcagttggtctgcaccggtcccactacgaagtggtctatcttcatatttaccatatgagtgtactccttgtctgttatatgttatgcttcacgcaagaaccaccgggatttagccggtggtcctctctacgtctattacactttctatctgtctgagcttctccacgagaacctttatctggtccctgcctctgatattgaaaaatacctcgattgtagcgatgccctgcttactggtcttggactggataccactgatattgatttccttctcggtaaatatctttgtgatatctacgagcagtcccggcctgtcatgacagaatatctttaggtctgcctgatactcggcaccgttgtccatgagggctgtatcctgccactctgcttctatgagcctgtccttttctatctttgacagattgatgatattcacgcagtctgtcctgtggatggagatgcctcggcctcttgtaacaaagcccacgatttcatctcccggaacaggattgcagcacttcgagaagtgcacagccacgtcatagagtccgtgtaccacaatgccgctctttgacttgtgctccggctgtgtgcctgctgccgcctgctgcttttctgcgatgctgccaagcacatctgcatctgtcaccggcaccacatgatccttcttgtactcgtcgtacattctgttgactatctggctctccttgagtccgccgtggccgacagttgcaaggcatgagttccagtcgtggaagccgtatttgcgacgtattttttcctgatactcaggcttgtttatctcagcaaagttgataccctttgccttggcataggctgctatcaaatccttgccgtgctgtatattctcctccttgagctcacttctgaaccactggttgatcttgttcttggcctgtgtgctctttacgaccttgagccagtcacggcttggtcccttggagttctgtgaggtgattatctctatctggtcaccgtttttgatgacatagtctatcggcaccagcttaccatttaccttggcaccgaccatcttgttgccgaccgcagagtgtatgctgtaggcaaagtctataggtgtggagccctttggcaggttctttacatcgccggacggtgtgaatgcaaatacattgtcggagaataaatttaaatcactctttaataaagtcataaactccttattatccgacatatcctgctgccactcgagtatctggcgcagccagctgagcttctcctcctctgtgacagtggtggtagtggcattaccgttgtttgcttccttatacttccagtgcgctgcgataccgtactcagctgtacgatgcatctcataggtacgtatctgtatctcaaacggctgtccgctcggacctatgagtgtcgtgtgaagcgactggtacatgttctgcttcggcatggcgatatagtccttgaaacggcccggtataggcttatacttctcatgtatgataccaagcactgcgtagcagtccggtatagtatccaccagaattctgatggcaaagaggtcatatatctggtctatcgtcttgtcctgattgaccatcttcttatatatactgaagaaatgctttgccctgccgtatatctcagccttgatgccggcatctgtaacatacttcttgacatcgtttaccaggccctggatgtaagtgtcgcgctctgcctttctgagggctaccttctctaccagatcgtagtaggcatccggatagaggtacttcatacaaaggtcctcgagctctatctttatcttgctgataccaagtcgctgcgcgataggacagtagatatcctgtgtctctctggcgatacgctgctgtgcctcctttgactggtacttgagtgtacgcatattgtgcagtctgtctgccagctttatgaggatgaccctgatatcctttgccatggcgagaaacatcttgcgcagattctcagcctgcatctcaagcctgtccgcattcttgtccttcggatccttggtgctgtctgtcaggtgcaggtgctttaacttcgtgacaccatccaccagatgtgcgacatcgtctccaaactctgcacgcatctcatccatggtcatgatggtgtcttccagcacatcatggagcagtcctgctgcaatggtttccttatccagctcgagctcggcgagtattatggcaacacaaagcggatgtatgatataaggctctcctgacttacgcgcctgacccttatgagcatcataagctaccctgtaggctttgtccacaaggctcgtgtcatccgacggatgatactttttgatttcctttttaagctcatcgtaaagctcctctgggctcgtaaaatcctttgttccccttataccgctggtatctgagcgaaatttgtccgctattttttctaattcttctgttgagtaatctgccaatagtctcacctcgattgtagtgtatctttagtagccattatattttatttctttaaaaattgcaatcttatgttgttagccgataaccatctttactccgccatacatgccggctgagttgccgagtgtggcaagctttatctctgtctcacggcttgcatggaaagcatactctttatagtactttgctgctgtatcgatgatgatgctgcctgcctttgaaaggcctccgcctacaacaaatacctcagggtccataacgcatgctactgctgccattgccttgccgagaagcttcatagactgctctactgccgcaatgcccgctgcatctcctgcctttgccgcatcgcatacatccttggctgtgaagcctgcatttaaatcaagctttgttgccacatccctgtgtgctgcaatgtatctctctgccactcttacgagaccgtttgctgatgcatactgctctaagcagcccttcttgccgcagccacagcactctgactcatcatctaccataggcatatgtcctatctctccgcctgctccgtttactccggctacgattctgccctcgcggatgattcctccgcctacgcctgtgccgagtgtgatcatgactacatcctgatgaccctttccgccaccctgccacatctcaccgagtgcagctacgttggcatcgtttccggcctttaccttgatgccgccgcacagcactgagagtgactgtgccacgttgaacacgccccagccgaggttgacacacttcaatactgttccgtcatcctttataggtcccggcactcccatgcctacgccctcgatgtcacccatctcgatgccgtgcttctcgttattttccttgatggatgctgcgatatcaggcaggatgagctcgcctgaattctctgtgcgtgtaggaatctcccatgtatcgacaagctttcctgtggtctcaaaaaagcctatctttacagttgttccacctatatctactccatatgcgtattgtttcattttttcgtcctccaaatcgttaaactatgtttatattttattgcctaattgcatatttttcaatgtttttcattgttttttatgttttttatattttttctatatatagaggcatgtatatcatcatccatatgcccgctatttgtaaatccaagctttttggcaaggcgaaccgatgcttcatttctctcatctatccggcagtaaagctcttcaaagtctgtgttttcgcgcgcgtagtctattatgaagcggcacacctccgtggcatagccttggttctgaaattccggtgctatcatataacccatttcatcgtgctcaagccctgcccgtcctatcagcttacctgtttccctggaaaatacaagccacatgccatactcgtaaaagccatacatgttctctatgtatgctttctggtattcaagctctgtctcgtagtcgtaaagcggttccacaaagtctgtcataccgggcttgtcatagagctcatagagcgcaggaaggtctgacagggacagctcacgtatcagacacctgtctgtctcgccgatgtcccacgggatgtgattataccgcctgcgcactcgctccagatactcaatatcaagctctgcaaggctctcgactgcatagcgcgtgccgcactgcggttctcctactgatgctatgccgagtgagtcagctatttgcttctgcttccggtttgagactatccagatgcagtctgcgggagctttcggtattattagatttcccgtattagctttcgcggtgttatctgcatattcttgtatcgttgtttttgtgaagtcattaattgattcagctgctaagagcgcaacatacagtttttcccgcagctcatcaggtagtttttcttgcagtttttcctgaaattcatcttgcagctcatctagcagtttcttctgcaactcatccagcaactttcccggtagtgcaccatacagtttttcttgcagctcttctgacatagatgccttgcctgccacacttctccactgcagcttgaatatctcgccatgatagtaaaaagaggcaagttttgcgcttgcctcatcgataattattatcattaaactgtctccggctccggatagtccactccgaaggtctcaactgtaactgtcttcatgacctgagcctcaagtggtttgtccatgtagtctgtgcgtacctctgcgatcttgtttaccacatccatgccctcgattaccttgccaaatgccgcatactcgccgtcgagatgtggtgcatcctgatgcatgatgaagaactggctgcctgctgaatcaggtatcatggtacgtgccattgaaagtacaccggctgtgtgctttaaatcatttttgaagccgttgtgtgtgaactcgcccttgatttcatagcccgggccgcctgtaccgtttccgtccggatctccgccctggagcatgaagcccttgattacacggtggaagcatactccgtcatagaagttgtgattgattaagctgataaagttgtttactgtgtttggtgcgatttccggataaagctccgccttgatcacatcgccgttttccattgtgattgttacgattggattctgtgccattatttttctctctttcttttataatattatgaggcttggagaatatccattcctcgcaattattaaatatcaaattaatttctacccgattgatcttacctgattttactcactcagagcctcgactaccttcggaaactccatgaagtgtgatgccttcaccagtatggtgtcgccctccttcacatatgaaagaagctcctgtgtcatagtctccctatcctcgaaatagtggatgtctacatcggatgatttctccgcggctccggctgcatattcctttgcaagctctcctgcggcaaaaagtgtatggatatgattctctccaactgcttcgcctacctcatggtgcagctttttctcatcgcttccaagctcgcccatgtctccaagcactgctattgtcctgccctttgcatgcgaaagcacctcgatagaggatttcatagatacagggtttgcattgtagcagtcatctatcactgtcatgccgtgcgttttgataaaattggtacggcctgcgatt

SEQ ID NO: 616 - DNA, 7446 bp, unidentified
  source 1..7446: mol_type = unassigned DNA
atggataccaaaaaagtggacgtgatggtggctgacgcctctcacgaagtttatgtggataagattttggataccatcagagaagcggccaaagtacgtggaacgggcatcgcagaacgcacacacgaatatgtggcgacaaaaatgaaagaaggaaaagccatcatcgccttatgcggagacgtgtttgcaggcttcagctacatcgagagttggggaaacaaacaatatgttgcgacttccggtttgattgtgcatcccgactttcgcggtattggattggctaagcgtatcaaaatggcatctttccgcctggcacgcttacgatggcccaacgccaaagtattcagtctcaccagcggagccgccgtcatgaaaatgaatacggaattgggatacgttcccgtcactttcaatgaactgactgatgacgaatccttctggaaaggctgcgaaggctgcatcaaccatgatatattagtagccaagaaccgcaaattctgcatctgcacagcaatgctctacgacccggctctgcatgaagatgataaaatttaaaaaacaaaggatatggaagaaaagaaaaaagtagtagtcgcattcagcggcggtcttgatacttcatttacggtaatgtaccttgccaaggaaaaagggtatgaagtgtatgcagcttgtgcaaacaccggtggtttcagccccgaacaactgaaaacaaacgaagaaaacgcttataaactgggcgcaaaagaatatgtcactatcgacgtgacgcaggaatattacgaaaagagcttgaaatacatggtatttggcaacgtgctgcgtaatggtacctatcctatttccgtaagttccgaacgtatcttccaggcacttgccatcgcacgctatgccaacgagatcggtgcagatgctatcgctcacggttctaccggtgcaggcaacgaccagattcgttttgacatgacattccttgtattggctccgggcgtggaaatcatcacactgactcgtgatatggcattgagccgccaggaagaaatcgattatctgaacaaacatggtttctcagcagacttcaccaaactgaaatactcttacaatgtaggtttgtggggtacctctatctgcggtggtgagattctggattccgcacaaggattacccgaaagcgcttatctgaaacactgtgtaaaggaaggcagcgaacaactccgtcttactttcgaaaaaggtgagttgaaagctgtgaacgatgagaaatttgatgatcccatcaaagccattcagaaagtagaagaaatcggtgccgcttacggtattggtcgtgatatgcatgtgggtgatacaattatcggtatcaaaggccgcgtaggtttcgaagctgctgctccgatgctgattatcggtgcacataaattcctggaaaaatatacactgagtaaatggcagcaatactggaaagaccaggttgccaattggtacggtatgttcctgcacgaaagccaatatctggaaccggtgatgcgcgacatcgaagccatgctacaggaaagccagcgtaacgtaaacggtacggctattctggaacttcgtccattatctttctctacggtaggtgtagaatcagaagacgaccttgtgaaaacgaagttcggcgaatatggcgaaatgcaaaaaggctggacagcagaagatgcgaaaggtttcatcaaggttacttctactccactgagagtatattataacaatcataaagacgaagaaatctaaaaagcctatcccctaacccatctctcatagagaacggttaggggatagaacaattatacgaacagatatggataataataacaaaaaactaactcgctcacgcagcgacagaatgcttgccggcgtctgcggaggattggccgcttatttcggacttgacccttcactcgtacgtatcggctatgcgttattgacgttttttaccgtatttgccggtatccccgtgtaccttataatgtggcttattgttcccgaggaaaagaacttgtataacagataaaagaataattgtataaactaacatgattaaagtaggaatcatcggcggagccggatatacggcaggtgaattaattcgtttgctgatcaatcatccggaagcggaaatcgtattcatcaacagctcaagtaacgccggaaacaaaattaccgacgtacatgaaggattgtacggcgaaacggaccttgtcttcaccgacgagttacctttggacaaaattgacgtgttattcttctgtaccgcccatggcgacacgaagaagttcatggagagtcacaaccttcccgaggagttgaagattatcgacctttctatggactaccgcatcgcttctccggaacatgactttatttacggtttgccggaattgaaccgtcgcgctacctgcaaagcaaagcatgtggctaatccgggttgctttgccacttgtatccaattgggattgctcccccttgccaaacacctgatgctgaacaatgacatcatggtgaatgccattaccggttccaccggggctggtgtaaaaccgggatcaaccagtcacttcagttggcgcaacaacaacatgagtgtttacaaggcattcgagcaccagcatgtacccgaaatcaagcaatctctgaagcaattgcagaacagttttgatgcggatattgactttatcccttaccgcggtgatttcgcacgtggtatttttgctaccatcgtagtaaaaactaaagttgcactggatgaaatagtccgtatgtacgaagaatattacgccaaagactctttcgtgcatatcgtagaaaagaacattgacctgaaacaagtagtgaacaccaacaaatgtcttctgcatttggaaaagcacggtgataagctgcttatcatctcctgcatcgacaacctgttgaaaggtgccagtggtcaggcggtgcacaacatgaatctgatgttcaatttagaagaaaccgtcggcttgcgattgaaacccagcgccttctaagtaatttgtattttgtaatttagaattaaagaaatgaacttattcgacgtatatcccctttttgacatcaacattgtcaagggaaaaggctgccacgtgtgggacgagaacggtactgagtacctcgatctctacggtggacatgctgttatctccatcggtcatgcacatccgcattacgtggagatgatcagcaaccaggttgccacgttgggattttattccaactctgtgattaacaagctacaggaacaggttgctgaacgtctgggaaaagtttgtggttatgatgactactccttattcctgattaacagcggtgcagaagccaacgaaaatgctttgaaactcgcttcgttctacaacggacgtacacgtgtggtttccttcaacaaggcattccacggacgtacttcacttgccgtggaagtgactaataatcccaaaatcatagctcctattaatgactgcggacatgtcacttaccttccgctgaacgatattgaagctatgaaaaacgaactggcaaaaggtgatgtttgcgcagtgattatcgaaggtattcaaggtgtgggtggtattcaattgccgacagatgaattcatgcaggctttacgtgaagcttgtacagctcataatacgatattggttctggacgaaattcaaagcggttatggccgtagcggtaagttcttcgctcatcaatataatggtatcaaagcagatattatcacggtagccaaaggcatcggtaacggtttcccaatggccggtgtacttatcagtccgatgttcactccggtttacggacagttgggcactactttcggcggtaatcacctggcatgcagcgcagcgcttgctgtcttggacgtaataggtcaggagaatctggttgaaaatgcagccaaggtaggtgagtatctgatgacggagttaaaaaagttcccgcagatcaaagaagttcgcggacgtggtctgatgatcggtcttgaatttgaagaaccgataaaggaacttcgtctgaaactgttgaaagaacaacatgtatttaccggtgtcagcggtacaaatgtactccgcctgcttccacccctctgcctcagcatggaagaagccaatctcttcctcgaacgtttcagaaaagtactttaaagtatatttgataacataatcagcaataaacaggcagccttcaagcgtttcagcgtttcttaaggctgcctgttgttttaaatacacaagcactttttttacatcaattaggttagaaaggtagaaaaaatatctacctttgcccatcgacaacccttttaataacagaatgatatgagaacagcaattatcggagcaggaaacatgggcggctctatagcccgtggattggcaaagggaagtattatccccgcctcggatatcatagtttctaatccctcacaaggaaagttggatgaactacaagcagagtttcctgctttacaaatcacccatgacaatcaggaagccatcatcggcgccgaattcatcatactcgctgtgaaaccgtggcttatcaaaggtgtgctgcgcgaactgaaactgaagagtaaacaaattatcatttctgttgctgcaggcatcaactttgaagagctggctcactacgtacccgaaccggaaatgaccatgttccgcattattcctaacaccgccatcagcgagatggaaagtatgacactgattgccagtcgtaatgcgaccaaagaacaagaacaactgatgctggatattttcaatcagatgggacttgccatgctcatccccgaagaaaaattcgcagcctgcacttccatggcttcctgcggaatcgcttatgtgttgaaatacatccaggctgccatgcaagccggtatagaaatggggatttatcccaaagatgctatgagaatggtggctcaatcggtaaagggagcagccgaactgatactgaataatgatacgcatcccagcgtagaaatcgataaagtatgtacccccggcggtattaccatcaaaggtatcaatgaactggaacatgacggttatacatccgccatcatcaatgctatcaaagcaagtaagcaataagactaacaattaattcattaaataaacaaccacatggacgaacaaattaagcaaatagcagaacgccttcgcgggcttcgtgatgtactggagctgaccgctgaagacattgcccgtgaatgtgacatctctccttacgactaccgtcttgccgaaacgggagattttgatatctccgtaagtatgttgcaaaagattgcacgcagatacggagtttcattggacgcactgatgtttggtgaagaacctaaaatgagcagctacttcctgactcgtgccggaaaaggtgtcagcatcgaacgtaccaaggcctacaaatatcaagccctcgcttctggtttcatgaaccgtagcgtagacccgttcattgtaaccgttgaacctaaaccggacgatgaaccgatacattacaacagccacgccggacaagaattcagtcttgtgctcgaagggcgcatgatggtcaacatcgatggcaaagagcttatactaaacgaaggagacagcctgtacttcaattcaaaattgccgcatggcatgaaagcactggatggaaaaacggtacgattcctggcaattatcatgtaacaactaaatggagaatgaagggaatctctcattcttaattcctataattatggtagaaagatttttatcacaaacctctttcactacacaagaggactttatcaaaaactttaaaataaacgtaccggaaaacttcaacttcggatacgatgtagtagacgcctgggctgccgaacaacctgacaaacctgcattgttatggactaatgataagggtgaacaccggcaatttacgtttgccgacatgaaacgttatacggatatgaccgcctcgtatttccaaagcctcggcatcggccatggtgacatggtaatgttgatattgaaacgccgctttgaattctggtacagcaccatagctttacataaactcggtgccgtcgtcattcccgccactcacttgctgacaaagaaagatatcgtgtaccgctgtaatgctgcggatatcaagatgattgtttgtgcaggagaatcggttatcacggatcatattgtagctgccatgccggattcccccagcgtgaagaaactcgtcagtgtaggtccccaagtagccgaaggattcgatgatttccacaaagggatcgaaaatgccgcacctttcgtgaagccggagcatccgaatacgaacgaagatatctcactgatgtacttcaccagcggaaccaccggtgaaccgaaaatggtcgcccatgactttacatatccgttggggcatatcgttaccggtagtttctggcataacctgacggaaaacagcctgcatctcaccatcgccgataccggttgggggaaagctgtatggggcaaactttatggacaatggattgccggagcaaatatatttgtgtatgaccacgagaaatttacccctgccgccatcctggagaagatacaggattatcacgtaacttctctctgtgcacctcccaccatcttccgtttcctcattcacgaagatctgacaaagtacgatctctcatcactgcaatattgtaccatcgccggcgaagctctgaacccagccgtatttgagaccttcaagaaactgacaggcatcaaactgatggaaggattcggacagacagaaaccacgctgaccattgctaccatgccttggatggaaccgaaaccgggaagtatgggattgcctaatccacaatacgatgtagacctgatagacaatgacggccgttccgtagaagccggtgaacagggacaaatcgtaatccgtacagacaagggtaagccactgggattgttcaaagagtattaccgcgatccggaacgtacacacgaagcctggaacaataatatctactatacaggagacgttgcctggaaagatgaggacggctatctctggtttgtaggccgtgccgacgatgtgatcaagagttccggttaccgtatcggccccttcgaagtggaaagtgctctgatgacacacccagctgtaatagaatgtgccatcacaggcgtacctgatgaaatccgcggtcaggtagtgaaagctaccatcgtactggctaaagaatataaagggaaagagggagaaacacttatcaaggaattgcaaaatcatgtaaagaaagtgacagccccttacaaatatcctcgtgtgattgaatttgtagacgaactgccgaaaaccatcagtggaaagatccgtcgtgtggaaatccggaagaacgatacgaaataa

SEQ ID NO: 617 - DNA, 19002 bp, unidentified
  source 1..19002: mol_type = unassigned DNA
ttgggaaatcatgaaaagaaaaaaattttgtatccattatacgcactcattccagcactgatcgtatatactgttttttcggttattcctattttgatcagctttgttttttcttttacagattggaatatagagcgtttgtatgaacctacatttactggactaaaaaactatatagaattgttgaaagatccggtttttatacgttctattgccaatacttttatttttgtagcactgactacaatattaaaaacctctttgggattccttcttgcgcttgctcttgtgaaaaaggtatttgcacgtggttttcttcgaactgtatattatgctccttgcgtacttagtattacggttattggtgtattgtttaaatctattcttgcaaatcgaggactgctcaataatgctctggaacttgtcggtctgggacaggttgccacagattggcttggaagatacgggacagcacttggaagtgtaatacttgttgaaacatggatgtgggcaggatttaatatgtttatctttatatcaggtcttcaggcaattcctgcagattattatgaaagcgcaacactagatggtgcatcggcatttgaaaaatttaaacatatcacattgcctttgattgttccgtcacttactgtcgttgtcacacttagtatagccggaggattgaaagtatttgatatcatctatgttattacgaatggaggtccgggattcgatacgcaggtactctctacatatacttagcagtcgtttagtcttggattcctgagagaatcaacagcaggatctatgattcttgctgtaatcgtatcatttactatgaacagatattttacaaagaaggaggttgaaatgtaatgaaaaaatggaccaaaggtgaaattatattgtccgatttattaattgcacttgctttcgtatatattgttccgtttcttatgatgattttaggttcgtttaaagctcagtcacaagcggcaatgtttaatctggaacttcctaaacagtggctcatttcgaactatgcacatgtactggaatcaggaaaaattcttcgcggatatttgaatagtgcaattatcacaattcctgtaacagtgttatcagtactttttggtgcagttgcaggtgtcgtgatatctagaagaaatgacagagtaacaagaggattgtattattattttatttttggacttacactcacccttcagattgcttctatatttttcttacttaaagtattaaatatatatggtacgtttttctctgtaatatgtatttttatttctctcagaattccgtttacagtaatgacattctacagttttgtaaaaggagtcccaagagatattgatgaagcagctattattgacggatgtaatttctggcagatgatgtttcacgtgctccttccagtacttaaacctattgtggttaccaatattgttattacagctattgatgtgtggaacaattttatgatatcattattttatctgggatcttcagaaaaagccaccgtggcaatggcaatctatagtttttttggaaggtacaacagagactggcagtatgtgtttggggcactgacactggctgttcttcctatgttgattctgtttatcattcttcaaaaacaaatagtggcaggaatgacatcaggagcagtgaaaggttaagctttagataggataggctctcggaatcatgagccttccgactaagattcattggtcggatgaaccttgaaaagtaaatattatccggaacggacatgaaaagtaataaatgatgaaaagtggcgcacttttatagaccttgcgtcaaacatggcttacaatggtattgcttatgaaattaagcggtttgctcaaagaaattttttagttgggaagtctttggcaaagtccatgcatcaagatgctgacacatcatgatggcgaacaggcggcagtacaacatcatagatgaacggtatctgccgtcttctaatttatagtctatcttttctcgtttgttacaacgttctgcagatgttcttgcgttgtattccagcttccattcctcgctgccacgaggcggagtattgaagagtcttgggttatcctttaatacaaggtgaacatttcttccatactttgcatcagaacagagttcatcgcaagtgcaatgaggtgtaccgcctttgtaagaaatcttaggacaacgatatttgatgcgtccttttcttggctcagcggcggcttgcttcataggaaagcccttaggacataaaggaatcccagccgatatcacagtcaggcggatttttttcaaactgccggaatagatcatcaacggtaagtttttcgacagaaggagctttttcttcttttcctttcggtttctgaggcttttccttaggtggatgaactgcgttagtcaggttcttgtcagaagataaccagagccgcctatgaaagtcataaaaggcaccaatgccaggagtatcatcaacataaaagccggaaataatggcatgaaggtgattctctttcaaatcagaagctaactttgtgtaggaagttattttaaatgcaacagaaacaaggatagagcgaagcatgtcagaaggaagtcttggttcagaaccaaagacagaataccggtcttgcataagtacatcaacttgtgacagatcaagattccaaaacttatcaaggatctgccaggtagaaaaagacagggaagttgcagcattcggataatatttacgaagttgagtcaggacacgatcctgataggcggaatgaccgccgatgttaataggtttcaatgaaacacacctccaaatcaaaaagtctgttccagctgagccggaacgatatgccttattgatcaagaggcgcgaagcgccgcatttttaggggcaaatgtcaagaactttttgaaaaaaaaggtggagaaaaaatgaaaatggaatctcagaagccgcagaaatacaggcttagagattccgagagactattaggttataagggagaaagaaaagatgaaaacaagatttattataataggttttggatggagagcagattttttttatcgcatagcaaaaatgatgcctgagcggttcgagataagtgcaggtgtattaagaacaaaacagcgtgcagaagaagtagcagagaaagaaggtgtgtatgctaccgaaaatttggatgaagctttgaaaacaaatccagattttgcagtattatgtgtaccgcgcacaatcgtaaaggaatatcttgtcaggctgatggaagcggggcttccaattttatgcgaaacacctccggcacaaaatgtaaaagaactttgtgaattatgggaggaaaccaaaagactaaaaggaagagttcagatcattgaacaatattttctgcagccgtattatgcagcaagcctggagattatccggaaaggatttcttggtgaaacgactggagttatgctgtcagcccttcatgggtatcatgctgtcagcatgtttcggaaatatcttgggattgggtttgaaaactgcagaatccgtggtcagaaatttatatctgatattacggcaaccaatggaagggaaggatttgatcaaagcgggaaaaaagtccagtttgaaagagattgggcttctattgcatttgacaacggaaaaacagcttttctggattttgccggcgaacaatatttctccatgattcgtgcaagacgctggaatattcagggtgtaaagggcgaaatcaatgatatgacagtcagatatttaacggaagagaaccttcctgttgtgcaggaaatatcaagatttgacgttggagtaaataataacagcgaatgggcacatcgtggcattatgtttttggatcagtatctttacacgaatcctttttatccagcgagaatgaatgatgatgaaattgctgtcgcatcctgtcttgaaaagatgaaagtatatgtagaaacgggcaaggacttttactctcttaaagaggctgcacaggatacttatttatcatttatgattgaaaaagcgattgggtcgggagaagaaatcgttacggaaaaacagccatgggcttataatagttaaaagaaaggaaaaggattgcagaaatataagtttcaaagacagatcatattaaattttgaccattcaatgctacagacaattttgggaagtgcatccattttaggaagtaaggatatattagaagacttcttttctttaaaaaaggaggggaatgttaatccgtattgggtaatttggagatggaaacaaacattattataaattatattttacatagatattaatgtattaaattacaaaatggtcggaatcaagcctccaagtcctcaactggaggcacataatctgatttatcgaagccgtcagggattaggaaatttatgaaaatttgacaagtctatccattcatgtatataatacagaagatgtaaatatcagaagaaaacaaatatcctaagaaaggagagcagactatgcgctggaaaacaacgaatcttcacctgcaaaaaggcaacaaattagctgtttacagggatagtgcgctctttttcaggtaaacagtttctaaaattaagaatgtaaatacgaaaagacactatctcctgttcaaaaatattggaaagatattattttgaaaaggagatttttttatgcgtaattttaatataaaaagacagatcaataaattgtatacacttactacggtaagctattttcggattgcgggagcatcgtgggtggcgcttcttgcactcagaggattttcactgttacagattggaatactggagagtattttccatatcgcaagcagttgttttgagatcccgtcaggtgttgtggcagatgtttttggaaggaaaaggacgctggctctttcgaagctggtcagtgtgctgtcttgtctggctatgattttatctgacaattttggaacggtggcatttgcgattgcattcagtgcgctcagttacaatctggaatcgggaaccatagaagctttggcgtatgacagtttaaagtcggtaaggcaggagaaaaaatataaccgatatgcttccacggaaatgatgttatatcggatcacaagttctacagcaacactttgtgcaggggttgcattgtggcttggatataaaaaagcatatgcgattgatattttctttgggatgatcgcacttggaatcgtatgcagtttaagagaaatatcgggatttacaggtactgatggtgaaccgaccaatccacagacagatgatcataaacaaaagcagatgagtgaagaaaagcaggaacggatgaatgaagaggaaactgatcagaaaaacattcagaacatccgcatttcagagagatttcaaaacgttgtcacagagagctggcatttcatgaaaaacaatcgaaaagccagaagtgttatgatcgtaaatgcattgatcggtgcagtgtcaacacttgtcctgtttttcctgcaggcaaagctgccactggcgggattgaacgaggcactgcttggcccggctctttttgtcatgggacttggagctgcactcggcgccaaagtggtgggatattttccaaattggaaatacaaaaagtatgttattttaagtggaatcggtgtgttgtctgcatttggaatgacgttttcgggcaatccatatctgatgattcttggtggctttgttggttcttttgcagatgattttctggaagtgcgcacagacatcctgttaaatgatatgattccatcggagcagagagctacgcttatttcggtaaattcttttacattttcgttggtgatgatcgtgatgtccacgttgatgggaagtattatgtagtatattttacagggcttgcgcgcttgcggattttctgtggggtggaagccctgttttttaaaaaaatttttacattgattctatggtaggcagcaactaaaaagtgtgcccaaaatataattgacataggatcagtaatgtttttcatgcatcaatgttaattaggtgtgcaaatgacggaaaaatgcatctgcatgaaaaaagaaatgggtaactttctcagctaaaagcttaccagacaaaaaacccatttcttattttaatatagcatttatgtttttataatacaagactgcaaattaattagcattacttctataatgtacgttatcaatatggaaaagaggaatggaaatgataaaagggtattcgcacaagcctatgggaactgttgcattaggaactcacttgggtaatttttcaaaagaagattctttgaaatatgtagaagcaataaagtatgcagttcgaaatgggatatactctattgatggagctataaattatagaggaatgtgttcagaacgagatgaaggagttgcattagctgaattaatgaattatggcattattaccagagaagaggtatttatatcatctaaggcaggattattatatggagatatttcagcaaagcttccaccaatgaaatacttgtcggaaaaactggaaaataaaggaatatcaatagaagatttttcagaatatgaaggtttattccagactctcaatcctgctttttatgaaatagctcttaataagtcattggaaaatttaggtcttgaaatgatagatgtttattacattcatattcccgagataacaaaattaaagttaacggaagacgaattctatgagaaaatggaaatgcttataagatggtatgagacaaagtgttttgaaggaaagattagatattatggcatagcatttgaatttatggtagaagaacctttcgaaaataagtggcatattgagattgaaagaataaagaatatagcaagaaaagtgtccggagaaaagaatcattttaaatacattttgtttgaatataatatcatgtgtgattgggctgacacagtgaactctcagatgatagatggtgtgaagatgacgatgatagaagcttgcaaggcattggaattagagactgttgccagcatgccatttgctatgggagacggatttaagaaatatgcacttagtgacatgttggattttgtgttgaaaaagatgaatcacgttattgttggaagcaagaatccgaaacatatcgaggagatactgaggtgttggagaggcaactttagtgaatgctctggtagacaaaggtttagtggaacgtgagggttcggctagaaaaggttactggaagataaaagaataagaagctttaaagaaaattgaagaactgaagaatgagaacacagcactccacgaagaactcgaatattacaaaaaccgtaaattaagcggacgacagaagcataatgcgaagtggatgggaatctataatgattttgttgccggatatgagaccagagtggtacggatctggtcgagattgcaaagtgcaacaatgtcagcaagcgtaccatttacagatacaaagcgtattatgaggaaatgaaggaagcagaaagcgaaaaatataacagcttacagaaacatgtgacagaatatcagaaggcgggagaaaattttatggcgtccagcatgattcatcttgcaatcatacgatgcataatagttaaaacagaatttaataatttggacaggctgcgtctgggtgtgatccttccagacggggctgtcagtggaaacagtcatcttaagaaaatgatctgtgaacagacaagagtgacctatgaccttgaattttacagggaaaaatacggggaacaaatgaagacagatgaactgtatctaggatattatcttcatctgattcaggacatattttatagaagatatgtatattctgagcatcactttaactcatccattccagagaatgttgaaaggctgcatcaggattatgaaaatacaaattggtttgtagcgaagcagtatggattggataagaatatgctccggacgcagacactggcaggtgagccgattatggaattagcagattttcgtgagcaggaactggtaagggaagtacgtgaacaatttcacccaatggaagaaaaaagcagcttttttctgaccagagagatgatccgggaatttattgacagggcgacggaaatctgtctgcatgaactgaatcagcttgcgcagggaaaagccggacttgacagttttgagtggagctggataaaacaaggatagaaataaagatttaagaatactggctggaggcacagatgaccaaggtagacgagttactgatcgagggaaaggtgaaggaagccattgaaataatgtgcgaccttccggaatatgagaaagaacgagaacaatatattgacttatttgaaaacgagcattatcggcaatatgaagtggatggaatactgaatgagatactgcttgcatatcagcaatatttcagagacgtgttttattgcaatagtgatgaagaaattgccgcagacaaactgataagaaagctgtgccagactttttctatatcggaaaaagagaaagacgcactggaagatagattgcaggaactttttgaacagaaaggctaccatgcacttttcggaaaaacgcaagggtattttggaccatacatctggaaagatacggttccgacgtcttatcagatagaattgccggaaggcgtagagcagtatacggtaaatattttaaaaggttttgtatttcggagctggatggattatctgacctttggaaaatacggaactggcggctgggcatctgaggacggaacgattcaatgcatcgagagtgcctatgattttgagagtgagaaatttaccgtttcacttttaaagaatgaagcacagcacgcaaaagacctgaaggaatatccagacattactccggcggaactggaatacagggcaaaattagtggaactgtattattcaagtgattgggaattattagggaaatttctgaaaatggcagatgcagacaaagtgaatgacagtcatgcaatggcttccatgcgtattaaagaagaattttctgatggaacatatgaggatttggaaaaaatcaaagagagagcgcttgaactatttaaaatcaatacgagggaactaagacatggcagcaaataaagtatttattgtggaggatgatgctgtcattgccagggcagtggcggcacatcttacaacatggcagatgcaggtacagtgtgccggcaattttgaaaaaataacagaagaagtggaagattttcaaccggacattattatcatggatatcaaacttccgtattataatggattttactggtgtgcggaaatccgtaaaacgtccaaagtaccgatcgttttcttatcttctgcggatgataacatgaatattgtgatggcaatgaacatgggcggcgacgattttatcgcaaaaccatttgacttacaggtgctgaccgcaaaattacaggctgtacttcgaagaagctatggaagcgaactcgcaagccactcgatcgaatgtggagaagtcgtattgaatctgaatgatacttcagcggcagtccgtggagagaagatcgacctcacaaaaaatgaatttctgatcttaaagacgttaatggaaaaacagggaaaagtggtaagccgcgaagaaatcatggaacgtctctggggcaatgatgaatttgtggatgacaacacgctgacggtcaacatcacaaggatacgaaaaaaattagaagccgcaggagtgaatgattttatcacaacaaagcggggacttggatatcttgttggagcataatgttgaaattttcgtcgcaggcagcaagaaaatcatagagagtttgttttcttttagcgaaaatacaggagttagataatgagcaaaaacatgcagatgaaaaaagaaacaggaaaaatttcacatagaaaatttttgtcagaaaatataggcttattattgatagctcctgttttcctgctcctgatgtttacagtatccaatttatatcagcttccggcagaatatgtcttttatctaacaagcatatttctgatactctgggtgaccactttgtgtatgcagtactggggattccggaagagaacagagcaatatgaaaaagaaagcaaggaaaagcaggaaagtaattcaaaagagagcagacaatgggaagaattacaggaaaagcaggacttttttgcattgtgggcacatcagatcaagacaccgatcgcggctttgaatcttcttttgcagggagaaaagcaggatgcggcagtatgccgacaggaattatttaaaatagagagttacgtggagatggcattgaattatctccgctttgaagagatgagcaatgatcttgtgcttgagcgaaattcactggaacaattagtccggcaggtagtaaaaaaatatgcagcaatttttatctacaatcatatctccattcagctggaacacttgaattatacagtgcttacagatgagaaatggttttgttttgcattggaacagattttatcgaatgcattaaaatacacaaagcagggaagtgtgaagatttcggcagaggagacagaaaatggtttgcagatatttgtgaaggacaccggtatcggcattaagagggaagatctgccgagaatttttgaaaaaggttttaccggatataatggcaggatggataagaaggcgagcggtcttggactttatctgtgcaaaggcgtgtgtgagaagctcggacatgaaatccgggtggtttcggaagagggagaaggaacgacggtgatacttactttgcagttggagaaagtgcagcagagggatcttgtgaacatgtaaaatcctgaaaaatgataattgaatcaatatggaaatttaatattagggtatgttatactaagagaaagcaagtaaaaatgggggatttcaaatgagtgcacagacagattgtgagatgctttctattgaagtgatggaagcatatgcaggtaaatataacctttctggtaataaagttgtagaattatttcaaaaaaatcaagtttttgaaaagatgctgattcagcatgagtatctacatcaagttagttttgaagaggttatggagtttgtagaaaatgcaatagcagatgattcaagggaattggtagtatatcatggtacttgttctgaatttgagaaaattaatctcaataaatcgcataaccgacgtgattttggaaagggattttatacaacaatactgcaatcacagtcaaaggaatgggcatacaggctttcattacgagaaaaacggaacgattattatgtatatgaatttttatttgaggaagtgccttcactaaaagtgaagcgttttgacagattaaatgaagaatggttagaatttattaagaaaaatagaagtaaaggcggtttgcagcatgattatgatgttgtaattggaccagtggcggatgacaataccatggaaacagtgcaattatatatggcgaatatacttacagcggaagaggcggtggaaaggcttcgctataataaggtaaataatcaggtatcgtttcatacagaaagggcactgcaatatgtaaaattagttaggagggtttcttatgccagaaaagatatatagttttaatggaaaagatattacgatgaatatatgtatacagattagagatgtggtgaaattactacaggaacattttcatattgcttttgaagaagcagtattgcttttttataaatcggagacatataagacactacaggagacagaaaacggtttatgggctgagtcagcggaatatatagctgacagatattacgaagagcagggaaaataacacttttcttacaaaaatgtaagattacgacaaggaaatgtaagccaaagaaagggcactacatttccttttttgctatgatagtcttacaaacaaggaggataaatcctctgctcctgtaaaagcagtcgcattttccttcggaaaacaaggaggattatatgtcaatcttagaagtcaatcatatcaaaaaagtatataaaacacgtatgggtggggacgaagtcaccgcattaagggatgtgcatttcagtgtggaaccgggagaatttgtggcgatcatgggagaatccggaagtggtaagacaacgcttctgaatatccttgcaagccttgatacaccgaccgccggaaaagtgttagtggatggaaaagatttcaccacattaaaggacaatgagcgtgcgattttcagaagaagcaatctcggattcatctttcaggattttaatctcttggataatttttccatcgaagataatatcaaactgccgctggtgctggcaggagaggattataagaaaatggatgcaaaagtacaaaaggctgccgggcagcttggaattgtggagcttttgaagaaatatccgtatgaagtgtccggtgggctgaaacagagaactgcgatcgcaagggctttgatcacaaatccaaggatccttctggcagatgaaccgaccggggcattagattccaaggcggcgaccaacctgttaaagcagctccgtgagattaaccagacaggtcagacgattcttatggtaacacacagcaatgtggcggcaagctatgccgaccgtgtcatgttcattaaggatggtgaagtattccatcagatttaccgcggtgatatgacaagaagtgcactgttagataagatctgtgacgcagtgaccgttctgatgagaggaggagaggacagtgaatcataagcttctgacaaaatttgtgttcagtggaatgcagaaaaataaaaagacactgatcccatatctgcttgcaggaacgatgactgtcatgatttattatattttgcagtcacttgcgcattgtccatacatttataaagatggagtggaagcgttttatggtgcacagattatctcgattttactggaaatcagcggtcagatcgtagcagtctttgcggcagtttttcttttttatacaaatcagtttatgataagggcgagaaaaaaggagatggggctttatggagttcttggaatgtccaaaaagaatattacctatattttagctgcggagagcctgattcatgctttgaccagcattattacaggaattatgatgggaacttttctgaacaaattaatgcttctcattctctataagattatcaatcagccaccggtaaacggactgtttttctcagtggaagcactgaaaagtacattggttttatttgttatcctttttgcagtcagtctgatttataatgtggcttccatccgggttggaaaaccgatcgcactgctgcagagtgacagaacaggggaaaaagaaccgaaagtgaaagttcctatatttattcttggaattataacactgactgcgggatataagctggcactgtctgctaagtcaatcgggggtgcggtcaacatattatttgtcagcattctgcttgttgtgatcgcaacctattgtctttttacagccggaagtatttttatcctgaagtgcatgaaaaagaatccgaagttttactataaaacaaagaattttatcagtgtatcgaatctgatgttccggatgaaacataatgcagcaggactggcgtccatctgtgtactttctacaggtgtgatcctgttgctgacctgtggcttttcactgatgatgctcatcggaaaaaatatagatgacagatatccgacagatattaaagtggcagaaactgtttcagaggcaggaaaaggcatggatgatttcgttactatgaataaagcgttgcagcaggatgggattgtgactaccgaccagatttatagacagtaccggaatatcatggtcacggaaaaagatggaaaacaaaagattgcagacccggatacattcgacagtgacatagcctccgatatcgttacgtatctgttgtctgctgctgattataacgaatatgccgatatgaatctgacacttaaggatgacgaaatactcatctacagttcaggaaaagaatggaaaaaaggtgataacctgaattttatgggaaaagagtatacagtagcaggagaggcagagtattctgcaatccgctatattattgattcgaccatgtcaattttcgaacgtgaaattcttgtctttccagatgatgagcagatctgtgctctgatggcggaagccggacagagagtgaatccggatgagtatgaagtcttcatcggataccagttagaaaaagctctgacagaagaacagatggaaacggtcagagctttgatggaactggggggattaaaccgtgaagcaattcgttttaaatcagaggagatgagcgctttttatagtatctatggtggaatcttttttgtaggaatgtttctggcagcactctttctcatggcaacggttatgatcatttactacaaacagatgtcggaagggtacgaagaccagaaacgatttcagatcctttccaatgtcggtctgactgaaaaagaagcaaaagaatccatccggacacaggttatgttattattttaccttccggtcgcagcagcgattatgcatatgatcgtggcaagcagcgtggtcagactttttttacggatgatactgatcgtggatacctttacctttaacatggcgatcgcaatcgtgagcatgatcttccttgtgatctatacgattgtatacaagatcacttcgagagaatactacaagatcgtgaataggaaagattaaatttgccctattgacagcacaatgctttttacttggctctctactgaactacagcatacatcaaactattgaaatttggcatcgcacttgtgatgcctttttcaatgattttcagcccatttcgcagcaactcattctcaaaagtactgaatgaaaccatcctgcaagaagttccagcaaccatcatttttccggtttcatgttctctttcctgaagctcaaaagcgttgcttatatcactttgcatttcataatttccgtctcccattgaacaaataagtgcaattccatctgatttcaaatgacgatgtatgaattgataaaacccgtttctgtcttcatctaaaactaacatatgaacaactgcaaccgaataaatgaaatcaaatttctcatccaaatcacttgataaacaatccaaaaccatgaattttgattcaaaatcaggcatttttttcttgcaatagtttattgcttcaggcgatatatcggttgctataaggtgaaagccattttctaaaacggtggcggagtctctgccttcaccacacccgatttccagtaacgactgctcgggatgaaggtgatatctcttaataatatccataacaattggagtatttttcatctgtgtccaactgacacccttttcatgagcggttttatatcgatcttcataggcttcataatattttcggttctctttttgcatggatgccccctcattaaaatttgtataccatccaaggcggagcgtatgcttcaccgaatggttttttatggtgatagtttatcatactacgcagaatgtgtgtaggttttcgcatcagatacaaaaagaatattatcatacagtaccgcaggctaatgtgtttttggggaaaccgtacgtagcttacagataaagaaatcaaagaacctgccgacaggatccataacgatgaaaaagcagaaaaagatgcatagaagaattaggtatgataaaataagagaagagaagtcagatgacgttatagataccgagaaacgataaaaggtggggcagtcagatgaaaaagaacattctattcggacttataatattatcatttgttcttgcaggctgtaagcaggatgtaaaagaagaaaaagaagcatcaacagaagtaacaaaagaactgtccggcgggcaggaagaagttacagagacaccggaacatacagagacaccgggacagaatacacaaagttttaagggaagagtgattgagaatcagacatttgaaattcagctggatgactggggaatggtaacatttacatcagttgcacctgaagagaattcgaataatccagaattcttattagtgaagaatgataaagttatatatgagtttccggaaataaaggcagacgcttcggattcatttaaacagatcagtggtgtaaagttttcagatgtgaatatggatgggaaaaaggatgttttgctgctactccaatactgtaatgatggagattcgtggaatatgccggttatatttttacaggaaaatccggacaatatgatgtatctggattatccaaatctggaaagctacaaagtcgaagcgaaaacagaaaatggcactcctttttatagggatactttttttgaagaatttctcggtaagcagcatctgacagaaaagctttctgatatggaaggcgtatggacagattatgtagagtatttggacagcatatcaggtgccactatggacatccaaaagcagattgaggtatttgcacaaaacagggacaagtgggcaactgacattgattttgccgatgaacaatataaattcacgctggctgatctggatatggacggacaagtggaacttttggtttcacattctggcggcacaggatttttttcttatacaagtttttacaatgtagataaggatggaaaactaaaagaactgaatacgactttttcagaatatgaatcccagccggatcttatggatcaggtatcggatgaaagtgatgtgatggtatattctaatatcataaatggaaaaggatattataattatatcgtgtacgatctcatgaaggagtcaccgagcagttatgtataccgtgtcagttcgcttgcaatcgttgatgatgttgtaacagaaacaaaactggcagtcgaatacgaaacatatgatggtccggattatgcagcgacagtcagctataaggactataccggggcagaactgacagaggaagagtattatgcttatgcggcagcctattatgatgcacaaaatgcagcagaacaaagggcacattttcaatggaaggacgtcagtgatatcgtaaatgcgagtgacgaagaggcagtccaaatgcttacggaagtgtataacgcatacagttttgattaataaggtttaggtgtcaaaaagcgggaaatagactttttgatacctgacttttaataaaaaacagaaagcagcacggttaagagaaacgattaaaaaaaactgtcatatattaaagtgtacctgaatatagcacgttgcttaacagggacaataaaaaacaggaaaggaaaaatatatggcacgttttacaaaccaggcacaattgcgttatggaagatccattgccaattcaaatatagcagtcggtgagattctggaagttttatccgctgcaaaggaggcagtgcggaatacttacagacaaaacgatacgatcacctatgtgatcagtattgtaaatgcgggaacgttagcttatacaggacttaccattacagacaatctgggagcatatccttataatacaacaacacttgttccactggattatatggaaggaacagcgaagtattatatcaatggtgtattgcagccggcacctgcagtaacagccggaccgccacttgtaataaatgggatcacagtaccggcaggcggcaatgcagtgatcgtatatgaagcagaagtgaatccgtacgcaccactggctgcaaccggaaatattgtaaatacagcaacgatcacaggcggaggcattacgccgatcgaggtgacagagacagtggtaacagataatgagccgctattaaatatcacgaaatcgatcagcccggttccggtaacggaaaatggaacgctgacctatacgttcctcattcagaacaccggaaatactgccgcggatgcagccacagcagcagagatcatcgatacgttcgatccgattctttccaacatagcggtaagctataatggaacagcacttgtggccggaacagattacacatacaacgaaacaaccggattatttgcaacgactgccggaaggatcacagtgcctgcggcagcttatacgcaggatccggctaccggaaactggatcgtaacaccgggaacaggaaccttaaccgtgacaggaacaatctgatcacaacgcatataaagagcaattccacagtattaccggagaaagaaaaggatttttgcaaaataagcggaaaacactttcttaatgtaatgtgatatagtataatgcaacttaagaataatttcaggaggcagagaaaatggatatgaatatcgtatgtctggatctggagggcgttcttgtgccggagatctgggttgcatttgcagaagaaacaggaatcccggagttaaagaaaacgacaagggatgagccggattatgataaactgatgaaatggagacttggaatcttaaaagagcatggtcttggattgaaagaaattcaggaaacgatcgcaaagatcgatccgatgccaggggcaaaagagtttttagatgaactgcgcagcatgacacaggtgatcatcatcagtgatacatttacacagtttgcagcaccacttatgaaaaagctgggatggccgacgattttctgcaattcactggaagtggcagaagatggcgagattacaggttacaggatgagagtagaaaattccaagtattcaacagtaaaagcactccagtcgattggattcgagacgatcgcaagtggagacagccataacgatcttggaatgatcaaagccagcaaggcaggctttttattcaaaagcacagaacagatcaaaaaggataatccggagctgccagcgtatgagacttatgatgaattaatggaagcgattaagaaggcgttataa

SEQ ID NO: 618 - DNA, 6226 bp, unidentified
  source 1..6226: mol_type = unassigned DNA
atgaatatgacaacaaatgtaattaacaagggttggttcaatcccatatccctttccgtattgctgatactggttatcgtatcagccgttttgtatgtttcgaagattataaacataccggtattcatcctcttgcttcttctttccgggttggtggcttctgcaatccgcatagccgaccaatgggaacgggcggtagtccttcgtatggggaaatacaacggtttgaaaggtcccggcccctttatgattatcccggttatagacagtgtgtcgacttatattgaccagcgtgtacgggtaagtgcatttaaggccgaacaaactctaaccaaagatacggttccggtaaatgtggatgcagtcgtatattggaccgtctgggacgtggaaaaagctgcattggaagtacaggagtaccaaaaagcgatcgaacatatcacacagactggtctaagagataccatcggtaagcacgaactgtcggatctcttgcaggaacgcgataagatagctgaggatttgcaacaggtcttagacagaaatacgaatccgtggggcatcacatgccagactgtcggtatcaaagatatcgctattccgcaagacctggccgaagcaatgagcaaagaggcccaagccgaacgtgaaagaagagctcgtgtcatcttgggaacggcagaaacggaaatcgcagaaaagttcgaacaagccagtaaaaaatataccgataatcctgtggcattacatctcagagggatgaatatgctgttcgaaggcttaaaagaaaaaggatcaatggttatcgtaccgagttcggcactcgacaccatgaacttaggggctatgggaggcttggtttcattggctaagaacaacgagacaccgaaataaactattttctaataacaaaaaattaccatttatgaaaatacacaaacaagggattacttttgttctccttctattagtcttcacaagttgttcacgaaaaccatcgctgcaatggattcccttcagttgggaaggtgatacaatttcggggatatacattgaaaaagcttttctaaatgttccggtaaaaatagagaatttaccctacgaattcacaatgcagtttgatttaggaacatataattctgtcttttacgggaatacttttgctccttatctcaaagaagccccatctttaatgaacaaaaaagattcaaccgggatgtataagaatgtcaacctgcaaatagggacagtggagtttagcaatgccaatatcggattcatgcagaatttcggaaatgaaatccctaaagattcacttcattcaaatacacccaagcatattggaacgatcgcatccgacatggtgcaagataaagtcttaatcattgattacaaatcaaacaagcttgcaatcacagactttttaccggctgaatacgaaaatctgccggctgaagaatttgaatcagaatatggggtaataaaattgcctttacggattaatggaaaaacatgtaaagtattgttcgatacaggttcaagccctttccagttaataacgacacaagaaagagcttggagcgtatcagaccttactattgtcgactctctaagcggtcctttatggtggggacaagaaataacattttatggctttaatgtaaccaaaccgatcgagttcggcggaaaagccttgaacaattcgaaagtctactacgccaaagacggcctttgggatagtatttatagttccctcgatgtctggggaataaccggaaatgcttatttctttgaaaacaccgtgattatcgattacaaaaacaaactattcaggataaaataaaaattcgaccccatacttcttcattcagatgcaagcgtaagttgttttctacattgccgtatatattcccgacaacgtcgaaaacaacttacacttgcatcaaaacaaaaacacattgccatcttacatcaaacctttgccagagcttggtctaggtcatcaatgatatcatcgatatattcagtacctatactcaggcgcacaatggaaggcgtgatatgctgtccggccagctcttccggagtcatttgagaatgggtagtcgtatacggatggatcaccaggctcttcacatcagccacattggcaagaagggagaatatttcgagcgaatcgataaacttccaggctgctacctgtccgccttcaatctcgaaagtgaaaatacttccggcacctttcgggaaatactttttataaagttcatggtctggatggtctggaagagccggatggttcactttggttactttcgggtgtttggataaatactcgacgactttcagagcattggcaacatgacgctccacgcggagagacaatgtttccagaccttgcagcaagataaaagcattgaaaggcgagatcgtagctcctgtatcacgcagaatgacagcccggatgcgggtgacgaaagctgccgaacctgccacgtcggcaaagaccgctccatgataacttgggtccggtttgcccaaggtcggaaacttatcggaatttgctttccaatcgaaattgccactgtccacaatcactcctcccaagctcgatccatgtccgccgataaatttggtggcggaatgaacaacaatatcggccccgtgctcgatcggacggatcaggtacggtgtaccgaacgtattatccactatcaacggaatattatgacgatgggccacctccgccacagcatcgatattggtaacatcagaattgggattaccgaacgtttcgacatacaccgctttcgtattctcccgaatagccgcctccaacgcctgcaagtcattgacatttacaatcgtgtgggtaatgccctgagccgctaacgtatgcgtaatcaggttgaaggaaccgccatagagattatcggcagccacaatatggtcgcccactccaagtatattctgcaaggcatacgtcacggccgccgcaccggaagccaccgccagaccagccactcccccttcgagagcagcgacacgcgcttcgaaaactccctgtgtcgaattggtcagacgaccataaatattcccagcatcacgaaggccgaaacgatctgccgcatgttgtgaatcatgaaatacataagatgttgtctgataaatagggacggcacgagcatctgttgcgggatcggcctgttcttgccctacatgaacctgtaatgtctcaaaatgtaatttctttgttgccatagtcgtattattttaaattgttcttcttgcttattttccagcaaaactatagcagacagagatatcagacaagatatatggaaaatacagaaaataacgctatttttacggccatcaacagaacatataaactgtatcaagatcgaaaaaaggattccgatagaattttattcttatgaacacacttgagaaattagacaaagtagacttgcagatcctccgtaccctgcaatcaaatgcccggctcaccacaaaagagctcgccgcgagtgtcaacctctcgtcgacacccgtattcgaacgcctgaaacgcctcgaaaacggaggatatataaagaagtacattgccgtgctggacgctgaaaagctaaacctgggcttcgtggtcttttgcagtgtcaagttgaggagactaaacaaagagattgcggcggagttcacaagaatcatacaagagattccgcaagtcacggaatgctacaatatatcgggaagttacgactacctgctgaagatccatgcaccgaatatgaagtattaccaggagtttatcttgaacgtgttaggcacgatcgacagcctcggatcgctcgaaagcacctttgtgatgaacgaggtaaagcatgaatacggaatccatatttaaacgccaccccgtccctatcttacatttattacttcagtgcataaatccgctggatgatgtccacaaccttcatgccttccagtacgttggtcgtaatgcattccgaacttgcaccggaaaggacacggaccacattgcggatcacgaaattatggttctgggcggaacctttataagggccgtagtcatttcccggattcgtcggcgccagttccggcatttcataatctttaatatgacagtattcgacttcgttcatatactgtccgccgattttcacgctaccgttctccgccacaatcagcatactgctttccatgttcctgttccagacagaagtggaatagctaaggcttcccattcccccgttcacaaagttgaaattcacaaagcccgaatcttcaaaagccgtaagtccggcatggttgaaatcggcaaagcgagcttggatattgcagatatccccgaaaagccagtacataatgtcgatgaaatgggagaactgagtgaaaagcgtccccccgtccaaagcggcatcaccatgccaaccaccgggtttataatagcgctcgtcacggttccaataacaattcaactggaccatatagattttacctaacctgccggaatctaccatctccttgatccaaacggaaggaggagaataacggttttgcatgacacagaacacttgtttacggtatttcagcgaagcatagaccaccttctcggcatcagcaagcgtcagtgccatcggtttctcgatcacgacgttgcaaccggcttcgacagcctgaatggccattgctgcatgcaagccgttcggggtacaaacatttacgacatctatggaaattccgctctgcaatagctccgtcagagatgaaaaaaacgggacatcgtatgcctcaatacccaattcctcacagggacgaatatcacaaagggccaccaattcggctcccggatcgcgtgtcaccatctcggcatgacgtttgccgatatggccacaaccgataactgcaaattttatctttttatccataagcattcgatgggggggatgtcaaaatctccttgtccccgcgcttgacgcggggccgcaaaaggacagaccttatcaatcagatttttatagggtcggttctaatgcgatcccacgtcaagcgcgggaacaggatagtttcgacacacccccttttttagagtttctgttatatattgctgttgtccgagggacatttccgtatgaataggcagggaaaggacggattcgcacaaacgggtggagacgtccaaattgccggatacacgggagatatgccgataagcttcctgatgatgcactggtactggataatagatcatggaagggattccccgttctttcaacaggcattgaaggacattccgcctgccgtcttttacctggaccgtatattggtgatagacatgagtcgaaaacgtcgatctcgcagggagaaccaacgaatcgcaggaggacaaagcatcatcgtaccgagaggcaacttgccgacgggtttccgtgaactcccccagatgcttcaacttcacatccagtacggcagcttgcaacgtgtccagacgggaattgcatccgatccacctatggtggtatttgcattcctggccatgattggcaatcatacggatacgggcagccaacgcctcgtcggaagtcatcaacgcacctccgtcgccatagcaggccaacggcttggatggaaaaaaagaagtcgtcccgatatgtccgatcgtcccggcctttcgtacccgcccgtcggaaaagatataatcggcaccaacggattgggcgttatcttccactacatacagatgataggcatctgccaaagccatgatcggctccatatcgcaggattgtccgaacaggtggacggccacgatcgcctttgtccgccccgaaacagccgcttctattttccggggatcgatattgaagctccggggatcgacatccaccagcacgggcgtcagccctaacaaagcgacaacctcggctgccgctatataagtaaatgccggcagaatcacctcatcgccaggctgaagctccaatgccatcaaagcaatctgcaaagcgtccgtcccgttaccacaaggaatcacgtatggaacctgaagataatcagccaaatgcccggcaaaggatttcacctgcggaccattgataaaagcacaactgtcgatcaccgcctgcatggcctcatcaatctcctctttgaaccggagatattgtccatgcaagtcgaccatctgtatctgttcttccaacat

SEQ ID NO: 619 - DNA, 9408 bp, unidentified
  source 1..9408: mol_type = unassigned DNA
atgaaaaagaaattgctgttgatgctcactctctgtttattggctcagtggagtgtggcacaagccccgaagtgggtagacaaagccaaacgtgcggttttctcggtagtgacttacgaccagaacgataagatactgaatactggaaacggcttttttgtcactgaagatggcattgcgctttctgactacaccttgttcaaaggtgcccagcgcgccgttgtgatgagctcggacggggcacagatgccggtggaggccattatgggagctgatgacatgtacgatgttgtcaagttccgtgtcggcatccccggaaagaaagtcacggcgctcactttggctgctgtggctccggctgtcggcgcggatgtatatttgctgccttattccacccagaaggaccgttcttttactaccgggaaagtaaaggaggctgataagatttccggcaactattcctattatacgctcgatatgcgtctgaaggacaagatggtgagctgtccgctgatgactgtggacgggcaggtcttcggcctggcgcagaagtcctccggacaagacacggctaccatctgctatgccattgacgctaatttcgccatgtcgcagaatatctccgcattgtcttatggagatatgtcattgaagggcatcggtatcaagaaggcattgcccgataccgaggagcaggctttggtgttcctctacatggcttcttcccaactgtctccggagaagtatatggagactctgaacgatttcattgcacaatatcctgccagtgccgacggttatctgcgccgtgcttcccagcatctgttcatgtcccgtgaagatgcttccatggataaggttgctgcagacatggataaggctttggaggttgccgcaaagaaagatgatgtgtattacaaccgggccaagataatctataattatgcattgggcaagcccgagaaagtttataaggactggtcgctcgacaaggctctggacgaggtacggaaagcgatagccattgacgaacttccggtttatgtccagttggagggtgacatcctgtttgccaagcaggagtatccgtcggcatttaccagctatgataaagtgaataagaccattctggcctctccggctaccttcttcagtgccgccaagaccaaggaactgatgcaggcacctgccgaagaggtactggctctgatggacagctgtgtggcccgctttacccagccctatacggaggaagccgccccttatttgttggagcgtgcccaagcccgcatgaatgcagaccaggcgcgcaatgccatgctggattatgacgcctattacaatgccgtgaacggtaaagtgaacgacatgttctactattaccgtgagcaggctgctttgaaggccaagcagtaccagcgtgcgctggacgatatggcgaaggccatcgaattgaatccggaggatttgacctaccgtgccgaactggcagtggtgaatcttcgcgtgggacgttacgaggaggcgttgaatgtgctgaaggctgccttggagaaagaccctaagtatgccgaggcctaccgtctgatgggtatcgcccagctgcagatgaagaaggacaaggaagcttgtaccagctttgccaaggcaaaggaattgggtgatcccaatgtggatgctttgattgagaagcattgcaagtaaagggatgggatagaataaaggctctgctttcgcaagcagagcctctgttttggggaactcccccgtgttaaatgagttaagtctaggtataacaggttatgagtgaaattacgttgttttatttataaaatgcgtggatttccggaatactgcatatacttctgatttttttatttcaaaaaagaaaatagactcgattattaataaaaacaaactttaacaattatgaagaaagtgatttgcagccagcaggcaccgggcgccataggcccttatagccaggctatcgaagctggcggaatggtatttgtatcaggtcagttgcccattgacgcagctaccggaatgatggctgaaggtgcggaagcgcaagcccgccagtccttggagaatataaagcatatcctggaagaggcagggctgggtatggcgaatattgtgaagacaaccgttttcctggcagacatgtccttgttcgctgatatgaacaaggtatatgccacttattttgacggtgctttcccggcacgttcggctgtggcagtgaaggcgctgcctaaagacgccttagtagagattgagtgcatcgcggttcgctaacaagtcggccacaatgaaactgctgcctcccacgaagatgaaatcttccgggaggcttttttcttgtgcggcccgcacagcggcgggtacatcaggatagcaatctccttccagacctgctgcttcggcaagctcctgcagttcgctttcgggcaatgcccgcttcacgctggctttggtgaagtagtaggtcgcttcccggggcagcagggccagtaccccccgtatatccttgtcattgaccatgcctatgacgatgtgtagctggcggtaagtttgctgtttcagttgttctgtaatgtaggtgatgcctcccacattgtggccggtgtcacaaatcagggtgggcgactcctgcagtttttgccagcgtcccatcaagcctgtcagttccaccacacgggcaaagccattgcgcaccgcttgtccgtccagccggtagccggcttctttcagtagcgggagggcggtgagtacggtccgggcatttttctgctggtagagccctttcagttcgtattctattccgggatagtcctcacagtcgttctcttcggcaaagtagataggagcacccgtcgcctgcgctttttccagaaacaccgatttcgtttcgggagtggtttcgccgattacaacggggataccgcttttaatgattcctgccttctctcctgcgatttttgccaaggtgtcccccaggaattgagtatggtcaaaactgatgttggtaatgatgcatacatccggacggatgatattggtgcagtccaggcgtccgccgagtcccacctcgattacggctacatccaccttttcatccgcaaagtagcggaaggccatggcagtggtcagctcaaagaaggaggggtggaggggttcgaagaatccacgttcctgcgctacaaaacggatgacgtattcctcgggtataggctgtccgttaatccggatgcgctcccggaaatccaccaggtggggcgaggtgtagagtccgaccctatatcccgcttcttgcagtatagcggcaagcgtatgcgagcaggaaccctttccgttggtaccggccacatgaatgctgcggaaactgcggtggggatgtccgaaatgttcgtccagggtcagagtattttccaacccctccttgtatgctgagccgcccacctgctgaaacatgggcacactgttatataagtaagttaaagtgttctgataatccatcttttataatatttaacggagaagcaatcctttctccctattaatttgttatctttaaaagcgacaaagataatgcagaccggacgcaatcaagcttgcttgaaattgcttgcagtgtaacttatcttaagcttatgcaaaggtattaacaatttaaatctaacgtgtatgggagctaagaaaaattttgtgattgatacgaatgtgattcttcacgattataactgtttgaagaattttcaggagaatgacatttatcttcccatcgtagtccttgaagaactggacaaattcaagaaaggcaatgagcagattaatttcaatgcgcgtgagtttgtccgtgagctagatttgattaccgatgacaatctgttcaccaaaggggcgccattgggagagggcttgggccgtctgtttgtggtggcaggcatggtggactctccccgggtacgtgattcctttcccgaacgcatccccgaccatcagattctgtcggtagtggactggctttccaccaaaaagcctaaaatgaaaaccatccttgtcacgaaagacgtgaatctgcgcatgaaggcgcgttccatcggtctgctgtgcgaagactatatcaatgataaggtaatcaatgtggatatattcgaaaagtcgaatgaagtgttcgagggtattgaccctgtgctgatagaccgcatttattcttccaaagaaggactggacatcaacgagttcgattttaaggacatcattcgccccaacgaatgctttgtgctgaagagtgaccgcagcagtgtgcttgcacgttataatccctttacccattcgatttgtcgggtcaacaagacaaggaattatggcattgaaccgcgtaatgccgagcagagctttgcttttgaggtgctgaacgacccgaacatcaagctggttgccttgaccggtaaggcgggaaccggcaagactttgttggcgctggctgccgcattgggaaaacttaccgactacaagcagattcttctggcacgtcccatcgtggccttatccaataaagaccttggattccttcctggtgatgccaatgagaaagtggctccttacatgcagcctttgttcgataatttgaatgtaatcaagcatcagttcgctgccaattcctctgaagtgaaacgcttggaggatatgcaaaaaagtgaacaattggtcatcgaggcattagcctttatccgtgggcgcagcttgagcgaaacctactgtattatcgatgaagcccagaacctgaccccacatgagattaagaccatcatcacccgtgccggcgaaggtacaaaaatggtgtttaccggtgatattcagcagatagaccaaccctatctggacagtcagtccaacgggcttgtctatatgatagaccgcatgagagaccagaatttgtttgcccatgtcaatctggtgaaaggggagcgcagccagttgagcgagttggcaagtaatctgatgtagcggataccgcattttccggggcaaaactatttctatcccgctttctgactgttaaaacgggggaggtgggatggtttctttatagacgataaataattgttataacatttttttatcgatttattgtctgttttgactaaaatagtgtatctttgcctcgcctaaaacaaaactgtcaagcgaaatgaagcgaaatttttttcatcggtatctttccgcgaaagtgcttccgatatggactattctgttaattgatgtatttatcatcgtcatatccagtctgttggcctatgctctccgatatgatttcagaagcatttttctggaatcatctaccattgacaagaccattttatggacggttgctgtcaacctgattttcttccgtgttttccgtacgtattccaatgtactgcgcttttcctcctttgtggatatcatgcgcatttttgtgtcattgacggtgtcgtatgcactgctgatgataacgagcgtcctgacggaaagctatttggagtttaacctggctccggtcagcgtgctgttcatgtcctatatcatcagctttgccatgatggcatgctcccgtgtgattgtcaagactttcttcgaggcgctgaacttcgacggcacccatagtgccaatgtgttcatttacggtgccaaggaagccggggtcaacattgccaaggcattgcgtgtcaatctgcgcaactactaccgtctgcgcggattcattgcggacgaacctgaacttatcaataaggtgatgatgggtgtcaaggtgttccctaacgacgatacgctgattgatgtgctgaacgaccgggatgtgcagaccatcatcatttctcccgccaagatggaggaactgaagaagtccgacatggctgaccgcctgctggtgcacaacatcaaactgatgaccgcaccccccttgagtgagtggaacggtcaggcgctgagccgtacgcagctgaaggaaattcagattgaggacttgcttcagcgcaatcccatcgagatagatatccataaggttgcctctcatctggaaggcaagcgtgtgatgattacgggcgccgccggttctatcggcagcgaaatcatgcgccaggtggcttcgttcaatccctacaagcttattttagtggaccaagccgagactcctctgcatgacatccgtctggaacttcaggaccgttggcgcgacatcgatgccgagaccatcatagccgacatctccaatgccacgcgcatggaggatatcttcagggagttcaagccccagtatattttccatgcggccgcctacaagcatgtgccgatgatggaggacaacgtttccgagtccatccaggtgaacgtattcggtacgcgcaccgttgccgatcttgccgtgaaatacggtgccgagaagtttgtgatgatttctacggacaaggctgttaaccctacaaacgtgatgggctgttccaagcgtatttgcgagatttatgtgcagtctcttgcgaagaagttgcagaaggagggaggccatgccactcagttcatcactacgcgtttcggcaatgtgctgggttccaacggttctgtcattccccgtttctgcgaccagattcagcgtggcggcccggtgacagtgacccatcctgagataatccgttacttcatgaccattcccgaagcttgccgccttgtccttgaggccggcagtatgggtaacggcggtgaaatctacatcttcgacatgggtaagccggtgaagattgtggatcttgccaagcgtatgatcagcctttccggacgtacggatgtgaagattgaatttaccggtctccgtcatggcgagaagctctacgaggaactcttgaatgtgaaggagcttacaaagcccacctatcatgagaagattatgattgccacggtgcgtgagtatgactatgacgaggtgaaggagcgtatccagaagctgattgatgtaagttacacttatgaccagatgaaaattgttgctgccatgaaggatattgttccggaattcgtgagcaagaattcctgctttgaggcgctggataagaagaaatgaaaagatagcggtatagtataaaatgaaagggtgataacgtcattgtagtgttatcaccctttcaattttattgtcttcttgtcagccttttgtctcattcatgtgaagagaagtatttcaagaactgtgtacgttcgaaggtattgactcccttcgggtcgtttacgttcagaatacctttgaactggctgatggtttccatacctttgcggtccatccacaagttgaggaagcggatgtattcttcaatgatggtagctgaattctgataaagcacactgcatatctctacggccgaagcacctgccaatattgtcttgacaacgccttcgggcgagtggataccaccggaagcggcatagtccagcttgtttacggccgccgaagcgatgcctatccagcgcagggctttagacaaatcggcttcattgctgaatacgttaccggatacttgtatcattttctcaatgttgatgtccggctggtagaagcggttgaacagcactactgcggcggcaccgttggcgtacagctggtctatcagcgctatcgggttggtcaggttgtcacccagcttcatgatgacgggtatcttgaccgtcttcttgatgtggctcagaatgtcgatgtggcgttgctcgaaactgccgtaaacatattgtacatccgtctgcagtgcaaggatattgatttccagtgcgtctgcaccggcttcttctattttggcggcaaattccacccagtcggcattctgatagcagttgatgctggctatgatggggatattgcaaacctttttgctttccttaatcaggttcagatattcacccagcttatgttcgcggatatatcctacaaggtagtcactgccttcggggtacatgttcgggtctcccatccagtcagcctccatcatgatttgctcttcaaagagtgattttagcacaatggcacctgcgccggcctcagatagtttctggttcttggcggcgctgtctgtcagtccggagctgctgacgataatggggtttctgagtttcagccctgcaaaagtagtttctaatgttgccatgataatgattttttatggttaatagtttctttctccaaaaatcttgcttcctacacgtattaaggtgctcccggctgcaatggcctcgtggtaatcgtgagacattcccatggacaattcccggaatgactctgcatcggcaaaccacttggttttcacttcattgaagaagctacttaaagaacaaaactcagttttgatttgttcgtcattgtccgtattcgtggccatgcccatcaatccgcatatccggatatgattgagctctctccattcaccggctgccagcatttcccggcattcgtcaaagctgaatccaaacttggtctcttcccgggcaatgtgtagctgtagcaggcagttgacggtttttccggctttggcagcctgcttgttcacttcggccaacagcttgtaggagtctatgccatgaatcagcgctacgtaaggaacgatatattttattttgtttgtttgcagatgcccgatgaaatgccattctatgtctttgggcagactttcgtatttggcggtcatttcctgcaccttactttctccgaacacacgctggccggcacgatacgcttcttctatcgcctcgttggggtgaaatttggaaacagccaccagccgtaccttttcaggcagttcgctcagtacttgttttaaattctctgcaatcatcgtttttttgagttatgagttatgagttataagttatggggcgcaataataactcataacttataactcatcacttaaattaaacttccggtttgtcgtcgggctctgcactgtacggatatacatccataatggcagtttccgctacagatgctatctggtagtcggccattgtgcctttcatgccctcatccagtttcttcactgcatcacgcagatcggcagcctgcaccaatacctgggtagaggttttcttttccgcaccgcttttctcgtccagtgtgatgaaaaccagtttacatttaaaccagcggtcggcagcttcctcttcgctggggaacaattcgctatagttggcacgtttgatgtccgatacggtgaactctcccgaaatgaacggcgtcatctcttcgatgatgcgtgcttccgcttccgtaaaactgagggcatctaccaggtacggttcggtcaccttcttgttcattccattttccattgttttctcgtaacggatcttacattcaaaccatgtatgcattgccat

SEQ ID NO: 620 - DNA, 7781 bp, unidentified
  source 1..7781: mol_type = unassigned DNA
ttataaagcctttcggttactgataactcgcatggcggcagtgtactgctgacaaggcacagacacgtgaatgccattacctttgtcctctgttgaagcggtgatgtaagctgacttcagcaattgcttcacactttccacttcccaggggctacctgcgaaaacgttaatctgagaaatctttctacttgtaatcatgtgctttaaactttttagttgtactttccggtcgcaaatgtaagtggtttgcgggaaaccgaatagctcaaatcgatcaaaaagtaacataaaaggtgcaaacgatttagaagtagcttattcctcatatttttttcttatttcgtatcgttcttccggatttccacacgacggatctttccactgatggttttcggcagttcgtctacaaattcaatcacacgaggatatttgtaaggggctgtcactttctttacatgattttgcaattccttgataagtgcttctccctctttccctttatattctttagccagtacgatggtagctttcactacctgaccgcggatttcatcaggtacgcctgtgatggcacattctattacagctgggtgtgtcatcagagcactttccacttcgaaggggccgatacggtaaccggaactcttgatcacatcgtcggcacggcctacaaaccagagatagccgtcctcatctttccaggcaacgtctcccgtatagtagatattattgttccaggcttcgtgtgtacgttccggatcgcggtaatactctttgaacaatcccagtggcttacccttgtctgtacggattacgatttgtccctgttcaccggcttctacggaacggccgtcattgtctatcaggtctacatcgtattgtggattaggcaatcccatacttcccggtttcggttccatccaaggcatggtagcaatggtcagcgtggtttctgtctgtccgaatccttccatcagtttgatgcctgtcagtttcttgaaggtctcaaatacggctgggttcagagcttcgccggcgatggtacaatattgcagtgatgagagatcgtactttgtcagatcttcgtgaatgaggaaacggaagatggtgggaggtgcacagagagaagttacgtgataatcctgtatcttctccaggatggcggcaggggtaaatttctcgtggtcatacacaaatatatttgctccggcaatccattgtccgtaaagtttgccccatacagctttcccccaaccggtatcggcaatggtgagatgcaggctgttttccgtcaggttatgccagaaactaccggtaacgatatgccccaacggatatgtaaagtcatgggcgaccattttcggttcaccggtggttccgctggtgaagtacatcagtgagatatcttcgttcgtattcggatgttccggcttcacgaaaggtgcggcattttcgatccctttgtggaaatcatcgaatccttcggctacttggggacctacactgacgagtttcttcacgctgggagaatccggcatggcagctacaatatgatccgtgataaccgattctcctgcacaaacaatcatcttgatgtccgcagcgttacagcggtacacgatatctttctttgtcaacaagtgagtggcgggaatgacgacggcaccgagtttatgtaaagctatggtgctgtaccagaattcaaagcggcgtttcaatatcaacattaccatgtcaccatggccgatgccgaggctttggaaatacgaggcggtcatgtccgtataacgtttcatgtcggcaaacgtaaattgccggtgttcacccttatcattagtccataacaatgcaggtttgtcaggttgttcggcagcccaggcgtctactacatcgtatccgaagttgaagttttccggtacgtttattttaaagtttttgataaagtcctcttgtgtagtgaaagaggtttgtgataaaaatctttctaccataattataggaattaagaatgagagattcccttcattctccatttagttgttacatgataattgccaggaatcgtaccgtttttccatccagtgctttcatgccatgcggcaattttgaattgaagtacaggctgtctccttcgtttagtataagctctttgccatcgatgttgaccatcatgcgcccttcgagcacaagactgaattcttgtccggcgtggctgttgtaatgtatcggttcatcgtccggtttaggttcaacggttacaatgaacgggtctacgctacggttcatgaaaccagaagcgagggcttgatatttgtaggccttggtacgttcgatgctgacaccttttccggcacgagtcaggaagtagctgctcattttaggttcttcaccaaacatcagtgcgtccaatgaaactccgtatctgcgtgctatcttttgcaacatacttacggagatatcaaaatctcccgtttcggcaagacggtagtcgtaaggagagatgtcacattcacgggcaatgtcttcagcggtcagctccagtacatcacgaagcccgcgaaggcgttctgctatttgcttaatttgttcgtccatgtggttgtttatttaatgaattaattgttagtcttattgcttacttgctttgatagcattgatgatggcggatgtataaccgtcatgttccagttcattgatacctttgatggtaataccgccgggggtacatactttatcgatttctacgctgggatgcgtatcattattcagtatcagttcggctgctccctttaccgattgagccaccattctcatagcatctttgggataaacccccatttctataccggcttgcatggcagcctggatgtatttcaacacataagcgattccgcaggaagccatggaagtgcaggctgcgaatttttcttcggggatcagcatggcaagtcccatctgattgaaaatatccagcatcagttgttcttgttctttggtcgcattacgactggcaatcagtgtcatactttccatctcgctgatggcggtgttaggaataatgcggaacatggtcatttccggttcgggtacgtagtgagccagctcttcaaagttgatgcctgcagcaacagaaatgataatttgtttactcttcagtttcagttcgcgcagcacacctttgataagccacggtttcacagcgagtatgatgaattcggcgccgatgatggcttcctgattgtcatgggtgatttgtaaagcaggaaactctgcttgtagttcatccaactttccttgtgagggattagaaactatgatatccgaggcggggataatacttccctttgccaatccacgggctatagagccgcccatgtttcctgctccgataattgctgttctcatatcattctgttattaaaagggttgtcgatgggcaaaggtagatattttttctacctttctaacctaattgatgtaaaaaaagtgcttgtgtatttaaaacaacaggcagccttaagaaacgctgaaacgcttgaaggctgcctgtttattgctgattatgttatcaaatatactttaaagtacttttctgaaacgttcgaggaagagattggcttcttccatgctgaggcagaggggtggaagcaggcggagtacatttgtaccgctgacaccggtaaatacatgttgttctttcaacagtttcagacgaagttcctttatcggttcttcaaattcaagaccgatcatcagaccacgtccgcgaacttctttgatctgcgggaactttttcaactccgtcatcagatactcacctaccttggctgcattttcaaccagattctcctgacctattacgtccaagacagcaagcgctgcgctgcatgccaggtgattaccgccgaaagtagtacccaactgtccgtaaaccggagtgaacatcggactgataagtacaccggccattgggaaaccgttaccgatgcctttggctaccgtgataatatctgctttgataccgttatattgatgagcgaagaacttaccgctgcggccataaccgctttgaatttcgtccagaaccaatatcgtattatgagctgtacaagcttcacgcaaagcctgcatgaattcatctgtcggcaattgaataccacccacaccttgaataccttcgataatcactgcgcaaacatcacctttggccagttcgtttttcatagcttcaatatcgttcagcggaaggtaagtgacatgtccgcagtcattaataggagctatgattttgggattattagtcacttccacggcaagtgaagtacgtccgtggaatgccttgttgaaggaaaccacacgtgtacgtccgttgtagaacgaagcgagtttcaaagcattttcgttggcttctgcaccgctgttaatcaggaataaggagtagtcatcataaccacaaacttttcccagacgttcagcaacctgttcctgtagcttgttaatcacagagttggaataaaatcccaacgtggcaacctggttgctgatcatctccacgtaatgcggatgtgcatgaccgatggagataacagcatgtccgccgtagagatcgaggtactcagtaccgttctcgtcccacacgtggcagccttttcccttgacaatgttgatgtcaaaaaggggatatacgtcgaataagttcatttctttaattctaaattacaaaatacaaattacttagaaggcgctgggtttcaatcgtaagccgacggtttcttctaaattgaacatcagattcatgttgtgcaccgcctgaccactggcacctttcagcaggttgtcgatgcaggagatgataagcagcttatcaccgtgcttttccaaatgcagaagacatttgtttgtgttcactacttgtttcaggtcaatgttcttttctatgatatgtacgaaagagtctttggcgtaatattcttcgtacatacggactatttcatccagtgcaactttagtttttactacgatggtagcaaaaataccacgtgcgaaatcaccgcggtaagggataaagtcaatatccgcatcaaaactgttctgcaattgcttcagagattgcttgatttcgggtacatgctggtgctcgaatgccttgtaaacactcatgttgttgttgcgccaactgaagtgactggttgatcccggttttacaccagccccggtggaaccggtaatggcattcaccatgatgtcattgttcagcatcagatgtttggcaagggggagcaatcccaattggatacaagtggcaaagcaacccggattagccacatgctttgctttgcaggtagcgcgacggttcaattccggcaaaccgtaaataaagtcatgttccggagaagcgatgcggtagtccatagaaaggtcgataattttcaattcctcgggaaggttgtgactctccatgaacttcttcgtgtcgccatgggcggtacagaagaataacacgtcaattttgtccaaaggtaactcgtcggtgaagacaaggtccgtttcgccgtacaatccttcatgtacgtcggtaattttgtttccggcgttacttgagctgttgatgaatacgatttccgcttccggatgattgatcagcaaacgaattaattcacctgccgtatatccggctccgccgatgattcctactttaatcatgttagtttatactattattcttttatctgttatacaagttcttttcctcgggaacaataagccacattataaggtacacggggataccggcaaatacggtaaaaaacgtcaataacgcatagccgatacgtacgagtgaagggtcgagtccgaaataagcggccaatcctccgcagacgccggcaagcattctgtcgctgcgtgagcgagttagttttttgttattattatccatatctgttcgtataattgttctatcccctaaccgttctctatgagagatgggttaggggataggctttttagatttcttcgtctttatgattgttataatatactctcagtggagtagaagtaaccttgatgaaacctttcgcatcttctgctgtccagcctttttgcatttcgccatattcgccgaacttcgttttcacaaggtcgtcttctgattctacacctaccgtagagaaagataatggacgaagttccagaatagccgtaccgtttacgttacgctggctttcctgtagcatggcttcgatgtcgcgcatcaccggttccagatattggctttcgtgcaggaacataccgtaccaattggcaacctggtctttccagtattgctgccatttactcagtgtatatttttccaggaatttatgtgcaccgataatcagcatcggagcagcagcttcgaaacctacgcggcctttgataccgataattgtatcacccacatgcatatcacgaccaataccgtaagcggcaccgatttcttctactttctgaatggctttgatgggatcatcaaatttctcatcgttcacagctttcaactcacctttttcgaaagtaagacggagttgttcgctgccttcctttacacagtgtttcagataagcgctttcgggtaatccttgtgcggaatccagaatctcaccaccgcagatagaggtaccccacaaacctacattgtaagagtatttcagtttggtgaagtctgctgagaaaccatgtttgttcagataatcgatttcttcctggcggctcaatgccatatcacgagttagtgtgatgatttccacgcccggagccaatacaaggaatgtcatgtcaaaacgaatctggtcgttgcctgcaccggtagaaccgtgagcgatagcatctgcaccgatctcgttggcatagcgtgcgatggcaagtgcctggaagatacgttcggaacttacggaaataggataggtaccattacgcagcacgttgccaaataccatgtatttcaagctcttttcgtaatattcctgcgtcacgtcgatagtgacatattcttttgcgcccagtttataggcattttcttcgtttgttttcagttgttcggggctgaaaccaccggtgtttgcacaagctgcatacacttcataccctttttccttggcaaggtacattaccgtaaatgaagtatcaagaccgccgctgaatgcgactactacttttttcttttcttccatatcctttgttttttaaattttatcatcttcatgcagagccgggtcgtagagcattgctgtgcagatgcagaatttgcggttcttggctactaatatatcatggttgatgcagccttcgcagcctttccagaaggattcgtcatcagtcagttcattgaaagtgacgggaacgtatcccaattccgtattcattttcatgacggcggctccgctggtgagactgaatactttggcgttgggccatcgtaagcgtgccaggcggaaagatgccattttgatacgcttagccaatccaataccgcgaaagtcgggatgcacaatcaaaccggaagtcgcaacatattgtttgtttccccaactctcgatgtagctgaagcctgcaaacacgtctccgcataaggcgatgatggcttttccttctttcatttttgtcgccacatattcgtgtgtgcgttctgcgatgcccgttccacgtactttggccgcttctctgatggtatccaaaatcttatccacataaacttcgtgagaggcgtcagccaccatcacgtccacttttttggtatccat

SEQ ID NO: 621 - DNA, 42647 bp, unidentified
  source 1..42647: mol_type = unassigned DNA
  misc_difference 25537: note = a, c, g, or t
  misc_difference 25538: note = a, c, g, or t
  misc_difference 25539: note = a, c, g, or t
  misc_difference 25540: note = a, c, g, or t
  misc_difference 25541: note = a, c, g, or t
  misc_difference 25542: note = a, c, g, or t
  misc_difference 25543: note = a, c, g, or t
  misc_difference 25544: note = a, c, g, or t
  misc_difference 25545: note = a, c, g, or t
  misc_difference 25546: note = a, c, g, or t
ttattgattattgtgcttaatagtgtctataagactatgcattcttgtattgattgattcaagaatcttcatattggcatcttctgtattagtggtttcagcagcgtgtgcagagagctgttcagatacagctgatattgtctgtatagagtcaacaattacgctgttagcctgtttgagttcatcaatacttgatgaaagtcttgaaacattatcacggacagtatatgtattagtctgaatattatcaaagcttttggctgtattctcagtagaagacttttcagtattaattccgtctatcatagtgtagataactgatacaacatcttcaatagctgatgacatattatgtataagctttgttatattctcagttgcatcacctgtctgtgttgccattttggaaatctcagaagcaacaacggagaaaccttttccagcttcaccagctcttgcggcttcaatacttgcatttaatgctaagagttctgtctgggaagcaatctcctcaatcataacaataatagaatgcatctgtgaaatatggttgttaaggtaagtaagcttatcagcaaccatttctccgttcttaacagatatatcaactgtagtaacaagatgctcaatatctttactgctctgtgtaaggatatcaagggtttctgccatacttgcagagatttcattagcggacatatctacaagttcaacttttttctgaattgcatctgtctgtgtaagctggttctgtacggcattggctgtatcagttgcaccgttggatacgtcagacatagttgactgtgtgatctttgaagattcctgtaacttttctaaatcagcatatacttcagaaataccattctgcattgtagcagacatttctgatatctgactaagaagctcatcactctgctcttttgatttagaaatgttattaatcttctggtctgcattagctttagttgcaagagcaagcatacaggcatatataccagttattaatacaattatgagctgtataacggcggcatcagttccaagatagcccattctgccagttcttgcaccgataataatagtgataatattttcaataactacgccaaaattgacaagaaacataagacggaattcgttatataatgaaacaataaataccataggaagtgcaaaggcatacatagtaatacttgttgttgtaaatatgttgcaggtatagaaaacagcatatcctatagctactaagtgcttgattgcattagtttcgtggttcttgttccagaaaataaattcagcaatcacaggtgccattccgatagcaaagataataattgcgtaggcgaatgatgttataccaactgctgtctgcataaaaacaagaaggctgataacaagcacttctattaagtgtgctagcatagctacacgattgtttcgttccatttcgggaacttctcttttgattttgataggcataagtacctcctgatgtatattgttatttaagtgcctagaatactaacccccattataatatatataatttgatatttcaatgatacatttatggttcttccgacacagatagcttttatataataattacattttttgtcagattaatgctgtctttataatattatattgattgtttcgttttgaatatttataggcattatttctgtaaaataatatgaaacagcgatatttcaccttgaaataatacaataataattataatatacatttataaaataagtttataaaagttggaggtgccatatgttatttaaaaatccaattattccgggatataatcctgatccaagcatatgccgtgtaggaagtgattattatattgtgaattccacatttgaattcttcccaggagtgcctgtatatcatagtaagaatttggttaactgggagcttacaggatattgtctggacaggcgttcacagttagaacttgaggactgtcgtaattcgggaggaatatatgcaccaacgatacgatatcataaaggtatgttttatatgataacaacaaatgttactgataaaggtaattttgttgttcatacagaagatattaacagcgaatggtctgagccagcgtggattgaccaggggggaattgacccatcattattctttgatgatgatgacaaatgttattattgttcaacgggaataattgacggtgtacgtggaattgttgcatttgagataaatccgcttacaggtgtgatattatctgagaagaagcttataagtgaaggttgtggtggacagtgtccggaaggtccacatatttataagaaggatggctggtattatcttatgatagcagaaggcggaacggaatatgcacatcgtgaaacaatccagcgttcgcataatgtatatggcccatatgaggcttgtccggataatcctgttatatcgcataaggaatataagaaatcagagattcaggcgacgggacatgcggatttattagaggatgagaatggcaactggtggcttgtgtttcttggaataagaagattcagccatgctttgcttcataatcttggaagagaaacatttcttgcaccagtaaagtgggaaaatggctggccagttgttggctataatggcaatggaacaattgagcttgtaatggatgcaccactgcctggacttgattgtgaagagagttctgccaatatccgtattgataagcagtccggacagccaattctgtacgcagaccacagtgtggatatagattttacagatgaattgcttgataaaaggcttcaatatacaagaaatcctgatacgtcaaagtatatatatgataataaaaatgctgtgcttacacttaagggaacagatataacacttaacacggctggcaaatcaccaacaattgtgtcatttaaacagccggaattcacgacaactttatatgcgtgtcttgatatagcaagatgtaatgcaaaaagatgtggcgttgcggcatattacaataacgattatcattatgagatatacataggcaatgatgataatggcaggtatatagggttttataaacatatacacgatatgggtgttgagcttgaaagaattcccattaataatgaagatatgaattcaaagcttttgataaaaatagatacagacagggaaaagtatacattttcttatgcaatagctgacactgctaatcttggtgcaagggtggcatacaggcagataggttcaggacttaatgcaggacttagcacggagggtacgcggacaatgacatttacgggtacattgttctcgttatttgcggaaaatggagatggtgtatttaacataggggtaaagcttttaatcaatccagatgagaattatacattataatataattatatgagctgaggttttggaggattgagtgaattgtgtagcaatgtatcaatccagatataagggtgtgataaaagtatcttttgcttctgggataattatgtctgtagattaatgtatacagaaatgagggtaattatgggagataataactggtcatattcaaaaatatataaagaaattataccatatgaggaatatggtatgtatgatgttgcgtggcacgatggtatgtcagcggcagatggccacataggtgtaattacatcgtgtgcacctttaaatgacagctttatattccagaatgttgagtatattatgccgtcagaagagccaagatatgtgcctttagaggttgaaggacagctggatgaggcaaggcagtcagttattaatatggacgatacctgggatatacacaacagaaaacgtaccaatatgtattgtcatcatccaggacaccagctcagggtggaattatgcaggagtgctgatataacagatactaacgcattaatatcagaagctgcaaaacaccctcatatggcacgaaatgatgatataaatattacggattatgaacgatatacagattttaacaggtctgagattgttgttaaatataaggcagatggaagaactataactaaaagaacttttgcatccttgactgatgatgttgttattacagagattacaggagcgaaggattttatcgttaatatttcagttgatgattttgaggcaatgcataagtttggtatggataagaataaacaggcaacctcagagagaggaatgaagtattcgcgttttgttaaagatgatatagttggtgttgtggcacattatccttcatttgagggaagtgagcttgcaaatggagggtttgcaggtgcaaccagatttattacagatggtatagtcaatatgatagaattgaataaatcagacaaggcatatacctgtatagataatatagaaccaattattcaattgaataaatcgaacaagattattcttataacatatcttgattggacagataagcttggcaggcttgaagatttccagtcagaatgtgagagtggcagtatatttgatacagagattattagaaaatgttttgcaaaggtaaatgatagtttaggcacagctgataaagtgttttttaataataaagaaattttctatgatgctgcaatcaaagaacatagtattaaaagtgctgaaagatataaccgggtatcattacatttatacgataatactgattgtatatctaataaaaatgataaagaaaagaaatattatgataatgtctctaaagttgatgagaatagtaaatgcacaatagctgataatgaagataggtacaatatatataatatggtagctaatgaggagcttctagataagcagaaagaagttccagatattcttattccgcttcttgaaagaatatataataatgcaagatatgggcttatgtcaggggctggctatacagcaccaaggcttaatggaccaggtgttggagagtggaatctgatgtggcgtaatgcgtataccatggatgctaatgttaatattcaggtatcgggaattaacagcggcaatatgtatgaagctggcgttgggtatatttggttcgtattaagacagcttaaagactgggagattaatgcagaaaaggtatatggaatgaaaaatgccctgttagcacctatcaatactgacggacagagggcaatgatggttgagtatgacattaactatccgttccagtattggaatacgggtgcaagctggatgatacttcctatagcagaatgggttgactgctatggtgatgtgtcaattacaacaactgatcaaaagataataaagcagtataatcaggctgtctttaatgtaaagaaggatattcttatgccgcttcttcaaaaaacttataatttctgggagcagctttgcacacctgagtacttcacagatattgagggcaatgcaagatatgaaaagggtaagacacatttgtttactggtgagaagtatcttataattccgtcattttcaccagagaataagccgcttggctataagagtgcaataacagccaatgcttcaatggatatagctgctgccaaagatattatagctatgtatattgatatggaaaatgaacttcagaatgaaggatacaaggaaagaattaagaaggctgaaaagttaaataatgagcttccggattatcaatatgatgaaagcggtgcaataagagagtgggctatgaaagagtatcaggaaaataatgcccacaggcatataagccacctttattgtgcatggccggcatatcagacacagcataataataagcttgccaacgcctgccgacaggctatattaaaccgtaataaggagaattccggaaaagatgacacggcatcacacggctggattcataaggcacttgttgaggcaaggcttaagaattcagaggaagtgtataatatattaaatatgcttgtgcatagcgatatattttattcaacattatttaccgaccataatacgaacagggctaagggtgtcgcctgcacagatacattatatggaataactggaattattaatgaaatgctagtgtattcggataagaacacggtagaactgcttcctgcattaagcagtaatataccagcaggaaatataagcggacttttaacacgtgctggtgtgagagttgattatttaagctgggatgttgataagagaaatgtaaaagcagacttaactgcattacgggatacaagctttaatcttgtgcttaataataaggcgtatattggtgaggaaaatgaaagtaaatgcgttgcagttcagttaaaaaagggtgaaaggtattgctttatgggttgatagtgaaaatgcggaaacaccgatatagtagagtgtttccgcattttttattttatttgaacttgaatgtattctcaagtgtctcccacttggtatctttctcgctgaaattaagtggggttccgtcttcaagcttgtatccagatgggtcagcactgcctggatatttgcctgtaacctgtggccattcaatgccaatgcttgggtcgttccacgcaagaccgccctcatcaccaggatgatagaagtcagttactttgtagcagaactcagcttcgtcacttaatacgaggaagccgtgtgcaaagccttcgcttatatagaactgcttcttgttctcttctgtaagttctacgccaaaccatttgccgtatgtcttagaacctgcacgaaggtcaacagcaacatcaaatacgcttcctttgattacacgtacaagctttccctgaggaaattctttctggaagtgtaagccacgaagaacacccttaacagagcgtgactggttatcctgaacaaataccatatcaagaccggcttcgtgcatatcattctgattgtaagtttccataaaatatccgcggttatcgccgtgaacagtaggttctattatataaagtccttcaatatcgcaaggagttactttaatctgtcccatagttattacctttctttgattaatctaaaaatactgccacctgacagataaaaataaattgtcaggttgtatataaaaatatattaattatcggttagaatacattttctcatagtagttctggtattcgcctgagatgatagtttcccaccattccttgttgtcaagataccactggattgtcttctttatgccgtcttcaaacttagtttctggtaaccagccaagttcgttgtggattttagaagggtcgatagcataacgcatatcgtgtcccttacggtcgccaacgtgaacgataagtgattctggcttgccaagttctttacagataagcttaacgatgtcaatatttctcttttcattatgtccaccgacattgtatacttcaccgacacgtcctttgtgaatgataaggtcaatagccttgcagtggtcttcaacataaagccagtcacggacattaagaccttcaccatatacaggaagtggcttatcattaagagcattggcaatcataagaggaataagcttttctgggaagtggtatggtccgtagttgttagaacatctgcttatagttacaggaagtccataagttctgtggtaagctaatactaaaaggtcagcaccagcttttgatgagctgtatgggcttgatgtatgtataggtgtttcctctgtgaagaaaaggtcaggtctgtcaagtggaaggtcaccatatacttcatcagtagatacctgatgataacgcttaattccgtactttctgcacgcatccataagaacagcagtacctttgatgttagtgtcaaggaatacttccgggttctcgatagaacggtcaacgtgtgactcggcggcaaagtttacaaccatatctgggtgttcttcttcaaaaagcttgtatacagcttctctgtcagtaatactttccttaacaaatctgaagttaggattatccattacaggagcaagtgttgagagattgcctgcgtatgtaaggcagtcaagacagataattctgtaatctggatatttctttaacatatggaaaatgaagttgcttccgataaatccggcaccgccggtaacaataatattcatatataatcctcgtttctgtgcacatattaataattaaaatggtgcagtgtgcgctacacaccaaatgataatatattctagctatgaagtacgtcaatatatttgccgtcaagcacatcttttaaatactgtccgtactggtttttctttaagacttcataagtcttaagtacgtcctctttagttatccagccgttaagataagctatctcttcaaggcaggctattttacggtgctgatgtgtttcaattgtcttaacgaagttagtagcttcaacaaggctttcgtgagtaccagtgtcaagccaggtaaagccctgacctaaaagttctacattgaggttgttgttctcaagatatatacggttaaggtctgttatttcaagctcacctcttgcagatggctttaaattcttcgcatactctacaaccttgttatcatagaagtaaagacctgttacacagtaattgctcttaggcttagctggcttttcttctatagatatagccttgccggcttcgttaaactctacaataccaaatctttcagggtcatcaacgtagtaaccaaatactgtagcacctatgccttcttcagcgtttttaacagcatttttaagacgttccttaagtccgttgccagcgaatatgttatcgccaagaaccatagcaacagtgtcatcaccgatgaattcctcaccgataatgaaagcctgtgcaagtccgtcaggtgatggttgtacagcataagaaagattaacaccgaactggcttccgtcaccgagaagctctttgaatctaggtgtatcctgtcgagtagatattataagaatatcacgaattccagcagtcataagaactgacataggataatatatcataggcttatcgtatataggaagaagctgtttacttgttaccattgtgagtggataaaggcgtgtgccagaaccaccagcgagaataatacctttcatagtcattcctcttttcttaataaatagtgtgttttaaataaattaatacctgtttagcagattagtgcttactaagcagattatagtttatttagtaaattgatatttgctttttgttttgatatatatataataaaaggtgacgtaacgttatcttcaagtattttttgtgatacaagaagaaattttatcattatttatgatttttatggtttcaaacagatcttcaaataggattttaatagtccttaaaatataatttcaaataagctttcaaataggatttgcaataagtttttaaacagaatttcaggtatgattacagtaaaatataccataaagaaaagaggaagttatgcataaagaaggttattattcttctggtgagtttgccaagaaagcaaatgtcacagtaagaactataagatattatgataaacagaatattttaaagccgtcacttcttacagaggacggagtaaggttttatacggattcagattttacgaggctgcagcagatactgttgtttaagtatcttgggttttcgcttgaggatataagaaatatgactatcggtgattcagattataacatccttcttaattcgcttaatttgcagtttaagcttattcaggacaaaatagcacagatggagcttgtaaagaatgcgattgaagacacgatagatacatttaaaaataacaaatcagtggattggagcaatatgctttcgcttatccaccttactaatatggaaagcactttaaagacacagtatcttaatgctggaaatataaccgcaagaattaatcttcatgcagaatattcagttaataagcagggttggtttaactggatatatgaacagagcaatatacagaccggacagcgtattctggagataggctgtggtgatggaagactgtgggttgataataagaataatgtaagagaactttcagggctacaggtgttcttaagcgatatatccgatggtatggtgaatgatgcaagaagaaatatagaagcggaatatgctaacgagaatggggcggatagtactgcacataagacaggacagtctgtatcatttaagtttaatacatttgactgtgcggatattccttataggaataattatttcgatatagttcttgctaatcatgtattattttactgtgataatatagaaagcgttctaaaagaagtgaaaagagtgttaaaaccgggtggagtatttatatgtgcaacttatggggcttcgcacatgaaagagattagtgatcttgtaacagagtttgataaaagaattgttcttgctgcggataatctgtatgataaattcgggctggataatggaggggatatattgattaagcattttaataatgtagatgtcagaaaatacaatgatcacctgttagttgataaagcagagccgcttattgaatatattctttcctgccacggcaaccagaaccagtatcttcttgacagatattccgattttaaagcatttataagaaataagcttgcaaggaagccttttaagattactaaagatgcaggattatttatatgtaaagatatatggtaattatattaataatgtggtaaaattatacagctattgcaatttacgcgattaaatatctatcataatgggaatgttatttataacagtataatgataggcagattattaaattatagaagaatagaggtatacaatggcgttatccaaattatttttaaatgcaggtgaagcgttaaggccagttcttgtaaaagtgcttccgatgaaactgctaagtaagctgaaggcgggaattattaataatgcaacagaaaagctgtcggcagatactatagaaaagtatgcaccgggacgatacaaggaaggtgctaatataataggcaatataaagggggataatggattaggacagagtgcacgtattatgtgcagtctgcttgatgagaataatgagccacacgttataagggatttctttgttccaccgggaggctcaagaaccaatgatatgtatgacagcaggcttacaacacagcttccatatgatgttaacataatacatgttaatgcaagtgagtttatggtagcatatttaagccttggcaaagatgtatgggattacagatataatataggttactgggcgtgggaattagagacatttccagaggaatggcttccggcatttaagcttgtcgatgaagtgtggacaccatcggattttgttactaatacacttaagaaatatactgacaagcctgtggttacggttccacattgtatagaacctgttgcaagtgcacagtatggcaggaagcattttaatcttccagaagacaagttcctgtttttaataatgtttaatagtggaagtgttatggaaagaaagaatccattggcagctattaaagcatttaagcaggcattcctgaaagatgaagcaactaagaacaagtataaggatgtaggtcttgtaattaagataagtgagtcagagctttcagcagacgatgagaagattataagctctattgtagataaagaagataatatttactttatgtgtggacagattaataagacagaagttaattctcttcttaaagacgtagatgtatatgtatcacttcaccgctcagagggcttcgggcttgtaatggcggaggctatgtatcttggaacacctgttatagcaacggcatggtctggtaatacagagtttatgaatgatgatactgcgtgtatggttggatacgatatgatagaacttgataaggactatgatgtattcaagaagggcaatgtgtgggcagatgcacacattgatgaagctgctgattatatggtaagactctatgaagacaaagagtattacaacaccaaggcaggtaatggacaggcatatgccagagaacatcttgcatacaagcgttcagcggatattgtgagtgagcgtttaagacagattcattcaaagtcttaaggctttttaactattcgtttgacaaagaaaatgtttgttattataatatgcaggatttagatatagaggagaaatttctgatgcaacatattaaagaattatatgaatatagggaaatgattataagtcttgtaagaaaagacttaagaggaagatataagggttcggttcttggatttctttggacattcgtcaaccctttattacagcttatcgtgtatacaattgtgttctcaataattatgagggcaagctatgaacagtattatttgttccttttcgtggcacttgtgccttggatgttcttttcatcaagtgtaactgatggtgcggcaagtatattaaaagagaaggatatggttaaaaagatatacttcccaagagaggttcttccaatatcaacagttacaagtgcatttgttaatatgatacttacattcgttgttgtatttatagttgttattgtatctggaagaggtattaatccacttgcattattatgccttcctgttgttatggttgtagagtatgtactttgtcttggtattgcacttatagtatcatcacttacagtatatctcagggatttacagtatattcttggaatatttgttatggcactccagtatatgacaccggtaatgtatggcgttgatatggtagagaattctggtgctggtgactggcttattttaatatttaacttaaatcctatgacacctattattaaaatatacagacagattatttattatggagaagttccagaacttggttcgctggctcttgcattaataataggtattgtatttatagttgtcggagaagttctgtttaagaagcttcagagaggttttgcagaagaattctaattagaatagtatagacaattagatatataagcagaaatgaggattatgatggataaagataatgcaattgaagtaaaaaatataactaaagattttaaagtatattatgataaaggaagcgaacttaaggaaaaaatgcttttctggaagcgcaacagatatgagaaaagacatgttcttaatggtataagctttaatgttaagagaggtgaggctataggtttagtaggtaagaatggctgtggtaaaagtacaacacttaaaatgcttactaagattatataccctgactcaggaacaattgagatgcgtggaagagtatcaagccttatagagcttggagcaggttttcacccggatatgagcggaagagagaatatatatactaatgcttctatattcggacttaccaagaaagagatagatgcaagacttgatgatattatagcattttcagaacttgaagatttcatagataatccagtaagaacttattcttcaggaatgtatatgcgacttgcttttgcagttgctatcaatgtagatgctgatattcttcttattgatgaaatccttgccgttggtgatgctaactatcaggcaaaatgtttcaataagctaagagagattaaggctgagggaacaactatcgttattgtatctcattcattaggtcagattgagcagatatgtgaccgttctatatggataaaaaatggtcttatagaagcggaaggaactccaaaagatgtccatcttaaatatcttgactatatgaatcaggagagaatggaacaggctgagaaagagcagctacgtcaggcaaagcttgaacgtgagcagatggagaagaagaaagaagaagaacgtatcaagaaagagcgtgcgaaggttaattcaagatacggaagtgaagacgcaagatttacagatattcatatgtataatgaggctggcgaggagagcagaatattcaagacaggagagaaagttatacttgatcttggttatcacgttgataataaagttactgatgcagtatttggatttggtatattcagaaatgatgctctctggtgctatggtactaatacaagaatagacagaatagagaattttgacattgataaagacggaagatataaggtagaacttgaagatcttaatcttatacctggtaattactgggtagatataactattgaatatggagagggtatacctgttgattattataagcaggctcttaagtttgaggttgtatctaatataacagatgttggcgttacaagaattccacacaagtgggaattacacatttaagatgaggagataagaataattatgaaaagggcagtgccatggataagagtggctggatttattgttgggcttgttgtactggtagcaatatttgattacgcgtttgcacagacaggatatgtaagatatgtgcttacatatttccagaattcagatgaggatatagatacacttgtattaggtgcatcgcatgcaagaagtgcaattgacccgcagaagatagatgatcttaacgacacgaattcattcagtcttgcaatacctggtgagatggtaaaggattcttattatgtgttacaggaagcgtgccgcagtaagaagattaagacacttatatttgatgtggattaccagtattggatggaacctcaggcagaaggatattttcaggaaccattcatatacaaccagcttagctggtcatcaccagtaaagtggaagtatatggcagagaatatgcttaatcttgatgttaggaatgcatttacgaagagaaatgtatatctttgtactccatcatcagtaaagactaatatttcacagaagcgttcgcaggaatataaggatgcggatatctactcaatagaggtaccagatgccaatggcccatatattggaaagggatttttctatcgtgaggtaagcggacttaagcctggtggtgatgcttatgttgatggctgggtaggcagagagaatgatggtctttcagaggtggctgtaaccaagttcaagcagataaagaagttctgtgatgataatggtattgagcttatatgtgttacatcaccaataacaccaagcgttatgcagaagcttggaatgggaactgttaatgatgtactttcacagttctttgaagaacagaatgtaccttattataattttaacaaagccagattatcagttcttgacagaagtgatcttgattatggagataaagaaggtcatatgggtggagaacttgcagaagaatattcagaagtattagcagaagtgttaaaaggacattttaacggaacattagatgaaacaaagtatttttataatacctttgatgagatgtataaagagatggaggaacaataaatgtcattcacaacagtagccttttttgtatttttattagctggaatagttgtttattatgttcttcccaagaatgtacagtggatatggcttcttatattaagttatatatattattttacatttagtattaaagcttctttatttatggtatttgcaactgtaactatatatttcggaggcatttggcttcaaaatatacagaatacaggtgacagatatttaaaagataataaagaaacactttcaagagaagataagaaggcttataaagaaagccttagaagaaagaaaagatgggtgttgttccttatacttcttttggactttggaatgttagcagttgtaaaatatagtaattttgcaatagagaatattaattccgtacttggacttatgggtaaagaaccaataggtcttcttggaatgggactgccacttggaatatcgttctttacattccagtctgtatcatatgcaattgatgtatatcagggaaagtatgagtgtgagaagaacatatttaagatgggattattcgtatcattcttcccacagcttttacagggtccaattggaagatatgacagattaggaaagcagctttacagtggacacagcttcaatttaaagaatgtagaatatggacttcaaagaatcggctggggactttttaagaaggttgttattgcagacagggcggcagtgctagttcttaatgtatttaataattatgaggcatacagcggatttcattatattatggcagtgcttatgtactctgtagatttatatatggatttctctggtggaatagatatagttatcggtgctgcacagatgtttggaattacaatggatgagaatttcaggcagccatatttctctaagtcaataggtgaattctggagaagatggcatattacacttggtacatggatgaaggattacatattctatccgatgtcactttctaagaagatgaataagttcggaaagtggggaaagaagcactttggcaatacatttggaagaacacttcctatatgctttgctaatatagtaatattctttatcgtaggtatatggcacggagcagcctggaaatatattgcatatggactttacaatggctttattattgcaataagcaatcttttagagcctgtatacaagaagcttcttaataagtttcatattaatgcaacaagcaggggctggactttatggcagattataagaacatttatacttgttaatataggctggtactttgatatggctgacagtgtaagtcaggctttatgtatgataagatggtcaattcagggatttagcctttcacagtttaacagctcactattagaccttggaatagaagcaagagattatataattataatcgctggctgtattatagtatttattataagtgtacttaaagaaaaaggtatagctataagagagagcatagcggccaagccattagcggtaaggtgggctgcttattatgcgttgatagctgttatattaatatttggatatataggcgcaacacagggctttatatatgctaatttctagcttgtaaatgtaagtggtgtatcagatacacagaaatgaggagtatatgtcagaacagattaatgtagaatcaattatgaaagagattaagaaagagattgaagttaagggttatactaatgacttattaagctttgatgatgttattgttgatgttggttcaatgaatgttaataagtttgataaagtaaaattcaatgaggatatatatgttgccaaccacgaatgggaagttaatccatacagaccattacagggtggaaaagtaacagtattctttaaaaaggcaataagaaagcttgtatatttctttgtagaacctatcgttatggctcaggatggatttaatgcttcaattgtccgtttgatgaaccagatgaactgttatatagaagaaaaagataaagagatagctgaacttaagaaagagatagaagaattaaagggcggaaagtaaaatgcgtatttttcagttattatctactattgcttatggcgatgctgttagtaatgatacagtagctatggaaaaggcaatcaagcagatgggatatcagacaagaatatatgccgaaagcatagtaccaccacttgataaaaagacagcacttgcaatttcagaattaaaagatgtatcgaatgatgatattataatattccatatgtcaacaggaagccgtctgaattttgatgtggctaagtatccttgccgtaaaattgtagtgtatcataacataacaccaccagaatacttcaagaataatgatgaaagattcagtgatatatgtgagtatggtcttaaaggtgctaagtcattagctgataaggtcgattattgtcttgctgtttcagaattcaacaaaaaggatctgcttaatatgggttataaatgccctattgatgtacttccaattattataccaatgtctgattatgataaagcaccagacaaatcagttgtaaagaaatattctgatgactatgtgaatatattatttacaggacgtattgcacctaataagaagcaggaaaatcttatatcagcattttattattacaacaggctgtataataagaagtcacgtcttatactggctggttcgttcagatatgatgatccatattatataaggcttacagaatatactaagaagcttggtatgggtggaacagttatatttacaggacatataaagtttgaccagatacttgcttattataagaccgcagatgtatttctatgtatgagtgagcatgaaggcttctgcgttccgattgttgaggcaatgaagttcaaagttccaataattgcttatggcagggctgctgtgcctgaaactatgaaccacaagggtatgatattagatgataataatccacagtatgtagctgcctgcattgacaagatggttaaagataagaagttaagggattatgttatagaagaacaaaatgaaagacttgaatattatagctatgataatatatctgcaatgttcaaggagtatttgtcaaagtttattgataagaaggattgagcattatgaagaaaattggatttgtagttccatggtatcataaggatatacgagggggagcagaacaggaattaagaggaattgtgacccacttgaaagccaataatgttgatttggaaataataacaacctgtgtaaaagagtttactgctgactggactgagaattatttcaaggaaggtgtagagatagttgatggaattccaataagaagattcaaagtaagaaaaggcaatatgaaagaatttcatagaattaatgccaaggttatgcagggaaagacaatatcctatgatgaagaagatatattcataagggaaatggtcaatagtcctgatatgtatgattatctcagggagcatagtgaggaatatcatagatatgtgtttattccatatatgtttggtacaacttattatgggatactggcgtgtccatttaagtcaattcttattccgtgcctgcacgatgaggcatacgcttatttcagacattatagagagacattcagggatttaagaggaattatattccacgcaagaccggagatggaacttgccaataaagtgcttgatttaagaaatgttaatcaggtgcttttaggagaaggcgtagaaacagattttgaatataatgctgacaggttcagaaagaaatacaatattaatgaaccatatataatatatgcaggacgtaaagatgaagccaagaatatatatacacttataaaatattttggcgaatttacaagaagaaatcctgataagaacttaaagcttgtcttaataggcggaggagatattaatattccagagaatattaaagataaggtagttgacctgggatttcttgatatacaggataaatatgatgcctgtgcaggttcggtatgtctgtgccagccgtcaaagaatgaaagcttctctattgtaataatggaaagctggctgtgtgaaagaccagttcttgttaatgcggcttgcaatgtaacagctaatttcgctaaagagtctaattcaggattatattttaatgattattttgaatttgaaggatgtgttaattattatatggacaatcctgtaattgctgagactatgggtaagacaggacgtcagtttgtattagataatttcaaatgggatgtaattgttaagagatttcttgatttttttgaaagttagaaacggagataaatatgaaaaagatagctattataaatcaaagatacggattagaggttaatggcggttctgaactttattcaagacagattgctgaaagacttaaggctaagtatgaagtagaagttcttacttcctgtgctgttgaatatgttaaatggcagaattattacaaggaaggtgttgaggatattaatggtgtaactgtaagaagatttaagacagtacacgaaagaattcctaagatattctcagcacttgattctgaaatgctttctaatcctgatgcgggcgaagaattatcagacagatggatagagcatatgggaccatattgtccagaacttgtagaatatgttgatgaacatcaggatgaatatgaggcaattattgttgtaacttatctttactatacagcggttaagagtattgtaagaattaagaataaggcaatatttattcctacagcacatcaggaaccatttatacattttgatatgtataaaaaggtattcggggctgcggatgcgttcgtattccttacagacgaggaaaaggatctggtacactcaatattccataatgaagatgttccatacgaagtatgcggtgttggtgtagatgttccaacaactgttgacgctgatagatttaagaagaaatataaccttgataattatgttatatatgtaggacgtattgatgaaggtaaagattgtccaagactttttaattattttatggaatataaaaagcgtaataagaataatcttaagcttgtgcttatgggcaaggcggtatgtgagatacctaagcaccctgatattataagtcttggtttcgttactgatgaggataaatttgacggaataagcggtgctaaggcacttatacttccatctaagttcgagagtctttcaatttcagtattagaagctatgacattatcaaagccagttatagttaatggtatatgtgatgtgttaaagggccactgcgttaagagtaatggtggtctttattacaagaatttctttgaattcgaaggctgtgttaattatctgcttgaacatacagatgtatatgagattatgtgtaagaatgcacgaaagtatgttgaagattacttccagtgggaagatattatgaagaagtttgatgacataattaagcttgtgggagagaagaatgaagcagaaaataagtaatcatatgaagaataactggcaggaatatgcaagtgttatacttatgctgtttattataacagtggcaatgatttataagtttaatctatttaattttgatataacatatccaatagcatattcaggcggagatgaccttagtatgcttgtagatgccaagatgttctcagaacagggctggattatgacaacggacaggctgggtgcaccaaatggaacacagatgtatgatttctcagctaactatctgcataatgccggaatggttataatgaaaatatttgtattccttgctggcggtaatgctgttgtaggatttaatcttacatatttaagcatatttatatttgcaggaattgtgtcatatatcgtaatgagacagattggaattaactgctggatttcagcattgacatcagcagtatatggaatgtcaccatttatgcttgcaagaggtgtgggacatatggtgcttgcagaggcttattttgtgcctttatcatttcttttatgcttttatattcttgaaagagaagaagtgtttaagtttgataagcagttctttaaaagaccaatcaattatgttgtaattgtaattgcactgcttattgctaataatggaataggttattatccatatttcacctgctttatacttcttgtaacaggtgtatgcaagtggttaaagaataagaagccggaagggtttgtcagagcactttcaatatgtgtagttattgcagtattctttattctttgtatggtgccagccaagatatacaatttacagcacggtgctaatcaggatgctgtatcaagagctggatttattgaaacagagatgtatggcttaaagctcattatgctttttatgcctagaaatgcacacggcataggcataatacagaaggctattgatatgtatgacagcaatactacatatcttaatgaaaatgttacagaataccttggaattgttgcaattattggtttcttcatacttatgttcactctgtttatgaacagggacagtgcattaaagaagagattaggagcactttctgagattaatattatgcttgtgcttcttggtacaacaagcggacttggaactatgatagcatttctgatcacagataagataagaggctataacagaatttcgatatttattgaatatgtatgtatattggcggtggctatgcttatgggagctattgttgataagcttaaagctgataaacgcacagcttcaattattgtaacagcagtgacaggacttgtatgtgtgtttagtatatgggaaggctgcggtggcaagacaccaacagaaacctataaggcaatacaggctgaatatgcaagtgatgataagctggtgtcttacattgaaagttcagttgatgatggctctatgatttatcagcttccatatcataaatatccggagggtgagtcacagaatgatatgtgggattatcatcttttcgttggttatcttcattcagacacacttaaatggagctatggttctgttaagggaagagaaggcgatagctggaatgaagaaatcggaagcctgaaagccgatgatatggttaaggctttaaaggaagcgggttttgctggaatatatattgacagaagagcgtaccttgcagaacagatagaacagttagaaagtgatttgacagaagcaacaggaacaaagccggttataagtgataatggctgtcttagcttctataagttttagatgacatagctctggatagaattaaaaatggtttagtgatgataataatgaagctatgatttatattgctcatatgtgtatgtggttcacgtctgcgaaatagaagatataagcgatacgattttgggcgacacagagaatccggtagaattatatattgacgatatacgaatatttgtaaagtataagaataattataaaatgattaatagaatggagattagagtatgagaatacgtttagctgattatgttgcagattttcttgtaagccacggtgttacagatgtgttttctgtagtaggtggaggagctatgcaccttaatgatgcacttggacacaatgaagggcttaaggtaacttataatcatcacgaacaggcttgtgctatggcggctgaaagctatgcgagaattgataacagaattgcagcagtatgtgttacaactggaccgggtggaactaatgcacttacaggtgtagttggcggctggcttgattcaataccgatgtttataataagcggacaggtaagatatgatacaacagcaaggtatgccttatcgtatactgaaactccgttaagagctatgggtgatcaggaatatgatatagtaaagtcagtatctaatatgactaaatatgcaactatgattgaagaccctaaggatataagatatgctcttgagaaggcatggcaccttgctacaacaggaagaccaggtcctgtatggatagatattccggttaattatcagggtggatatattgaaacagatgaattaaggggttatgatccagaggaagatgataagctgcttccaccgcctgttgaggatagcgttgtcaaggctgttcttgaaaagattaagaatgcgaaaagaccagtatttcacgcaggttatggaataagactttcgggtgcatatgatgtgttccgttcagttgccaagaagcttaatattcctatcgtgacatattggaatgcagttgaccttattgaagatgataatcctctttattgtggaagagctggtaatatgggtgacagaccaggtaactgggctatacagaattctgaccttatattagcagtaggaacaagaatatcaatccgccagacaggatataactggaagacctgggcgagagccgcagaagtaataatggtagacatagataaagctgagttaaagaagccaactatccacgttgaaatgccagtatgggcagatgcaaaggatttccttacaaagcttgataaatacgcttcagatatagcacctgtattcagaggagatgagtggtgcagtacaacattgaagtggaaaaaggaatatcctgttgtacagccaaagcaatgggaggaaaatggaagtacagctaatgtatacgcatttattaaatacttaagcagccagcttccagagaacagccttacagcagtatctaatggggcgtgctgtgttgtaggtaatcagacttatgtcattaaaaaaggcagcagaatggctaacaacagtgctgttgccagtatgggatacggacttccagcagctattggtacttgtatcggtggcggcagaagaactactatatgccttgagggtgacggcagtattatgatgaatttgcaggaactccagacaataattactaacaagcttccaattaaagtattcctcattaataacaatggttatcattcaataagacttacacagaataatctgtttaaagagcattgcaaaataggaattggtccagagtcaggagatttatctttccctgaattcaagaagattgctgaagcatttggttatgattattacagtgcttcatctaacaaagagatgatggaaacagttgataaggtattagaggcagatggtcctgtattctgtgaaatatttacagataccaagcaggtatgggaaccaaagagcagtactaagagattagaggacggaacacttgtaagtcctccacttgaggatttagctccatttttatcaagagaagaacttaaagatattatgttcataccattattggatgaagaataaatcagccagtgaaattatggacataaaatagctgtttagaataataatcagtaataaagaattaataatagagagttaataataatgaatagtgagaataatttaataagaaaaatattcagcataggcatagcatatcttgttgcattagctggcattgagctgtatgtatataagatagagggcaatcctgtatacagtggaaagattacatcaaatataattccatatgctgtatttcttcttgtgttctgcctgctggtatgtattattatgaacattccggcagtaaagaacagattaaagttatcaggcagtaataataaagtgtacagtgttatatcagctcttattatattagttgtatttggcatacttataggctgttatcttaatgaggttaatctgtttgacggaccggcagcagatgattacctgtatcacgctaatgaaaagattactgtgattgcattgacagctatatttataataatgattgctgttattaagaaagaaaatgcagtggtacaaccggttaagaataaggtgtatctgtatttatttgcggtagtagcagggcttatatatgcttattcattttatctgcctaatgtgtattcaacagattataatgtatatcattttgatgcgtattttaatacagtgtattcagcggttaatggtgttgcaagaagcggtcttaattcaggtgtgtatggatattatgcacttatattagccccaatattaaagcttattggtggtggtattaatacatttattatacttatggcagccttgtcagcattttcnnnnnnnnnnatatggcagctgcctatgtaataattgaacttgtaagtaacaatgcagtcagaataatggcggttactgcacttattgttgttaattgttcactgcatacaggagtttatttccagcttgtaccacatagaacattatttgcaggcataatactcgcttatttattctttggtgttaagagaaaatactgttataagcctgtatatataattattaatgtatgtctgcttatgatatcagtaatatggaactttgaaacaggtattgtatacactatagcagtagcagcatactatattattgataatgtcaaaaaatataatttcaaacaggcaggtctgtatacaaacacattgattgttgtattggcacttataggaacaatagcaggagcgtgggttattacaggaattatcaatgttcttatgggtggaagctttataagcattaagcagttcatattcccacttatgaattcagactattttgattatcttagatatgaataccagaaaggcattgttgcgtggcttataacagcattttttggactgttttttatagggaatgtcttctttaattctaatcttaatacaggtgataagaatattgacgacagcagatatgatgcctttatggcagttgttgcagttatggcacttgggcagatgacatattatattaaccgtacagcgtatggtaatcttacaattgttcattttacaacagtgattatgattgctgtatttgcagattattgtataaagaattaccagaagagcaaggcaggatatctttcgatactcttaaaaggctttgcggcattgtcagcagggatacttcttgctatgtgtgcggcaggagtatacaactattcatatgttgagggcggtaatgaactgtcagatatgagaaatacagaagtatataacagtgagatacagcatatagcggatgtatgtgctaaagacactaaggcgataggattttcaattcctatggtatattacgaacttggctgggatagtggatattattttatagactttgcagatttagatgtatatcctcagtcattggaatatttacagaatgaacttgataacattgatgagccgataattatggattataatgcacattatactttaactgataaaggtgttaatcttgataaattctatgaacgctttgaattatcagatgaatttacagtaggctcagcagtgcttgaatactgggttccagttaattaataatagaggttaaattattaattggttatgtccggttaaaatatttagttgtgtttataacattataataattataaaataccccttatatattgggtgtatgaccagaagataaaaatcttactggctgtatttccaatatataaggggattttattgatataagatttattccagctatttcctgttaatatgcacattctttaatatcaggctgtagccgtcttttttgaagcatttaattattaaatcagaagtatcatttacttcgatattatcaattgtagtttcgttatatgctgttgcagaagccttggcaataacactgtcatcagcaaggttacatatttcaaaataagtatctgaattattgtcatcagatgagtagtttattgtaacggaatatgttcctttttcaacaccaggaagtgtcatattcataatgttgccagaaacagtatcatcagcgacaagatagccattactgtcaagttcagcccatccaatatcaacgccttctgaatacataaaattaatatttttggtacagttattatcgaatgcagttaaatcaaaaggattgatttctgatacatatataagataatcaccgtaattattaacaaaagtatatttgttaactataaattcaggaagtgttgtcaaatcatcaagtgttgtgataagcacggttcttcctgtccactggctgttttcatcataataaagataatcgccccagcggttgcttctctgataagtatcatcagtaagtgttctgtatacaagattaagatccattattctgaaatttcttgcatctatctgcatttgcgcagaagttgtaccccatacatatgctataggaacatcaagagtatcgacttcttcaagaagaggaacaagagtatcggagtctatagtcttttcgtgatagagcctgaataatccaacgctttcacataagagcacgaatgatattgcaaatgtaatgagtgctttaaatatatgctcatcactgagcttattaatagcctttaagcatattacaatctgcataaggtatacaataataaggtagcggtattcaaaaaaatatccatcatataaagtataagagaatatgaatattgcgatattaactaatattattgtatatggaattatctctgtaaagtcgatatccttctgttttatttctttaataatgcgtttaacagatattaccataagaattaatatgaataatataaagcctatggataatatctggattattcccctgaatgagaaaaggcttgttgttgtttcaatagaaattccacacagtaattgcagatatcccattataagacttcctatgttgtgccagaattcatatatacctgttaataccatagagctttctttagactggaaaacaaatatatgacctgatatggctttgcaggcaaatgttaatacaagctgtgccatagtaaatataaagccatagtctttaagcacctttaaagaattcttatagataatcttaaagacatagtagaacacacaaggaactaatattgtaatagcaacatatattccacttgaaattgctgtaagcatagagaaaagtgttgcaaatacaattgatatatataatttgatattgttgtgcgatacattttctgagccagcctgtaaagctttattattacggtgttctaactgtacgacaacccataataaaagaagcatagttattatctttacgctgtaagagccctgctcgccaagaaccattgcaaaataagaaaggttgttatctatgaaatggtctggtgtcataaatggacataaaaggaagataaatccaagagcaatctcaaaagcggataatttgaattcctttaataggttatagaatataacagctattacaacatcaagtataatattggcgattccaaatccgagaaagatatttcctgtaatgccgtagaaaagtgcggcaagcggagtcggtgaatcaagaccaagagtagttgtcagtgcaaaggttgatggaactaaagatttacatctccatatttcaacagcctgcagataagctgatgaagcatcaaatccaaggtgatgttcaagttcaaataagttactgtaaataattattgcagactgtacaacaataacgaacagcataaaaataaaaaggatacccttaggtgttattttattatcctttttgaactggttaattaagttatatgacatacattatctcctattatttatagaatataaaagctttaatgccagttggcgttgctggaaagctaatgatttattatataatatcatatagaaaatgtctaataaaacagatacatattgttgaataataaagtccagtttgataaaattattataaatataattaattaagggaatagtgaactgattaaagatagacttggcagtgtgtgcaggcgttaaagagcaaaatccagataaggggcttatgacacaagaaagaactgcccaatgggagaatgataaagagtttattggaaggatagagagccagcttacagaaaagcttggcatttcaccaattgtaagtaatgatggcacattaagtttctacaagttaagataatgttatgcaaagaccataattcagtgaatataaagccaggaaaaattgacaaatagggtctgttgggatataattttaaagcttatagaaaggcgtagtgtgcctatattgaaacgttaaatattcagttatttaagaaatgaggtatatcatgaaaaaaacagcattgataatggcaggtggaaaaggcgagagattttggccaaggagtagagtgaaccttccaaagcagttcttgtcattaacagatgacggtaagacgatgattcagcttacggtggaaagaataagtccattagttgacattaaagatgtatatattgcaacaaatgctaattatagagagcttgttaaagaacagcttccaggtattccagaagagaatattctctgtgaaccaataggaagaaatacagcaccttgtataggtcttggagcggtacacgttgcatctaaatatgatgatgcagttatgatagttcttccatcagatcatcttattaagcataatgatatatttaaagatacatttgttaatgcctgtgaggttgctgagagcggagctaatcttgtaacagtaggtattacacctaattatccagagacgggctatggctatatcaaatataataaggataacaaggaaggtgtgagctattcagttgaaaagtttgttgaaaagccagaccttgaaacagccaagtcatatcttgaagatggttcttatctttggaattcaggtatgttcgtatggaaggtttcaacaatacttgactgttttaagagctttatgccatcaacatatgatggacttatgaagattaaggcttctgttggaacagctgattatcaggctacacttgagaaagagttccctgaccttgaatcacagtcagtagattatggaattatggaaaaggctgatgatatatatacattagctggtaattttggctgggatgatgttggctcttggcttgcagtcggtagaattaaagagaacaatgaagatggcaatgttgtcaacggcaatgttgttactgttaatacaaagaactgtgtaattgaaggagcagacaagcttatagcaacagtaggcttaagagatatgattgttgttgatactaaagatgcgacacttatttcaactaaagagaatgctggagagataaagaaagtccttgcaagtttaagagaagcaggaaagaatgaatatttataaaatatgcagactaaattaaagaatggagtagaattatgaaaaatgcattaattacaggtattacaggacaggacggctcttatttagcagaacttcttcttgaaaaaggctataacgtatatggccttatgagaagaaagagtgtcgttgattacggtaatgtagaccatattaaggataagatacattttatatatgcagatatgcaggatatcgtatcattaatatcagctatgagaatatcacaggcagatgaggtatataatcttgctgcacagtcttttgtagctacatcatgggatacaccttgtacaacagcagatattgatgctatcggtgtaactaacatgcttgaagctatcagaatagttaagccagagtgcagattttatcaggcatcaacatcagagatgttcggtaaggtacaggcaatccctcagacagaggatacacctttctatccaagaagcccatatggagttgctaagctttatggacattggataacaaagaactatagagaaagctacaacatgtatgcttgttcaggaattctttttaaccatgaatcagaaagaagaggaaaagagttcgttacaagaaaaattactaatgctgtagcacgtattaagttaggccttcaggatcatgttgaacttggtaatcttgatgcaaagagagactggggtcattcaaaggattatgtaagagctatgtggttacttttacagcaggaagagccagatgattatgtaatcgctactaatgagacaagaacagtaagagaatttgccaagacagcatttgctgcggcaggaattgaagttgagttcgagggcgaaggcgttaatgagatagcaaaggataaggcaacaggtaaggttgtacttaaggttaatccggacttcttcagaccagcagaggttgaacttcttattggtaacccagctaaggcagaagcaaagcttggctggaagagagagatttctttccaggaattagttgagagaatggttaagaatgaccttgaattagtaaagaaagaagcagaagctaataactaataaatgttaaatgttacgaggagtcagggcagagattctgtcctgacaatatttgattatcagaaatgaggtaatatatgaaagcattagtaattggcggaggcggttttgtcggtccatatcttgtaagacatcttactgatgattgtggatacgaggttacagttactaagacagagaaagaacagcttgttatggataatgcagatgttaagaatcttgatattcttgacattggacagatagtaggattgcttaaggctgaacagcctgattatatatttcatcttgctgcacagtcatcagttgcatattcgtggaagaatccaacgcttacaattgatgttaatataaaaggctgtgttaatcttcttgatgctgtaagacagcttgataaaaagccaagagtacttcttataggttcaggtgaagaatacggacatatcaaagagggtgaatgtccgattgttgaagataatacagttcgtccaggtaatatatatgccgctacaaaggcatgccagaatatgttgggaaagatatattctgatgcttatggccttgatataatgatggtaagggcatttaaccatataggtcctaaccagacacctatgtttgttgtagctgatttctgcaagcaggttgcagatattgagaaaggcagacaggagccagttatatatgttggtaatctaagtgccaagagagattttacagatgtaagagatgtagtaaaggcctatgcacttcttgttgaacacggcagacgtggagaaacatataatgtaggaactggacacgcaattgcaatcagtcagatacttgatgagatagtagcaatgtctgatacagccattgaggttaaggttgatgagaataagctacgccctgtagatgttccaattatagaacctgacatagacaagattaagagtgaagtcggctggcagccggttatttcattagagcagactcttagagaaacacttgagcattggagaagtgtggattgatgaaaaatataaaaggatattaaatatacttaaaaaagactggaggaacagtatgaaggttgtattattagctggtggtttcggaacaagaataagtgaagaaagccagtttaagccaaagccaatgattgagattggcggtaagccaattctttggcatattatgaaagaatatgaatattatggatttaatgaatttattatatgtgctggttataagcagtatgtaataaaggaatggttcgctgattatttccttcataatagtgatattacatttgactttactaaaggttctaatgatatgataatccacgaacagcattgtgagccttggaaggtaactgtagttgatacaggacttaatactatgacaggtggaagaattaagagagtacagaagtatgtaggtaatgaacctttccttatgacttatggtgatggcgtatgtgatgttgatatatcaaagcttgtagagttccataaggaacacggaaagattgctactcttacatcagttatgcttgaacagcagaagggcgttcttgatattggcggagataatgctgttaagtctttcagagagaagagtgttatggatggtgcaccaatcaatgctggttatatggtacttaatcctgaaatatttgattatattgaaggtgataacacagtatttgagaaagatccacttgagaagcttgctaaggaaggacaacttatgtcttatatgcacaatggcttctggcagtgtatggataacaagagagaaatggatatgcttgagaagtatcttagcacaggaacagctccttggaaaaaatggtaattattatcaggaagggataagatataaagatggatttaagtttttataaaggcaaaaaagttcttgttacaggacatacaggatttaagggttcttggctttgcagaattcttgtaaaagcaggagcagaggttacaggatattcacttgaagcacctacggatcctaatcttttttcaatggcagacgttgagaacaatattaattctgttataggtgatataagagatttagcacatttaaaggaagtgtttaaggaagtacagcctgagatagtattacatcttgctgcacagcctattgtaagggattcatataaagaccctgtatacacttatgaaactaatgttatgggtacagttaatatatgtgaatgtgtaagacttaacccttgtgttaaatcattccttaatgtaactactgataaggtataccataataatgaatgggcatggggttatagagaaaatgaaccacttgacggatatgatccatattctaacagtaaatcctgctcagagcttgttacacacagttatatcaattcattcttcaatgatatggatgtatctgtatcaacagcaagagctggtaatgtaatcggcggcggtgattttgccaatgacagaattgtgccagattgtgtaagagcagctattaagaaggaagatatagttgtacgtaacccacattcaacaagaccataccagcacgtattagaaccacttgcagcttatcttatgatagctatggaacagttcaaagataagaagtatgctgatttctataacgtaggtccagatgaaagcgattgtataacaacaggagttcttgtagacatattttgtaataaatggggcgaaggacttaaatgggttaacaagtatgacggaggtccacacgaggctaatttcttaaagcttgactgctctaagttaaagacaacatttggctggaaaccacgctggaactttgatacagctattgaaaagtcagttgaatggtcaaaggtatatgcggctaatggcgatgtagttaaatgtatggatatgcagatagacgaattctttgcagaataattaattatggaggataaataatgtttgataataagaatgaattagaagcaagagaagaaattcttgcaatggtagatgagtactgcaagaagtatcataaccagaaacagtacaaagagggagacagaatatcatacgcaagccgtgtgtatgacagcaaggaaatgatgaatcttgttgattcagcacttgaattctggcttacatcaggacgttatacagatgagtttgaaaagaagctcggtgaataccttaatgtaaagtatgtatcagttgtcaactcaggttcatcagctaaccttaacgcatttatggcacttacatcaccacttcttggtgagagaagaattaacagaggtgatgagattatcactgttgctgctggtttcccaactacagttactccagctatccagtatggtgcagttcctgtatttgtagacgttacaattccacagtacaatattgatgtaacaaagcttgaagaagcatattcagataagacaaaagctgttatgattgcacatacacttggtaatccatttgatttatcagcagttaaggaattctgtgataagcacaatctctggttagtagaagataactgtgatgcacttggttcaaaatatacaattaatggagaagagaagttcacaggtacaatcggtgatataggaacaagcagcttctatcctccacaccatatgacaatgggtgaaggtggtgccgtatatactaacaacccacttcttaacaagtgtatccgttcattcagagactggggacgtgactgcgtatgtccttctggtaaggataatctctgtggacacagatttgataagcagtatggcgagcttccattaggatatgaccataagtatgtatattcacattttggttataatctcaaggcaacagatatgcagacagcagtaggctgtgcacagcttgagaagttcccttcatttgttgagagaagaagacataactttgacagattaagagcagcacttgctgatattgaagataaggtaattcttccagttccttgtgataattcaagaccaagctggtttggtttccttattacagtaagagaaggtcttgacagaaaggcaatcgtagaatatatcgaaagccacggtgtccagacaagaaacctctttgctggtaaccttataaagcacccttgctttgatgagatgagagcaacaggagaaggctacagagtagtaggaactcttgacaacacagacagaattatgagagatacattctgggtaggtgtatatccaggaatgacagatgagatgattgattatatggctaagacaatcaaggaagctgttaatcagtaatttatggtcataaggaaagtacattaatatgggtaagacaatatacggttttattgaaaaaatttatatgttttttgttgagctgctttttaagattatcaaaaaggacttaacagacaagaaaagacagacattcaaggaattcttacagtttggattagtaggtgtgtctaatacaattatttcttatttactttatgttgtaacacttttgcttgtatctaagagcggtgtaaagtttgattatatcattgcgaacattgtttcctggttacttagtgttctttggtcattttactggaataacaagtttgtatttaagaaagaagaaggcgaaaaaagaaatatatgggcagcattatttaagacatatgtttcttatggatttacaggattgattcttaataatatattatcagtattgtgggtatcagttcttcatataagcaagatgttagcacctattattaatcttgttataagtattcctatcaacttctttatgaataagctttgggcatttggcaaaaagtaattaactaattatgatggaaggtaagtaacttgggtagaattcagctattagattgtacattacgagatggtggatatgttaatgactggaatttcggtcataataatttaataagtatatttgaaaggcttgtaaatgccagaattgatatagtagaagttggatttattgatgaaagaagaaagttcgacatcaatagaagtatccttcctgataccagaagctttgaagaagtatatggtaaatgtaaccataaagatactatggttgtaggtatgatagactacggtacttgtagtctgtctaaccttcagccttgtaatgagtccatattagatggaataagggtaatatttaaaaaagataagagaaaagaagctgttgaatactgtgccaaggtaaaagcacttggttataaggtatttgtacagcttgtttcaattacaagctataatgatgaagaattgcaggatttaataaagcttgctaatgatatagagccatatgcagtatcaatggttgacacatatggtctgttgcagaaggatagtcttttgcattatttttatatgcttgatgaggggttaaaggaaaatataagtcttggataccattcgcacaataatttccagagagcatttgctaattgtcaggaaatgcttctatgtaatacgaaaagagatgtacttgtagatgctacagtatatgggatggggaaaagtgcaggtaattgtccgatagagcttctggctatgcaccttaatgattattataataagaattatgatataagccagattttggaagccttgaactgtaatattatggatatttacagaactaagccttggggctataatatgttcttttatatggcggcatttaacagctgtcatccaagctatgtttcatatcttatggataaggaaaacttatcaataaggcagattaatgaaatattatctgaacttgctaagagtgaagataagcagcttatgtatgatgagcagtttataaagcagttatatgataattacaagaaaataattacagatatttcagatgaatcatataataatttaaagaaagatttatataatcagaatatcattataaaaagtgctggggttaatcaggatattatggttaagcctgatgtagatgacagcaaagtaacagtatcagatgataacagaatttataagggaacggtaatatgggttaacagtcttgctaaagatattacgatatcgtttgacagtctgactgataaaggcatagatgataaatcagaccagctggatgagtatgtatttatcagtgacagtaaaagctatgttaatctgtcagcacagttatcagacagaccagatacagtaaagattattacattaagtgatgttacgcctaataatggtgaccattttgattatgtatttgataaagaagaattcaagaatactactggctcagatgaagctggtgataattcattatatatattaaagttgattttaggaaaatgcggttttatcatataaatatcacaagaaaaaggaaataactatgggaaaatatgagatagcggtatttgatgtagacggaacacttcttgatacaacagaaggggttcttgcatcagtaaaatatacaatagataagatgggatttgagccattaagtgaggatgttttaaagacatttatcggaccaccaattcaggactcattcgctaaagcatataatcttagtggagatatattacaggacattgcaacctgttttagaaacagatataaggattatgagcttcttaaggcagttccatatgatggaatatatgaagtgtttgacaagcttatggaaagaaatgtaaagcttgcggtagcaacttataaaagacaggattatgctgaggcaattttaaagcattttggatttgataagtatactaatatattatatggtgctgaccataataataagttaaaaaaggttgatattattgagaaatgtatggttgacttaggagttactgattattctaatgcagttatgattggtgacagcagtcatgatgctatcggtgcagaaaagattggcatggatttcataggtgtaacttatggatttgatttcagggcaccagaagatgtatacaagttcaaggcagtaggagcggcggcaatgcctttagacctgcttaatttaatataaagatagaatattattaaaaggatggataaacattatgagaatgaaagttgcaaaatatatatcagaattctttgttaagcagggtgtaaccgatatgtttatgataactggtggagcagctatgcaccttaatgatgcatttggacatcaggaaggcttaaagattacttataatcaccacgaacaggcttgtacaattgctgcagaaggttatacaagacagacaggaaagattgctcctgtatgtgtaactggtggtcctggcggaactaatgcaattacaggtgtattcggtgcatatgttgattctattccaatgtttgttgttactggacaggctaaaagagagacaacagtatggtcaactaaccttccgcttcgtcagcttggtgatcaggaagttaatattacatcagcagtatctactatgactaagtatgccaagatgattacagatcctatgagtataagaaaagaagttgagaaggcttggtttcttatgcttaatggacgtccgggtccggtatggcttgatattcctggcgatgttgcctcaacatttattgaaacagacgatttagagggctttgacaagcagggttacattgatgaacactgggcatcatttaatcaggataatccggtatatgatgaacagtatactaaggatgtgcttgctaagattaaagaagctaaaagacctgtaatacttgccggaacagctataagacacgctggtcagcagagtgaattcattaaatgtattgataagcttggaattccagttgttacagcgtgggatgcacacgatattatatgggatgagcatccgttatattgtggaagacctggtactgtaggtacaagagcaggtaatttcatagttcagaacgcagatttacttattgtattaggctgtagaatgaatattcgtatgataggatataattttggcgattttggcaaaaatgcttataagatagttgtagatatagatgctgcagagcttaataagccaacagtgaaggttgattatcctgttcacgcagatttaagagatttcttcaagtctgttaatgaggcagaatatgagaagaatgacagccataaggaatgggttgactggtgcagacagttagataagaagtatccagcgacacttccagaatattatgaagataaagacggcttaaatccatatgtattcacaacaaagttatttgaggaattaaatgaagatgacagtgttgtgtgcagtaatggtgcggcgtgtgttataacatttcaggcggctgatattaagaagggtcagagattatatactaattcgggttgtgcggcaatgggttatggacttccagcagcagtaggagcaagcgtgtcagaaccagataagagaattatctgtgttgagggtgatggaagctttatgatgaatatgcaggagttacagactattgtatacaataatcttgatatcaagatattccttattaataataatggatatcattctatcagacagacacagactaatctgtttaagggacagccatatgtaggaattggtggaggatatggtcttagcacaccagacttctcaagagtaataccagcttttgatattccttattacagaatagacagacttgatggcattaatgaaactatagatgaagttattaaccataagggtcctgtattctgtgaggtagttgtagactggcaccagaattttgcaccaaagtcaagttcaaaggtacttccagacggaaagatagtatcagcggcagttgatgatatggcaccattccttgacagggaagaatatgaaagcaatcatcttgcataactgtaattgataatttataatcattcattgggacagcgtaaatatcagtaatgatagtcttgctgtcccatatcaggataaatatagaaaccagtatatagaaatggggattttaatgaaaagagcggtaattacaggacctacaggttctattggattagcactgattaatgaacttgtatctaacggagtagaggttgttgctgttgtaagacctggttcaagacgtgcagacagaattaagacaagtgatatggtaaagcgtgttgactgcgatttgtcagagcttaataaactgccagagcttattcgagagggagctgatgtgttctatcattttggctgggacggaacatttggcaacagcagaaataatatgtatggacaaaatcttaatgtaaaatatgcacttgatgcggttgaagctgcttttgcacttggctgtgatacttttataggtgctggttcacaggctgaatatggcagatatgaaggctctttgaatgagagtgttcctgcatttcctgaaaatggttatgggattgccaagttatgtgctggacagatgacaagaattgcctgtaagcagaagggaatgcgtcatatatggacaaggatacttagcatatatggtccttatgatggtgagaatacaatggttatgagcactatttacaagcttcttaattcagaaaagccatcttgtactaagggtgagcagatgtgggatttcctttattcaaaggatgcagcattagcaatgagattacttggtgagaaaggtacagacggtagaacatactgcataggaagcggtaaagcaagaccgttaaaagaatatattgatattataggacaaaatgccaataaaaatgtcacaataggatatggagatattccatatggtcctttacaggtaatgtacttgtgtgcagatattacagcgttaagagaagacactggatttgagccaaggtattcttttgaagatggtataaaagagacaatagaatggtgtagaacacagaatttataatatcttagatgtaataaagaagtaagaatggagattaagatgaagaagattagtattatggtaccttgttataatgaggaagaaaatgttatacctctcagcgaagcgttgatagagatgtttgcaaaggatctgccacagtatgattatgacataacatttattgataacgactcaactgatacaacaagagttaagttaagacagttatgtgagggtaataagaagattaaggcaatatttaatgctaagaattttggacagtttaattctccatattatggtattattaatacagatggcgattgtacaataccagtatgtgcagactttcaggaccctattgatgtaattccaagacttgtagcagaatgggaaaagggctataagatagtatgtgcagtaaagtcaagcagtaaagaaagcaagataatgtatttcttaagaacctgttattacaagcttattaaaaaaatgtcttctgttgaacagatagagcattttacaggttttggtttatatgacaagtcatttgtacaggttatgagggacttgaaagatccaatcccatttttaagaggtgttgttggagaattagggtttaagagaactgagattgagtatacacaggcacagagaagagcaggaaagacacataataatttctttaccctttatgatgctgcaatgttaagctttacatcatatactaagcttggattaagacttgcaacatttgttggtggattctttggtcttgtcagcataattgttggaattgtataccttgttcttaagctggtatactggaacagatttacagctgggatggttcctcttattctccttgtcagcatattaggttcattacagcttatattcataggtcttatgggagaatatatattaagtatgaaccagcgacttatgaacagaccattagttgttgaggaagaaagattaaattttgatgatgctgataagtcagataagtaa

SEQ ID NO: 622 - DNA, 26320 bp, unidentified
  source 1..26320: mol_type = unassigned DNA
gcggtcgcagtgctgaatgcagatgacgacaagctggccacagtgcagacggtaaatggaaagcctgccatatactatggcaaggaatcagcatcaggcgttcataaatcagtatataccacaaatattgaaaacctgggctttgacggcatgaaggctcattttgtcactccggagggtgagtttgatgcacaaatccacatcccgggtgagcacaatgtatacaatgccatggcggcagcagctgtcggattgcagcttggcctcacaatagctgagataaagtcaggaatcgagaaagcagagacaatcgcagggcgtaccaatttcatcaaaacacacggcatgacagtgatagatgactgctacaatgcaaatcctgtatccatgaaatcctctatcgaggtgctttcacatgcaaagggaaggacaatagcagtgcttggcgacatgggtgagcttggaagcgatgagaaaaagctgcaccatgaggtaggcgaagcagttggagagaatcatatccatacactttttgctgcaggagagcttgcaaaggaatatgcagccggagccgcagagaaatcgtccgatgtagacatccactatttcgaggatagggagaccatgacacaggagctcctttcatatgtgaaggagggcgacaccatactggtgaaggcatcgcacttcatggagtttccgaaggtagtcgaggctctgagtaagtaaaatcaggtaaaatcaatctgatagaaattaattcgatatttaattattgcgaggaatggatattctccaggcctcataatattataaaagaaagagagaaaaataatggcacagaatccaatcgtaacaatcacaatggaaaacggcgatgtaatcaaggcggagctttatccggaaatcgcaccaaacacagtaaacaactttatcagcttaattaatcacaacttctatgacggagtatgcttccaccgtgtaatcaagggcttcatgctccagggaggagatcctgacggaaacggcacaggcggccctggttatgaaatcaagggcgagttcacacacaatggcttcaaaaatgacttaaagcacacagccggtgtactttcaatggcacgtaccatgatacctgactcagcaggcagccagttcttcatcatgcatcaggatgcaccacatctcgacggtgagtatgcggcatttggcaaggtgatcgagggcatggatgtggtaaacaagatcgcagaggtgcgcacagactacatggacaaaccacttgaggctcaggtcatgaagacagttacagttgagactttcggagtggactatccggagccggagacagtttaatgataataattatcgatgaggcaagtgcaaaacttgcctctttttactatcatgatgagatattcaagctgcagtggagaagtgtggcaggcaaggcatctatgtcagaagagctgcaagaaaaactgtatggtgcactactgggaaaattgctggatgagttgcagaagaaactgctagatgagcagcagaataatttgtgtgtgtatgaaatagaaaataattcaggatatacagaatctgcagataacaccgcgaaagctaatacgggaaatctaagaataccgaaagctcccgccgactacatctggatagtatcaaacaggcagcagaagcaaatagccgactcactcggcatagcatcagtaggagaaccgcagtgcggcacgcgctatgcagtcgagagccttgcagagcttgatattgagtatctggagcgggtgcgcaggcggtataatcacatcccgtgggacatcggcgagacagacaggtgcctgatacgtgagctgtcactgtcagaccttcctgcgctctatgagctctatgacaagcccggcatgacagactttgtggagccgctttacgactacgagacagagcttgaataccagaaagcatatatagagaacatgtatggcttttacgagtatggcatgtggcttgtattttccaggaaaacaggtaagctgataggcagggcagggcttgagcatgatgaactgggctatatgatagcgccggaattatggaaccagggctatgccacggaggtgtgccgcttcatcatagactacgcgcgcgaaaacacagactttgaagagctttactgtcggatagacgagagaaatacggcatcggtgcgccttgccaaaaagcttggatttacaaatagcgggcatatggatgatgatataaacgcttctatatatagaaaaaacataaaaaacaatgaaaaacattgaaaaatatgcaattaggcaataaaatataaacatagtttaacgatttggaggacgaaaaaatgaagaaatatgcatatggagtagatataggtggaacaactgtaaagatgggctttttcgagacaacaggaaagcttgtcgatacatgggagattcctacacgcacagagaattccggcgagctcatcctgcctgatatcgcagcatccatcaaggagaataacgagaagcatggtatcgagatgggtgacatcgagggcgtaggtatgggagtgccgggacctgtaaaggatgacggaacagtattaagatgtgtcaacctcggctggggcgtgttcaacgtggcacagtcactctcagtactgtgcggcggcatcaaggtaaaggccggaaacgatgccaacgtagctgcactcggtgagatgtggcagggtggcggaaagggtcatcaggatgtagtcatgatcacactcggcacaggtgtaggcggaggaatcatccgcgagggcaaaatcgtagccggagtaaacggagcaggcggagagataggacatatgcctatggtagatgatgagtcagagtgctgcggctgcggcaagaagggctgcttagagcagtatgcatcagcaaacggtctcgtaagagtggcagagagatacattgcagcacacagggatgtggcaacaaagcttgatttaaatgcaggattcacagccaaggatgtatgcgatgcggcaaaggcaggagatgcagcgggcattgcggcagtagagcagtctatgaagcttctcggcaaggcaatggcagcagtagcatgcgttatggatcctgaggtatttgttgtaggcggaggcctttcaaaggcgggcagcatcatcatcgatacagcagcaaagtactataaagagtatgctttccatgcaagccgcgagacagagatcaagcttgccacactcggcaactcagcaggcatgtatggcggagtaaagatggttatcggctaacaacataagattgcaatttttaaagaaataaaatataatggctactaaagatacactacaatcgaggtgagactattggcagattactcaacagaagaattagaaaaaatagcggacaaatttcgctcagataccagcggtataaggggaacgaaggattttacgagccccgaggagctttatgatgagctgaaaaaggaaatcaaaaagtatcatccgtcggatgacacgagccttgtggacaaagcctacagggtagcttatgatgcccataaggggcaggcgcgtaagtcaggagagccttatatcatacatccgctgtgtgttgccatagtactcgccgagctcgagctggataaggaaaccattgcagcaggactgctccatgatgtgctggaggacaccatcatgaccatggatgagatgcgtgcggagtttggagacgatgtcgcacatctggtggatggcgtcacgaagttaaagcacctgcatctgacagacagcaccaaggatccgaaggacaagaatgcggacaggcttgagatgcaggctgagaatctgcgtaagatgtttctcgccatggcaaaggatatcagggtcatcctcataaagctggcagacagactgcacaatatgcgtacactcaagtaccagtccaaggaggcgcagcagcgtatcgccagagaaacacaggatatctactgccctatcgcacagcggcttggtatcagcaagataaagatagagcttgaggacctttgtatgaagtacctctatccggatgcctactacgatctggtagagaaggtagccctcagaaagacagagcgcgacacttacatccagggcctggtaaacgatgtcaagaagtatgtttcggatgccggcatcaaggctgagatatacggcagggcaaagcatttcttcagtatatataagaagatggtcaatcaggacaagaccatagaccagatatatgacctctttgccatcaggattctggtggatacgataccggactgctatgcagtgcttggtatcatacatgagaagtataagcctataccgggccgtttcaaggactatattgccatgccgaagcagaacatgtaccagtcgcttcacacgacactcataggaccgagcggacagccgtttgagatacagatacgtacctatgagatgcatcgtacagctgagtacggtatcgcagcgcactggaagtacaaggaagcaaacaacggcaatgccactaccaccactgtcacagaggaggagaagctcagctggctgcgccagatactcgagtggcagcaggatatgtcggataataaggagtttatgactttattaaagagtgatttaaatttattctccgacaatgtatttgcattcacaccgtccggcgatgtaaagaacctgccaaagggatccacacctatagactttgcctacagcatacactctgcggtcggcaacaagatggtcggtgccaaggtaaacggcaagctggtgccgatagactatgtcatcaaaaacggtgaccagatagagataatcacctcacagaactccaagggaccaagccgtgactggctcaaggtcgtaaagagcacacaggccaagaacaagattaaccagtggttcagaagtgagctcaaggaggagaatatacagcacggcaaggatctgatagcagcctatgccaaggcaaagggcatcaactttgctgaaataaacaagcctgagtatcaggagaaaatacgccgcaaatacggcttccacgactggaactcatgccttgcaaccgtcggccacggcggactcaaggagagccagatagtcaacaggatgtacgacgagtacaagaaggatcatgtggtgccggtgacagatgcagatgtgcttggcagcattgcagaaaagcagcaggcggcagcaggcacacagcccgagcacaagtcaaagagcggcattgtggtacacggactctatgatgtggctgtgcacttctcgaagtgctgcaatcctgttccgggagatgaaatagtgggctttgtcacaagaggccgaggcatctccatccacaggacagactgtgtgaatatcatcaatctgtccaagatggaaaaggacaggctcatagaagcagagtggcaggatacagccctcatggacaacggtgccgagtatcaggcagacctaaagatattctgtcatgacaggccgggactgctcgtagatatcacaaagatatttaccgagaaggaaatcaatatcagtggtatccagtccaagaccagcaagcagggcatcgctacaatcgaggtatttttcaatatcaaaggcagggaccagataaaggttctagtggagaagctcagacagatagaaagtgtaatagacgtagagaggaccaccggctaaatcccggtggttcttgcgtgaagcataacatataacagacaaggagtacactcatatggtaaatatgaagatagaccacttcgtagtgggaccggtgcagaccaactgctactttgtcaccaatataaagacaaaggaaatgataataatagacccgggcgcgtgtgctaatcagctcgccaaaaaggtggacgaatcgggcgcaaagccagtagcaatactgcttacacacggacactttgaccatgccactgatgcaaagccgctcgcagaccgctacggcatcaagatatatatccatgaggcagacaaagccacactcgatgacccgcagcttaatgtcagctacatgatgggccagtcaaagactttttatgcagatgtatttttgaaggataagcaggaaattgatattgcgggctttcatatagtagtgcttcacacaccggggcatacaccgggcggctgctgctattatttcccgtatgaggacgtgatctttactggtgattcgctgttttgcggctcgatcggacgtacggatttcaagggcggcagcatgtcagacctcgtgcgcacagtgaaggaaaaaatcatgacactgcctgagcatacagaggtgtacccgggccacaacgacacaacaaccatagaaaacgagaggatgtataacccttacttatgatagtagtagtatttaataaaccggattttgaatatgatgtgcactcactgcttaaggagttcttccctcaggaggatgtgcagatgtactatagctgctcacctgatgaggtggaggggaaaaacttagcctgcacacaccacgagatgacagctgatggcgtaaaggaatttgcggatgcctcacaggtatttaagatagactatgtgggcgatgaaattgcagtggagtggacggtgaatagagccggaaaaagaatctgcacaaaaatatccgtagacagtgcagaccgcaaggaaactaaaaaccgccttaagctcgccctgtattccatgatagaaaagggcacaggaaagagtcttccgtggggcacactctcaggcatcagaccgaccaagatagccatgaaatgcatagaggacggcatgagcgataaggaaacctacgactatctgaaggaaacctacctcgcaagcgatgagaaaatcgacctctcaataggcatagcaaagcgtgagaaggcactgctcgataaggtggactatgacaacggctacagcctgtacataggcataccattctgcccgagcacctgtgcatactgctcgtttacgtcatacccgctgggtgtgtggaaaaaccgcgtagacgattacctcgatgcactcgagaaggagatagactacacggcacagaaattctaccacaagaagctaaactccatctacataggaggtggcacaccgaccacactaagccctgcgcagcttgacaggcttatcagaaaaatcaaatgcagctttgatttaaaggactgcctggaatttaccgtggaggcaggcagaccggactccatcacgagagaaaagctcctggcactgaagaaaaatggcatcagccgtatatcagtaaatccgcagaccatgaagcagcagacacttgatataataggaagacaccacacggtagacgatacgataaatagcttcaagctcgcgcgtgagctgggctttgataacataaacatggatctcatcatgggacttcctgaggagacactcgatgatgtaaggcacacaatggagctggtgaaggagctggcacctgacaacgtcactatccactcactcgcagtaaagcgagctgcaagactcaccatcttcaaggaccgctacagcgatatgcagatggtcaacacccaggagcatatggatctctgcgcagcctactgtaagcagatggggcttgagccatactacctctacaggcagaagggcatggcaggcaacatggagaatgtgggctatgcggcaaagggcaaggctggtgtatacaacatactgattatggaggaaaagcaaacgattgtggcctgcggagcaggggcaagcaccaagcgcgtctggcccgtaccgaatccggatggcacacaccgcatcgacagatgcgagaatgtcaaggatgtagggcagtatattgcaaggattgatgagatgatagagaggaagcagaggctgtttgagaaaaaataagcagtatgatatataataatgtataatattggtgctgtaataccatagtgattagcgaatgtgtcaaaaattataaagaaaaactaatattcattgacaaagaattaaaaatgagtgaaaataaattactgaaaaatcctgattagatacagaaaaagatacaaataaccgaataaaacaaaacaggctaaaataattcgggggaggacaaaggtacctcccccgtagtaggtatagagggaaataaaagataccacaaggagaatttggaaagaatgtacagaaagaaaggcagaggatgggcaaagcatatagattttatgctttatgtagcaagattagcgctcaagagcttcatttcttcaatatactagtgggagatatgagccttgtgggcacaagaccaccaacactcgatgagtgggagaagtatgaaccacatcacagagccagaatgtcattcagaccgggactgaccgggttgtggcaggtgagtggcagaagcaatatcacggactttgaggaagtggtgaagctggatacccagtatattagggagtggagtgttaagaatgatttgaggattatttttaagactgttgtaagtattatgcaaagtgatggggcaatatagaaaaccatcgcattgggaagtcctatccatacggatgtgtacatagaaaattagaggatatgcccgatgagggctggaggagtaaataacatgaagaattataaaatcgctgttgcgggcactggttatgttggtttgtcaattgccacattgctttcccagcatcaccaggtgactgcagttgatatcgttccggagaaggttgagatgatcaacaaccgtaagtctccgattcaggatgactatatcgagaagtatctcgaagagaaagaactgaatttgaccgcaacgctggatgcaaaggctgcatactctgatgcggactttgttgtgatagcggctcctacgaactacgatagccacacccagcactttgacacatctgcagtcgaagctgtgatcaagctggtcatggaatataacccggatgccgttatggtcatcaagtccaccatccctgtgggctacaccgcaagcgtacgtgaaaaattcaacagtaagaacatcatcttcagcccggaatttttaagagagagcaaggctctttatgacaatctttatccttctcgtatcatcgttggcactgatctgaacgatgagcggttggtcgaagctgcacacgagtttgctggtctgctgcaggaaggtgctatcaaggagaatatcgacaccctgttcatgggcttcaccgaggcggaagcagttaaactgtttgctaatacatatctggctctgcgcgttgcttacttcaacgagctagacacttatgcagagagcaagggtctgaacactcagcagatcattgacggtgtttgccttgatcctcgtatcggcagccactacaataatccgtcttttggctatggcggttactgcctgccgaaagacaccaagcagctgctggccaactacgccgatgtgccggaaaatctgatcgaagcaatcgttgagagcaatagaacaagaaaagacttcattgctgaccgtgtcctaaagctggctggttattatggttatgacgaggataacgagtacgataaggaacaggaaaaatctgtgaccatcggtgtgtaccgcctgaccatgaagagcaacagcgataacttccgtcagagttctatccagggggtcatgaagcgcatcaaggccaagggcgcaacggttgtgatttatgagccgactctgaaagatggcgagacattcttcggatcagtagtggttaatgatctggataagttcaaggaaatgagccacgccatcatcgcaaaccgctatgacaagtgtctggatgatgtgaaagaaaaagtttatacgagagatttgtttggtagagattaataaggggactgagcgtgagaaagtatagcattttgatgtcggtttactacaaggaaaaaccgatgtggttgagagaaagcatagaaagtatgctttcacaaacagtgaaagctgaagagtttttcattgtaaaggatggaccgctcacggatgaattagacgaagttattgatgagtatgtgaagagttatccagagttatttacaattttagctcttaaaaagaatatgggcttaggtcctgctttggcagagggcgtaaaaaaatgtagaaatgaaataattattagaatggattctgatgattattctgtccctgagcgttgtgaaaaacttttgcgtgagctggataaacatcctgagtgcggtattatcggatcatatgaggcagaattttcagatgatatgaatagtcctgttgcaatccacaaagtgccagagacatctgagcagatccatgcatttatgagcagacgatgtgcactgttacatccaacggtattatataaaaaaagtgtgattattaactgtggaaattatcatgatgttcgcttatatgaagattatgatttatttatgcgtgtagtgctggaacataatgttaagtgctacaacatccaagaaaacctatactatatcagaattaatgatgctttttttgaaagacgtggtggaatctcgtacatgaaaaccgcagttggatttaagtggcgtcagcatagaaaaggatatatgtctcttggagattttatggtatcggcaggcggacaggctgcagtatgtttgttacctaataagatgcgtaaatgggtatatcttaacttcttgagatgactgccaataatggagtaaacagatgataagaatattacatattgttcccaatatgcaagctggtggcttggaaactctaataatgagttggtatcgtaatattgataggagcaaagtacagtttgattttttagtacattatcaaggaaaattcttctacgatgatgagatagaacgcctcggaggaaaaatataccatctgagcgtgagagatgataataatttcattaaatatttgcatgatttggattcgttctttaaagaacacagagaatataaaattgtgcatggccatatggagagcttaggacaattctattttagagcagctaaaaaatatggcgttccggtgagaatagcacatagtcataattcagccacagaaccgaccttaaagggaaaggtcaaaggaatacttgctaaaggttttcctaagtatgcaacacattgtttcgcgtgctcagagttggccggtcagttcatgtttggtgatagagattttacagttataaaaaatgcaattgatttgagcaggtttcagtatgatgcgaaaattcgtacaaaaatgcgtgcagaactaaatctcactgataagttcgttattggacatgtaggacgtttttgcacacaaaaaaaccataaatatcttattgacgtatttgaacaaatacataaaagaaacagcaatgcgatattacttctgattggaaaaggtgaacttctcgaagaagtgaaggcgtatgttgccgaaaaaagcctggcaggatgtgttcagttcttaggtgttcgcgatgatgtgaacaaattatatgatgcgatggatgtttttgtatttccatcgatttttgagggacttggaattgttgcaattgaagcgcaggaatcaagacttatgacggtttgttctgatgtggtgccgaaagaagccaatgtgactgagtattataaagcaatttcgttgcaggaatctcctgaaaaatgggctgagagtatctgcaaatacgcaaatggatatgaaaagaaagatgtaactgataaaatccgaaatgctggatatgacattaaaaagagtgcgtcaatgcttcagcaattttatcaaggagtattaacagaatgaagagagtactgatagtcgggtttacggaaaaccttggtggcgttgaacgactgatttattcttattacaaaaaaatagatcgtagcaagctgcaatttgacttccttataaatgttgagaaggtgccgttccgcagtgaaattgaaaagcttgggggaagattttttgtaatccctcgcaaaacgaaggattatgtcggctacaaaaacggactaaaatctttttttgacaatcatgcgaaagattatatcgctttttggttcaactccaattctctggcaaacttggactatcttgcttatgcgtaccgatatgggataaaaaggcgtattgttcatagccataatacaatggaaacaagaggtactgtttataaggtatttcatcagcttaataagggcaaggcaagaaggatggcaacagactattgggcttgttctattgatgctggaagatttttctttgatgaagacgttgtgaagtcggacaagttccgtgtcatcaataatgcaatcgacctttgcgagttttctttcgataaagagaagagggtagaatggcgaaaaaagataggaattgctgataatgttacgctttatggtaatgtcggcagactcagttatcagaagaatcacgagttcctgcttcgagcatttaaaggacttgtttcaaagcataagaatgtacatcttatccttattggaacaggagaacttgaggagaatattaaaaggcagattgaagatttaaaactagagaaaaatgttagtctaatgggaagacaatttgacataccaggtattttacaagctgtggatgtttttgtaatgccctcacattatgaggggcttccaatagctgcaattgaagctcaagcggcaggccttccgtgcattatatcagataccattacgaaagaagttaagtttttgcattcatgtgaatatgaagatattgctagtgaagacaaatggatattggcaatggaaaaagcagcaaaaatgtcaagaagcaatgattgtacagcaataaaaaaagctggatttgatatagaagaggaaaccgcaaaacttgaagagtatttgttgagttagaggaattgaaatgaaagtaagcgtcgtttgtatttattataatagaaattatgggagtgtattacagtctcttgcacttaacaatttccttgaaaagttagggtgtgaggtaaatgtcatcccgtttaaggatactgctggaacgaaagaaaaattggacattctttttgacttgaaattgcctaagctatttgatccggaaattgtaaaacgtaaaattcaggagaaaaaggctagaaaagcagcaacggatatagatgaggaatatgtagaaggcgttaagctaagagagcgtgcctatgatagatttgtgaaaacatattttaacgtcccaaaaagagttctgaatagagatgaacttgctggatttgtagaggatagtgatgcagtggttgttggaagtgatcagctttggacaccgcatgatattcttataggctatcacacactgagctttgtcccaaatggtgtaaagaaaatatcatatgcaactagctttggtgttaaggagcttccaacagcacatattaagaggaaagcaaaaaaattcctttctgatatggacgagatttctgtgcgagagattcaaggaaaacaaatcatagagaatcttggagtagacaagactgtacaggttgtcgtagatccaacgatgcttttgacaaaaaaagattgggatgagatggtcccttcaacaaggattatcgatggcaaatatatcttctgctattttttgggaaataatcctgagcatcgagagttcgcacaaaagataaaagaacatcttggattaagaattgtagcgttgcagcacatggatgagtatgtagctggggatggagaatatgttgataaggtactttatgatattgatccaagccagtttgtagcattgattcgtgatgcggaattgattttgacggattcgtttcatggatcagttttttctgttttatatcacaaaaagttctttgttatgaatcggcataaggatggtgaggtgcgttcaacgaattcgcgtattgacacgttttgcggattgttgaatttggagaagcgacatctcacaggggatttaatggcgtactcagaggataagattcttcaggaaatagattatgatattgtcgatcaaagattacatgatagcagaaatagctcaattgcatttttgaaaaatgcattgggtataggagaataagatgattcagatagcgcaaaaaaaagactgctgcggttgtgaagcttgtgtgcaagcctgtcctaaaaagtgtatctcgctatcctacgaccatgaaggatttggatatccatacgtagaaaaagataaatgtgtggagtgtggtttgtgcgagcgtgtttgtccggtagcaaattatgttgaaccagacagtctgcaaaaatgttatgtgatacaaaataaagaccccaatgtagtacgggagagtgcctctggaggaggatttagtatttttgcagactatgtgctgcaacacaacggcgttgtatttggggctgcatatactgatagtcttgaagtagaacatacctatattgaaagcagcagtgagttgagtaaactgagatgctctaaatacgtacaaagcagaattggaaatacatatgcaaaagtaaaagaatttctggatgaaggaagacttgtttgttttgccggtacaccgtgtcaggtttatggcttgtggatgtatttaaaaaaaccaaacaatccaaaccttatcttagtggattttgcttgtcatggcgttccatcgcctaaggtgtggaaaaaatatctcgcttggttacagagcaagaatgatagcaacctgaaatcttatcgttttagagataaaaaatttggctatcagtatactacattctctgcaaagtacgaagatggaacagactatgtaatctcagattgtaataatgacagagattttatgaaagattccttttttagagatgttgtttcaagaccgtcttgctataactgcaaatttaaatcggtcaaacatgtcagtgatgttacgttgttcgattgctggcataatgaagaattaacagggacgacggattattcagatggggcaacgacaattatattgcatacacagcgtgcaacagagctcatagatgagattaaagttagagctaaatgtacagaagcagatttggataaagcagtagagctggatggtgtatgcttgatttactctaagctgccatttgcgcagcggaaggaatattttgaagatttggatacgctgactgttgaagaaatgaataaaaaatattttgtaaagtcgggaaataatccaataaaggagtgtattaaggcattccttagaaaagttggtctatttgattggctgagaaataaaatagccaaaagaagaatgaaaaatatgagttgaagaaagggacaagtcatgaatgaattagtgacggctgttataactacatataaaagagagccagaaattcttagacgtgcagttgagagcgtcgtgaatcagacatggcgtccgcttgaactatatgttattaacgattgtccagaggacattgttctcagtgatagaattcggtcaatgctcctggatgttcagcaaaaccacgctgatttgagtattcagtatgtaccacttgaacataatagcggtgcatgcgttgcaagaaacaaagggttggaattggcaaaaggtgaatttatttcttttttggatgatgatgatacatgggagccagaaaagattttcgaacaaataggtggttttatatcaaaaaaaatagggatggtttacagcccattttataatatagactttaagggaaaaaaagaactgattgtgcgaggagataagtcaggcgttcttttagacgatctcttataccgaaatgtgattggtggcacatcgatgccaatgatgagaacaagcgcgatgcgtgacattggtggatttgactcggacatgttgtcgagccaagactatgatacatgggtaagaatggcagaaaagtatgaaatccagtttgtgggtaaacctttgacggtgagatatcttacaggagagtcaatcacaacaaatcttaaaaagaaagaaagtggatggctccgctttactgaaaaatacttgcattattataaagacaaccgagaagcattttctaatcgcttgagtctgatggttggcgagatgattgcccttaacaataagaaatttgtgaattctgttttggaaaaatataaaggattgtacaaccaaagcgtaaaatttgcgtactgtaaagcgattataaagacagttgtaaagagtgtgttgaggaaaaaataatgagagaaaatgtattgatagtattaagcagtcttgctgttaataatggagtagcaagttgcactatgaattattataaatctgtaattgaaaaaggatatcatgttgattttttggtactaaaaaaagtccattcggaaagagaagaagctgtcgaaaaggcaggaagtaatatatatgtgctcccagaaactgaaaaggtaatcagtaaggccaaaaacaatttcttgaaaaagctaattaaggaaaatggatattcaattgtccatgttaatattccatatcataacgggacagcggttttgaaagcagcgaagagcagtagagtatcggttcgtatttaccacgtgcattgtccaaaacgggaagattctattaagactaaacttaaatccgatatttacacaccatgttgtgtaaataatgcgacggattatctgtcttgctctcatttggcagcgagaagtctatttggaaagaaaaaataccatgttttgcataatgcgattgatgcaaagaaatttgagtttgatgaagataaaagatataagctgagaaatgcatacggtttagacaatgcttttgttgttggagcagtgtgcagaattgataaactcaaaaatccttttttcctgattgatacgtttggtgaaatcaaaaagagagagagaagtgcaaaactagtctggcttggtagcggagatttagatgaacaagtaaaacaatatgcaaaagaaaaaggcttaatgtccgattgtgtgtttttgggaagtcgcacggatgtgaacgactggtattcagcaatggatatattgcttttcccttcaacactggaagggcttggaatggtacttatcgaagctcaggtctcaggacttatgtgctatacatcaaaaaacgtgtcagaggaaacggatttgacgggtcttgtacattttgcggatcttagtgaaggagctcctaaatgggctgagaccattctaaaacaagctaagaactatcgaaggatttctaggattaaagaagtaacagaagcaggatataatattgattccttaagagatgatttgggatcaatttatgacatgtgtttaaataggagaatggttcgatgatatgctatgttcttttactttttttaatagtgtttctaggaaaaatagatcattggaatgaatcaaaacgtaaaaagagaaaatacttagttttggcatttaccgcaattattgttcttgcagcgatgagaagctggacagtaggaattgatcttagaaatcagtatgcgaaagcatatcagttaattgcaaaaatgccttggtcagcatgggacaaccttcggtatgagtggggctattttgcatattgcaaaacattatcttatataagtacagatatacatttttttattgcgattactgctttattaacatgtgcgagtgttgggtattttatttataagaattctgaagatgtcgtaatgagcacttttttatatgtagcattatgccagatgttcatgtattatacaggattaagacaggttcttgcgatttcaattttacttgtcacaattgaagcgataaaaaagagacattgggtgctttttttcgtaggcgtttatattgcaacgttgtttcacagttctgcggttgtggcatatatccttcctatattttatttcttgaagtttaagaaaaaggaaatagcgatatcattggcaacaattggtgtcactctttttgcatcgcagacggtattttcatacgcattgactttttttgataaatatgaaaaaggatatacaagcagctcagtatttgcaagaggatatattaataattattcgctgttaactggcgccatttatattgtgctatttgctttaatatatctgacgatcgcctggaaaaatgaattacaggaagcggataatagaatcttcagcataggattatctggaacaaaattgtttaagagttatgcggaggatttaactttgccagaaggttttctgatgtacggatctctattagcgttggtgtttcagctgttcacatttacagttaatattttgacgcgtttcaggttttactacataccatttctgtatatatcaattccattggcaatagaaaagacaacgggtcggtataaaaaattagtgaaacagggaatttatttggttcttacactgtacttcttgtatgtgtgttattatctggcaggatcacaatggggcgttgttccgtataaattcttttgggcggattgaaggtgaagattaaggatgaaaaaaataggaatagtttcattatattataacagtgtgaattatggtggactggcgcaggcgtatgcattaaatagatattttacggatatgggatatgagagcgaactcatctcctatgacagaattaaaaaacgaaagtcaatcccagaaaaacgaaagaagataacaagcatgtctttgggagagatagttgaaaagtgctatagaaaggctgcagagaaaataggtcaaaaatgctatgcaaagcgacttgatataagaaaagcgcgcatgaaagagttccgtgatgcaattccacactcagtcagatacacagaagaaacaattcagcgatgtgagaatgattacgatatatttgtaagtggtagtgatcagatatggaaacctggagttgtagatgctgggtttacttttgatttcttgaaagaacctgagaagaaaacagttatatcatattcatccagtgtatcagtaaaggaattgcctgaagattatgtccatttcatgaccggagcattaaaaaaatatagtgcaatttcattaagagaggcaacgacagcaaaacagtttaaagctgcgtttaacagggatgtgcgagttacagttgatccagtactgctagtagatgaatctgtctggacagaaatggctagtcagaaattactggatgaaaaatatgtattttgctatatgcttggtgataataaagagcagcgaagagatataaagaaatttgcaaggtctcaaaatttgacactcgtaacattaccgcatattaagcagagtagtcgctttgaggttagagtagaagattttgcttttggtgataagcagatgtttgaagtcggaatgcccgaattcttaagcttaattaaatatgcggaagttgttgtaacggattctttccacgcaggtgttttttcctacatatttagaaaagtgttttatcttcttgaacggccgactaaaaatccaaatgatgtgatgaacgtcagaatatatgacttgctttcactatatggtacgcctgatcggttggtaaaggttggagagagtttgctaaataaggatagtaaaataataaatttcttgactatagagcaaaaagtttcaacggcaagacaatattccagaatgtatttgcaggaagcactgaataaaaatggaagatgatgagagagccaaaataatgattaacacaaagaatgtagatagtttgaactgtgcaaaaggtatagcatgtatttttgtaatactgattcattgtacttttcccggcatagtaggggagatgcttcgagcaatagcaagatttgcggttccattgttttttacagtcacaggctactttctgttagattcacatggaaaggtaactagagcacgcatattgagaaagatggggcgtattgtaaaaattacgattttagccgatgccttttatatgatttttagatatgggtgtttttgcatactggggggggagtacagtacaagaatgtgtctttgaattttataataagcacattggttccaattatgattgcagttattttgaagaagctaaggctgcataaatggatattcaaaccagtaaggttaaaatagttcagataaagcgaaaagcactaaattagagagaattcaggtgataagataatgaaaataagtcaacgaaaggccggcgtagcattgtcgtatgctggcgaactagtaaaagtattagtcaatctggtttacacgcctgtcatgttgcgtcttttggggcaaagtgagtatgggctatatcagttagtatattctgtggtttcttatttgagccttttgagtttaggatttggaagctcttatttacgattctattcaagatataaggcacagaaagatgaagacggcgttgcaaaattgaatggaatgttcatgcttatattttgctctatttccgttatctgtgttttatgtggcattgtaatgataggaaatattcgaggaatttttggcacaggtcttacagaaagcgaatatgccactgctagagttttgatgggacttcttattataaaccttgcaatgacgtttcctaatagcgtgttcaactgctcaattacagcgcatgaaaaatttttgtttcagaagcttttaattcttctgcaaaatctgtttagtccatttttgactctaccattacttatcatggggtatggctcgattggaatggtatctgttacgacttttttgacctttgcattgttactatctaatatgtttttttgctttaaaaaattacatatcagatttgcatttaagggactcaaaattgctctattaaaagaaatgtgggtgttcacattttttattttcctgaatcagattatagatcagattaactggagtgtagataaatttttgttgggaagattagctggtacaacggcagttgctatttatggtgttggaggacaaattaacacattatatcttcagttttcatcatctatttcaaatgtttttgtccctaaagtaaacagaattgttgcagaatcaaatgatgatacccagttgactaggctttttactaaggtgggacgtattcagtttatggtcttaggattgatcctatctggctttatatttttgggaattccttttgtgaaaatttgggcaggaccagaatatggtgcttcatatgttgtagcattgttgcttattattccggttactgtgcctttaatacaaaatcttggaattgagattcaaagagctaagaatatgcataaggcaagagcggttgtttatatggcaattgcaattgctaacgtgtttattagcattcctttgattaagttaatgggaccggccggtgctgcgcttggaactgcaatctcacttgtagcaggaaatgttatttttatgaactggtattatcacgctcgtattggaatgaatattatttatttttggaaagagattgcaaaatttatcccagcattgattgctccatgtgtggctggtatggctgttatgaaatatgcgaatattacaggcctcgttcaattggcagcatttgcgattgtatatatggttatatatgctttctcaatgtattttctgggtatgaattctgaggagaaacaacttattattggacccattagaagaattttaagaaaatgaatatagaagaggagaaacaagaatgaaaccagaaaaagcatatgcttgctacaatgtaaatacagatgtgaggttgaacagttcctctggagcagtattttcttctttggcagagtatgtgtttaataaacaaggcgttgcttatggtgttgtaatgtctgaggactgctattcggctgagtttattgcagtgacagacataaagatgatggcaagactacgtggatcaaaatatctccaagcgaaagttggaaatacgtttaataaagtaaaggaagatctgcaatcaggaaaaacagttttgtttaccggaacggggtgtcaggttaacgggttaaagacctttctaggaaaagactatgataatcttatttgtgtagatgtaatatgtcatggtgctccttcaccggctttgtggaaaaagtacgttgagtatcaagaagaaaaaaattctggaaagttaataggtatcaattttcgttgtaaggatgccagtgggattgattgtagtagcatgaaagaaatgctaaaagatattccgcaaggtgaagaaaagagaatatatatttctaaaaataaagatccctatatgcagatgtttctgagagattattgtctacgtccttcctgctatgagtgtgttgccaagaaggaaaagaagtctgatttaacaattgcagacttttggagaattcaagatgttgctcctgaaatgaatgatggaattggaacatcattagtattaattcgtacagataaggggcaaaaaatctttagaagtattagtagtaaaatgaagttgaaagaagtttcttatgaggccggtgtaaaaggcaattcggctgagtataagtcgtgtgtaagacctttacagaggaacacgttttttgaagatatgaatttaatgaatttttgtgaattacaaagaaagtatattgttccgacagaatattcattagcaacaaaaattaagggaaaagtgaagtttataattaaaggtattcttagggtgcttagacatcagaatattaataatactagttacggattgttatttgcttttgactgcaagaattatgaaagaaatactaatacttaagaggaaaatggcagatgaatgtgaaaaaaatatttgatattgattggctgaaaacaataaagataaaatttcataattctaagaagggtatggcgattatttataggaattcagctgttaatttggcaaatgattcgagtatatgtctttctgaacgatttgaatttggtagacgatactatcgtcaggacaataggacatctgcattaagtctggcgggaaatgcaaaattgattgtaactggtgcagaacaaatttatacaggagcctatattacggtcgctccgaatgctgttttatcattcggggggggtactgtaataataacttgacaatagattgctttgaacgtattgcaattggagaaggcgtttttatatctaaaaatgttacgattcgcgattctgataatcacttgatgtgctatgatggttatgaaaaaacaaagccgataatgattagtgaccatgtatggattggaatgaatgttacgattttaaagggcgttacgattggagagggagctgttatagcggcaggatctgtagttacgagagatattcctccacatgcgcttggtgcaggcgttccttgcagagtgataaagacgggaattgaatggaaagataagtgacagtgggtttgtcactaaatatgaggtaaatctaaaaatgggaaaatactttggaaccgatggcttccgtggtgaagccggaattacattaacagcagaccatgcttataaagtgggtcgcttcctcggctggtattataatgctctgcgtgtgcgcaatgctgacaacaatcctgctcgtatcgtcattggcaaggacacccgtcgcagctcctatatgttcgagtacagtctggttgcaggtctgacggcttctggagcagatgcttatctgctgcacgtcaccaccactccttccgtggcgtacatcgctcgcgtggatgactttgactgtggtattatgatttccgcgagccacaacccctactacgataatggcatcaagttgatcgactgctacggcgagaagatgcctgaggagactctgctgctggtggaagactacatcgacggcaaactccatgtctttgataaggactggccggagttgcactttgcccaccgtgagcatattggctgtactgtggattacatctccggtcgtaaccgctacatgggctacctgatttctctgggtatctactccttcaagggtgtcaaggtcggtctggactgtgccaatggctccagctggaacatcgctaagagtgttttcgatgccctgggcgcagacacctatgtcataaacaacaagccgaatggcctgaacatcaacaacaatgccggctctacgcatatcgagggtctgcagaagtttgttatggagaaggggctggacattggttttgccttcgacggtgacgcagaccgctgcctgtgcgtggacgaaaagggcaatgttatcactggcgaccatatcctttacatttacggttgctacatgaaggaacgtggtaagctgttaaataatactgttgtcaccacagttatgtccaactttggtctctacaaggctttcgatgagcaaggtatcggttacgctaagaccgctgtcggcgataagtatgtttatgagtatatgaccaagaacggctgcagtatcggcggtgagcaaagcggccatatcatcttctccaagtatgcgagcacaggtgatggcattctgacaagcctgaaaatgatggaagtcatgctggctaagaagaagccgatgagtgagctggcagcaccgttgaaaatttatccgcaggtgttggagaatgtccgtgtgaccgataaaaaagccgcgcagaatgatcctgctgtgcaggaagcggtaaataaagtggctgaggctctgggtgatactggtcgtattctagtgcgtgagtccggcactgagcctgtggtgcgtgtcatggtggaagcaccagatcatgatacttgccagaagtatgttgacgaagtggttaatgtgatctgcgaaaagggatataaggcgtaaagtcaatgacgactttgacaattacccggagtcgttttgcataagagaaaaagtataatagacgagagaagtaattatcgggagggataaaactatgtgtggaatcgttggttttacaggaaaccgacaggcagcaccgatcctgctggatggtctgtcaaaactggaatatagaggatatgattcggccggaatggctgtccgtgatggagagaatctggcacaagtcgtgaaagcaaagggtcgtctgtccaatttgatcgaaaagacagatggtggtaaggcattgaaaggaacctgtggtatcggacatacccgctgggctacccacggtgagccgagccagacaaatgcacatccgcatgtatctggtaattgcaccagatctggttccggcccggtcgaatccgaggttgttggtgtacataacggtattattgagaactataccgaactgaaggaaaagctgctgaagcacggttacactttctacagccagaccgatacggaagtagttgttaaactggttgattactattataagaagtataacctgggccccatcgatgccattgcgaagacaatggttcgtgtccgtggttcctatgctttggagctgatgttccgtgactatccgggcgagatctgggtagcgcgtaaggacagcccgatgatcatcggtattgcggatggtgaaacttatgtggcttcggatgttccggcaatcctgaaatacactagtaatgtgtattatattggaaaccttgagtttgcaaaacttgttccaggtgaggctcatttctatgacttgaatggtgatgaaatagaaaagctaaccaccgagatcaagtgggatgcagaagcggctgaaaagggcggctttgagcatttcatgatgaaagagatccatgagcagccgaaagctgtccaggatactcttaattccgtaatcaagaacggagttatcgagctgtccagcgtggagattaccgaagatgagattaagaatttcgagcagatttatattgttgcttgtggttctgcatggcatgtgggcatggctgctcagtatgtgctggaagatatggcagacatcccggtgcgtgtggaacttgcatcggagttccgctaccgtaagatgccgctcaatcagaaggcactggtgatcgttgttagccagtctggtgagacagcggatacactggcagcattgcgtcttgcaaaagaaaagggcgtcaccacaatggcaatcgttaatgtggtgggcagcagcatcgcgcgtgaagctgataaagtgttctacacacttgctggaccggaaatctctgttgctacgacaaaggcatacagtgcacagcttgccgctatgtactgcct

SEQ ID NO: 623 - DNA, 18730 bp, unidentified
  source 1..18730: mol_type = unassigned DNA
  misc_difference 15466: note = a, c, g, or t
  misc_difference 15467: note = a, c, g, or t
  misc_difference 15468: note = a, c, g, or t
  misc_difference 15469: note = a, c, g, or t
  misc_difference 15470: note = a, c, g, or t
  misc_difference 15471: note = a, c, g, or t
  misc_difference 15472: note = a, c, g, or t
  misc_difference 15473: note = a, c, g, or t
  misc_difference 15474: note = a, c, g, or t
  misc_difference 15475: note = a, c, g, or t
tcatgctttgctggaatcctcataattatttttaagcagctggctgataaggtcggctgcgatttttttgtcagaaggacgcagatgacgataattatcaaaaaccacagcttcctctttgtcgtggatcccgttcccaatctgaagcagtgccgaccggtctgttatatagtcgacggaaacccgcagatagtcagcaatttcgcatatcacatcatccggaacatgaagatatttgccatgcagatacccattcagcgtggttggggaaatggcgagatcctgtgccatttttcgctgtgtgattccgttttcctccattaataagagtacacgttcttcttgaattttcattagtgagagctccttttcgttaaattaaaaggattttagctcacttgactggtaaatattggaaagtaccgattttctgaatttattcttaaaatctaagaaaaaagacgatggctaaatccagccaccgtctaatgttatgatttgacctgtcagatattcatttccttcggcaagcgtcagaacaagggaggcaacctcctccggcattccgaatcttccggctggaatttcatctgttaatgcagcacgttcttcttcggaaaagcatgcattcatctgtgtgtcgatgcagccgcatgcaatggcgtttacctggatattgcttggtgcaagttccttggcaagacctctggtaaaagaattcattcctcccttgcaggcggaataggctacttcacaggatgctccaacatttccccagacagaggaaatattaatgatttttccggattttctggaaagcatatgaggaatcgccagtttacaggtggaaaatacggaagtgagattcacacccagaatatgattccattcatcgatcgtcatgtcagttagcagaccgacatatgagatcccggcattgttgactaacacatcgacaccgtgaaaacgctgctcaatatgtgaaaaaagctgtgtcacatattcgaaatcagagatgtcaccaatacttgcaaggacatctacggaatagtctctttccagatcgttttttaaatgtaaaagttctgtttcacttttggagcaggtgatgacaaggttataacctgcttttgcaaaagcaacagcgattgcacgtccgataccacgtgacgcaccggtaattagaactgtttttttcatgccattatatctttcttcatagcttccttatcgttatcatagaacttggtcaacagggcgagaagcttcattttgcggtattcctctttgctcacaagtggttgatagtaagagtaacgtcctttctgataagaagccagaaagccttttttcttagctcttgcaagaaaagtagatactgtctgtggtttccaggcagtatgatagcgctcgtttgtctgagtcatgactgctgctaaatctaattcagcctcattgttccagataattgtcattatcatttcttcgcaggctgacaattctatattcttcatagtgtcatctcctttttttgcttgtccgattattatagcatatagccagcagcaaaacagccggaaattgctattataatgtgaattttttgttaaattttatatttgtagtatgtttgggtgaaattttgtgtgaaagtaataaaaaaggatattgatgtgatatcaatatcctctcagtcagtcggaatgacgtgattcgaacacgcgacctcttcgtcccgaacgaagcgctctaccaagctgagccacattccgatatatttggttgtacgtccaaaaccgtactttgttatattagcataattaaatgcaattgtctagaaaaaaatgaatgtttttgcgggtaattatgtttacaattaaatttggatgtagtattctttgatgaggtgatacataacggtcactgtaaaaagaataaatacagagaatagaaaaaggagaacttatgggaagagatgtcattattgcctgtgattttaacagcaaagaagaagtagtgagctttttaagcaaatttcaggatgaaaagccatttgtaaaaatcggaatggaacttttttacgcagaaggacctgagatcgtcagaacaattaagaagatgggacataagattttccttgatctgaaattacatgatattccaaatacagtcaaaaaatccatggcagtattatcaaaccttgatgttgatatgtgcaatgttcatgcggcaggaaccaaagcgatgatgtccgcagcgattgagggactgacaagagcagacggaacgagacctctgctgattgctgtgacacagcttacctccacaagtgaggaagtgatgcaggaagaattgtggattgacaaaccgattgacaaaacggttatgcattatgcaaaaaatacaatggaagcagggttagatggtgtggtatgctctccattagaggcaggaaaagtacacgaagtatgtggagaaaaattccttaccatcacaccgggcgtgcgttttgcagacggagatgtaggagatcagaagcgtgtgacaacacctgcaaaagcaaaagagcttggctctgattatatcgtagtcggcagaccgatcacacaggcagctgatccggtagcggcatacagaagatgtgttgccgagtttgttggctagaaaaaggaagattatggagaagaaaaaaggaattagcggaagtaccttaaaaatgatcgccatcgtcaccatgctgatcgaccatatcggcgctgctgtgctggcaagacttctgatggtaaacgggctgggagaacttgaccagacaaatgcagatgcaattatgcagtggctttcagcaaatggagcactgtattggacatacacgatcatgcgaatgatcggacgtgtggcgtttccaatcttctgctttttgttggtggagggatttctacatacgcatgatgtgaaaaaatatgcgatgcggcttggactgtttgcattgctctcagagataccgttcgatctggcattcagcagcaaaatactcgaattcaattatcagaatgtcttttttacactattcattggtttgctgacgatgatcgcttaccgtgcagtggaagaaaaagaagagtggaatcaggcgttgaaggtgatcttgtatatcctgatcgtggcagcaggaatggcactggcgtattttttaaagaccgattatgccgaaaaaggtgtattctgtatcatggtcttatacattttccgcaagaaaaaaatgtggcagctcatcgcaggatgtgcatcattcatctgggagacaccggcgctgttcggttttatcccgatcgcattttataacggaactcgcggctggaagatgaaatatttcttctatattttctacccggcacacttattgattttatatctgctttgctatttcatgggaatcagcggatattcagcggtttagcttttgatagaaaatgaaatacaggcttgacataatacaaaaggggcaggaatcgtgaatatatatgacacaaatgaatcagtggaattgtacgacaaccgcggaattgaaatggcaagaaaatgcatacgcagggcaaagagagagtatgcgctcagatatctgattttactgttattatttgcgcttggcatggtggataaaatactgtttccacagatagaaataaagctttcaagctacatccttctttacagtctatgcatgctttcgatgatggggtttcgcattttccataatggaattgttgcaaagcggatgaaggattttacgctgcaggaaaagcacgattataatctggtcatctatcgagaaaatcataataaaaaatttttcttaaagagtataaccctgctgacaatggccaagcaggatatcctgatggaaaaaccgttggctgcaaaacaggcactttcccagattgcggtagaaagtctggaaaaaaatgtattgaagacctattattttctgcttgcagcagcatcatttcgtgcgagggaggatagctggcagatcgaactggagcattgcgctgcggtgccttctaagaccgttaagctgtcggatgatgaattacaggagattttcagaagcggggatcagaccaggctgatggacactgtaaaaacgtgggagattatggcagaacaggacacaaaaacagagccatatctgaatctttggtttggaatattgatggctgcaactgccgtcggttatggaatctggacatttgttgtgggaagttcagatagttattataattttatgcttattggggcaacgctgtttttagtgggcttgtggattttagtcagtgtaaggattgtttatcttctgagacgttcccaaaataatgggaagggactaggaaaaaagaagggaataagatttttaactatttttatcctcgtgctgatgtggtgctttattgtaggattgagtcttgtgatttttgtgggtgcaggaagtgatatacatacacaatgggaagcaatgaagacggggaagcagcaggaaagccaggatgaaacatatcataatggcacagagatttccacagaagctgacataaaaaatcaggaaactgaaaacacagagatggcatcagaaataatagaagatatggaacttaaaccggatcagagcaatatagtgaaatctggaccgatcacagacagtgaatatgcgtctttccagatcacagcagatgcatcttcggtggaaggctttgatgtgtttgatgattatgctgagacaatggaaaagaatttcattggcacatggtattgtccgagctggggcatggcgttccgtattcaggaagacggtgcttatatttatacattagaatctgaaaatataggattttgtaatcaggaaccatatgtatgggaactgacagaccgctcccaacaggggttatgcccaagactcagcttttattatgatgatagcaaggctggagatatgtttacatgctatgtagcaggctgtacagatgattatttctggtgtaatctgcaggaaatggtctggtacaggcaataggtgtaattttgtggatgaattgagagtaaaaaggagggcagcatttccacttccgaaatgctgcccatatattttaaccctgtggatacgggagaaaacggaacccacggctggaaaatgaaatatttcttctatgttttctatccggcgcatttactgctcttatatctgctttgctatttcatgggaatcagcggatattcagcagtttaaaatgtggaatgcttaaaagttttataagaaattatgcggcagattattaagaatgattaagaaaagcttgattgaatcccggactttctttttgtaacatgaattcagacaggaagtactgaatgattacaaaaagaaagccggggatgaaaaatgagtcagagagaaaacgtaaatccgagaagggaacaggatcacagaaaaaacagcagaagatatcagaaaagagcggcagcgagaaggcggcgcaacacgatttttatcatggagatcgtgttgctgcttattcttgcggtggttcttttttttgtgtcaaaattaagcaaaattgagaaaacaaagctggatatggacaagattgaggtcaatgaggatatttcgcaggaatcccggaaaattatgaagggttaccagaccattgcgatgtttggtctggacaatcgctccaatggaaatttgtcgcaggggcggagcgatgtcattatgcttgccaatattaataatgatacaaaagaggtaaaattggtttctgtctaccgcgacacttatttggataccggagatggaattttccagaaatgcaatgccgcctacgctaagggtggaccggagcaggcgatatctatgctaaatgtaaaccttgatttaaacattacagattatgtgacagtcgacttcaactcgatcatcgaatgcgtcgatttacttggtggtgtggacatggagatcacagatgatgaggcgtctctcatgaccggatatatccgggagttaaacgaattgactggaaataaggccgagaatcttacgcagggaggcacatatactttaaatggtgtgcaggcatgtgcatatgcgagaatccgatatggaggcggtgatgattaccgcagaacagagcgtcagcgtacggttttgaccgcgatggtgaaaaaagcacagcagtccgatcttacaaccgtaaataagctcatcaatgaggtatgtggtgatatccagaccagtttttcaaatgcagaactgttagcgcttgcgtcacaggttttccaatattccattggagacaccacaggatttccatttaccaagacaactagggttttgagcaaaaaaacaggtgatgtcgtgataccgtgtgatctgagcgacaatgtaaaagaactgcatatctttttgtatgaggacagtgcttacaccgcttccgataccgtgaaacagaacagtgaaaaaatcgtgtcagataccggatttaaatccggcgacggacattaaaaaggagggcagcatttcgaactttacgaaatgctgcccatatatattttaaccctgtagacattggaaaaaataatgtccacaggaattgtatttagacggaactgttccaaccccaaactgctttgaaaccggcagctccttttgatgattttatattaaaggaaatttgtgacagaaatttgactggaaagtgaagaatctcttaagcagttctatgatatttataaactgggtatcagtttttttcataacaaatctgtggaaatgcttgcacaaattgcccgaaaatggtaacttagttttgaagattaagcagggtggctttataagccgccctattctgttatagaaagcagggagacaaaatcctctgctcctgtaaggacagtcgcatttgctccgcaaacaaggaggattatgaataaatttgtcttacgtcaatcattattattacttttaactgcgaccatctggggcgtggcatttgttgcacagagtgtcggcatggattatgttggtccgtttacgtttaatgtgatgcgaagcatcattggaggtgtggtactgcttccatgcattgcccttttgggaaagataaatggaaaaggcaacacggaagctgcaaaaaaaatggatggcaaagagcggaagacacttttcattggcggtattgcctgcggtgtgcttctctgtattgcaagtaatctgcagcagtttgggatcatgtatacatctgtcggaaaagcaggatttatcacagcaatgtacattgtggttgttccggtacttgggattttttttggaaaaaaagtgagtggtaaagtctggtgtggcgttgggatcgcggtagccggattatatcttttatgcatgacagagagtggattttctgttcagaaaggcgattttctgttgatgctttgcgcactggcattttccttacacattttagtcattgattatttttccccaaaagcggatggagtgaaattatcctgtatccaatttttcacctgtggaatcctgtccggtgtagggatggttctcacggaaaaaccacagctgacgagtattcttgctgcatggatgccgatcctatacgcaggtgtcatgtcctgtggcgttgcatataccctgcagatcatcgggcagaaaggaatgaatccgacggttgcatcgttaattttgagcctggaatcagtggtttcagtaattgcaggattccttatcctgcatcagacgctttctctcagggaactgatcggctgtgtattaatgtttgctgcgatcattctggtacagcttcctgaccgcaaaaaatgaaaaggcattttacaaaaatatcgtagtaacatcaaaaaaactatgttatgatatttattagagaaaatgcgacgaaatgcaggaacaggtgacaattatgatgacttattataggacggacgatcaggtcatacatgaagaagaaaaattaagtgatggtgtatgggtgcagatgatcaacccgacacacgatgagtgtgaggagatcgctgagaaattaatggtagatattgatgatgtgaaggcagcactcgatgtggaggaaagttcccgtatcgaactgcaggatggatatacgctcatacttgtggatattccaacgattgagatacgtcatgaccagagaacttataccactattcctctgggtatcatcctgacacaggatatcattgtcacaatttgcacggaggatacaccggtattgcagaactttgtgcggagccgggtgaaagaattcagcacaaagaagaagcttcgttttgtgtatcagatcctttaccggacggcagcaatttatcaggcaaatctccggatcatcgataaaagacgtactgagatagaagaacgtgttggaagcgatacagacgactccgatctgatcaatctgcatgaactggaatccacgctggtctactttgcaacatcgctccgggcaaatggggtagtgcttgaccggctgacgcgctataaacggctggagcagtacccggaagataaggaacttttggatgatgtgatagtggaaaaccgtcaggcgatcgaaatgacaaccatctaccgagatatcatcaacggaacaagagagctgatgtcctctttgttggataaccgcctgaataacgttatgaaatatctgacatctattacaattgtaatggcaatcccaacggtcatttccggtatctacggaatgaacgtgaacgagaactggatgccgtttgcaaatacaccgcatggatttctgatcatttgtattatcacattgctgatctgtgttattacgatgttgtttttgcggaaaaagaagatgttgtgatagggaaagacagaaatttttgagataaaaggtatatgttgttttgagataaattctgaaaataacatatgcctttttacgtgaaatatcatggacaaggttattagaggatgttagtatgatttataattatgacgggattaggaaattagggaatgtttgacgaagataaaagatataaaattgtaatttgtgatgatgatgagacgtttatagatttattaagtgaaaaaatagaacaggactttgttcagagaaagatagtatgtcttatagaaaaatatagtgacagcagaaagctgttagataatatcggggcagaaactcagttgtattttttggatattgatatgcctgaaataaatggaatggagattgcagataaaatattagcaaagaatctacattccgaaattatttttgtcagtaatcatgaagaaatggtttttgagtctttccgttataaaccacttcgatttataagaaaagaaaaaatgaatcaggaattacaggaagccatttcggcatttctggacaaaaaagaaaaggaaagcagaatattagagattacaacaagagaggggaaatgttgtatagcagttgatgatattatatttttagagagcagacagcattacttgaagatttgttgtgaaaacgaaaatttcgaattaagaggcaggatttctgattatgaaacaatgctggaaaaatatggttttgtacgtgttaatattggattcattattaattgtaaatacattaaaatcttaaagaccaagaaaataattttatgtaatggcatggaaataaacatcggaagcaatagacacgataaagtgcggcacgcatatatggaatatgtccgggagaaaaataaatggaagttgtaagtatggctgcagagatatatgcaagcgcagcgggaacaattgcacagatatggattctttcagaattatttccaagaaaacagtctgtaaaaaaagtatatatagtgggatggattttgttaaatttctgcatcgcgcattttgtgttgttgccgaatatatggcagtcgctgcttggcatgggtgtgatgctattgatgtcgtgtatcatgcttgagggaaggacagaacaaaagatgttagttatcattgcctgcaatgtttttatgattctggtaagtatgctgagagggagaataacctttttcttgtcaggggaatctatcaatgagattagtattcagggatcggagagtctggcaagggtattaggaattgtacttacgaatacattatatttggtaacagcctatattttaacgcgtttttttcatgataaaataaaactgaaaaaagaagaatatattattataataatttattatattattttccttatagtggttttattatcaatagctatgtcacgaaatgtggacttttcgcttatatggcagaaaacatttttgattttagacatgttgatgtttattgccaatattatagttttaaaaatgatatttcatataaatcagcaaaatcactatgaaatggaaaatgcattgctgtatatgcagataacgcagcaggagaaaagaatcagggaagaggaaaaaaactatcgggaagttcaattattgcgtcatgatctgaaaagatatttggttacatatcgtcagttgcttcaggagggaaaatatgaggttatagaagctgacattgataaaatactggggaaaaggttaaatacaaatcattgtgtttatacagaaaatacaatactgaatgctgtaatttgtgagaagatggaacaatgttccattaaaaatattaaaatagaggtgcaggtaaatgcagacaaagatatggattctatagaatatggagttgtgttatcgaatttactggacaatgcgattgaggcggaggaacaggaaaaagaagaaaatagatatatctgtttgaatatgggagtggaacagaatatgattcatttggtagtaagtaactatatcgcagaatcggttctgcaaaataatacattattagaaacatctaagaaaaataaacagttgcacggaataggtttaagaggtgttaaagagtttgtaaaaaataagaaaggtgagatagagatatttgaagaaaatcatatgtttgtagtgcatatttgtgtatgtgtataaagtatgcctaaaatgggaaaagtacgccagatatattgtgaaataaataaaatgcggctattttagtagtaaagaggagatgaggtgatgccaatgaagttttaacatatttgtttaacaaaaagctatcaatcattaaatgtttactaagtaaaaattgagataggagaaaaaatgaaagataaactaaaaaaattaacaatttttataatagctatatgcattttatttatgtcatcttctgctacatatggggcaaccgttgaaaataatacaacgcaaatgtatagtttaacaacaatggaataccaaggacaaattatagaaattcctgtacttacccaaactactatgtctaaattaagaaatagtgtttttacatcagaggtttatgtgttcattccagatatgacagaagaaactatggaaaaaaatgaagaatatgtaaaggaaattaaacgaacagggaattgttcggcaatgcgtcaagctagatctatctattttggacttccgggatatatagcttaccattcaacattaaattacaatgtttcttattatcaaggctatttgcggctttatgatttaatatcatttaagctggaacgagaaatttacacgcaagcaccatttagaaatttttataatgcgactgcaaaggcacttcaagttggaaccattggtgatccgggaaaacctgaagtattgcaaaaccagcaaaaagaatacggagaaattaaatatgatacattatatacaataccttcagaatgggtgccaatagcgccagttgacagcggcacaaaagtgggggtaaagtatgttgttaaatacgaatatgcagacggtacggtaggttatttggaacagtttcatgaggtgcaataatgaattcgaaaaagggcaaaaaagtacatctggaaataattttattttttatagtaagcatttactgcttattggcacctaatagggaaacatgcatggatgatacctggatatcgagcatagtaggactgagtggttctgtgaaattattttcggtaaaattatttttgctggcaccattatggtggggaattttatgttacatattgttaaggcttgcaaatccttatttaaaggaacatggcgtaaaactgcaaataaataataggatatataaagcattgataaaaatatttacaattgcatttttaattgcattaatatattggtcatgcggatttaccttgtatgtagtgtttccgcctatgccgtttttggttggttactatattatgaaccatcgtattattttaggaattagctggtgtattgaggcaattcttatttatgtttcgtttgaaacttgacggttatctgtataaaattgtttatggaaattataatggtaaatatatgtgcgtgcgtataaagtatgcctaaaatgggaaaagtacgccaaatatattgtgaaataaataaaatgtggctattttagtagtaaagaggagatgagaaagattactgctaggatagtccatttttttattgaaagtaaagttattgatgaaacagatcaagagatttatgaatatggtttggaaatattgagtgaaaatgtaatgttaacagtctttcttatattatttggagttgcgattgggagaggcgtagaaacaggtatttttttgttctcgttttgttggttaagaaggttctgcggtggataccatgcaaaaacaaagcgaggatgtcatatagccacatttattacttatatagtatttcttattgaaatagttcatttttacaaggtgataaataaatatatggttgaaatatattttgtatgtttagcgattattattctttatgcaccggttcaacataaaaataaaatactatcagaatcaatgcatagaaaaaacagattaaaggcgatagtatatacattattattcggagtgattatttatatattcaaaattgagtttcctgtggtatcatttgccgttttgggaactttaatacaagtagcactactaatgataattggaaggagggaaaaaggtgattaaattgaaagttgcaaaaatgatggctgatattgtatatcgaatggcagaaaaaagtgttgatgaagcttctgcatggtatgaatatcaaccggaagtaccagaaaaattaaaaaagagaaatagttgcaaattagtttcgaaaaggtctactaaatagtatggtggaggagaaaaaagcaaatggatgaaatgatgttggaggtacaggtatggcttaataaaacttacaatgtaggtgtcgtggaggatagaaataccggtcagtgaacagcttgtagagacaacgcaggcaggaattggtattgataaatgtatatggtttcaataagaggaacagcaacaggtcctacgttttttactacatatgaaaatccagttgaaccagacatttcacaggaatttactgttttcaaaaatatatataattcaggtttatcaatgttttataactggttgatgagatagtgctattagtaaacatacttaattgagaaggagaatatgtatgaaaaacaaaattaaaatggatttagcgttattaatgttcgcaactgtaattccaaatactgcgtttgcacaggattcaagtaatcaagttccaagcgaacaggttgaatttgcagatatttatatcggagacgaattgattacagttccggttgtgatcgagtctgaaattgcttgcaaaacagcacgaagtggtgtacaatatgaagatacaatagagagtgcaacttattatatcccggtaactgaagaagggaaagcatataatgaagaatatgtaagcggtgcgagagcaagaggaacagcgacagatacttacttagatccgagaaaatatctgacagcaacgagtattatccgatatacaatgtcttcaaatgatgagtatgttttgattaacaatgttgcaattacgaaaaacagaaatccagaatcatcttctactggtggatatttatatgggattggaacaccgacggctagaattgtgtgtgttggtcttgcaaaaaataacaggggatatgagcaggtagtagattcccagagtgttccatggggaacaacaggagtgagcactccatcatggtggactcctgtaatgtgtggcagttattcggatcagtatagggggcttgtacaatatagctttaatttgatttacagtgatggcacagtcagttgtgcgtttacgcatggtctggcaaaataaagtaaaaaaggaggaggcaccatggcaacaaacaaatcattaagcagaagaacgattttcctgttagcggcggcaattttgtatctgatgattccacagaatgctacaatgcctatgccggaggaagcggtattcccattttcattgttgtcgttgtcgcaaatagcaagagtgtttgctttcagacaatggattgccatggatttgattctttttacagcagtgctggtcatcatgcagctgatccgtggaaagcatgaaggaggaatgtttcttagaaataaaactgcaagaatcatttgcatggcagcattcttagtagtatttcttccacttgcatacataacgataccaaccgtattcattctgggcaaaccagcctttatgagcatggatgcctgggtattcatgttcggtaaacagggcggcgcgaaccagtacattcttcatctctggtgggcagcatcagcggtactgctggacatgggaattgcgaaataaatttataaaaataacccgcatggaatcagaacatattctgtttgaaattccatgtgggttgtgttattttacgcaatttgaacataagttgggaacgttgttattgggagaatggatgggtttatcgttcaaaccgtccactcgctccacaaggcagcacaagtccattcgaggataccggaagcccaatctcatcggcggctaccgttccgtggtatttttttaacaccgtgttcatcatatagctcaataccgccggctgcaatccggttgtgtaagaattgatcaggaaaaacaaaggttcatcggacaataactgtccacacaactgtaccagaggataaattgcgtcctcaattttccagatttctcctttaggacctctgccgtaagatggaggatccataataattgcatcatagtgatttccacgacggatttcacgttctacaaactttacacagtcgtccacgatccagcggatcggagcgtccttgagaccggaggagacagcgttttcttttgcccatgtcaccataccttttgaggcgtccacatgtgtgacagaagctccggctgcggcagnnnnnnnnnngggttgcaccgccggtgtaagcaaaaaggtttaatactttgaccggtctgccggcttttttgatcttttctgaaaaccagtcccagttggcagcctgctccgggaaaagacctgtatgcttgaaactaaaaggctttaagttaaaagtcaggcttccgtaatggatctgccactgctccggcagatcgaaaaattcccattctccgccacctttggcgcttctgtgataatgtccgttcattttacgccagcccttttctgtttttggcgtgtcccagatcacctggggatccggacggaccagaagatatttgccccagcgttctaacttttctcctttggaacagtcaatgacttcataatctttccaattttctgcaatccacatattttaaattacctttctataagttcgtataatataaacttcaattgtttacataattatttcctgcgccacagcgatggcatgaacagaattagcagtgggtacaattccagacgaccggctaacatgtcgaacatcagcacaaacttggaaaaatcggaatacataccgaaattccttgtaggacctacaccgtcaagaccgggaccgatattatttaaagtagaagcaactgctgtaaaattcgtcgtcaggttgaaattatccacactgatcaaaagggtggaaaccagcaggatgaaaaaataaattgccagatacacattcgtagagcgcagtgtattgtggtcgatcggttttccatccatacggattaccttgacctctctcggatgtatcacgagagaaagctgcttcgggatcgctttgcataaaatcagcaatcgcgagattttaaaaccgccaccggtacttcctgcacaggctccgataaacatgagcagcaccaatatcatcttggatgtctccggccacagatcaaagtctgtagtcgcatatccacaggttgtgataatggaacccacctgaaaaaatgcatggcggaatgcctcgccaagtgagccgtacaagcttcggatattaagtgcgataaaagtaccagcacccagaatgatgccaaaatatacccggatttcttccactttaaaaatttctttcaactgctttgtcataatgtaaaaataagcgacataattgacaccgcttaaaatcataaagacggtgataatattttgcaacacagggctatatcctgcaatgctgtcattgtggataccaaatccacctgttccaactgtaccgaatgtcagcgtcagggagtcgaacatcggcataccgaaaatacataataaaacaatttcaatgatcgtaatgaccaaataaatacgatacagaatttttgcagtgtccttcacatgtggtactaatctgctgacggaaggtcccgggctttcagctttcatcaggttgatcgtcgaaccgcccatcagagggagaaaggacatgatgaatactaaaacccccatgccgccaacccagtgggtaaagcttcgccacatcagacttgtatgtgtgagtgcctccacgttcgagagaatgcttgcgccggtcgtggtaaaaccggagatcgtctcaaacagggcgtccacataagatgggatctcaccagtgatcacaaacggaatggcaccgaaaatacttaaaacgatccagcttaaggcaacggcaacaaacccctcgcggttaaatatctgcggatgctttactttttttaacgtgatcaggcatccgaggacaaaacagatgatccctataataaggtaagaatacgcttcgttttcgtgatagatcattccggtcagaaacggaagcagcataaaaataccttcgaatttcaaaacctgtccaagaatatagcctattgttgaatacttcatagcagcttaatcctccagaatctctttgatatcggatatattgtaaccggaggtggcgatcataacagagtcgccgggcatcatgcaatcctgtccacttggcacgatgacctgatgattacggtaaatacagcagatcaaagtatttttgcggatctttaaattctgaagaggaatattgcagacggcagaattctctttgagcaggaattccagaacttctgcttttccatcttccagtttgtatagcgcctccacattgctgtttaaagaattattcatggaacgcacatatttgataatgtactctgcagtgatcactctcgggtaaataatgcttccgagatccagcttattgatgacggaggtaaagttaatgcggtttacctttgtcactgtctttgcagaagagattccattcgcatacagggataaaagaatattttcttcatccagatcggtcagcgccgcaaaaccggctgccttttcaatgcattcttcagataaaagctccttgtcagtggcatcgccgcagagaattgtagctttcggaagctgctcgcttaaaaactcacagcgctgctggttgatttcgataatggtcgtcttgattccggacatcagaagactcttggcaaggtaataggatatcttacctccgcctgcgatgatcgtgttggatacacggtttttctctaagccgatcttgcggaaaaagtcgatggcatccctgcgttttgcaacgatggagacgatgtcatttgccgcaaattcaaaatcaccgtttggaatgatgacttcctcactgtttcttgcaatcgtgcagaccagaatatcattgcagtgcagggttgcgtggaatttggaaagtttcaggccacataaaggggagttacttcctattttaaagtgaagtaattccacacgtccctttgcaaaggtatccacgcggatagcagaaggaaactggaaaacctttgcaatctcatttgcagccgtaagttccggattaatgatcatgctcaatccaaattccttctggagaaaatctttttcttcattatatataggattgcggatgcgggcgatggtctgacagtggccactcttcttggcaatgacgcagcagaggagattttcctcatcagatcctgtgacagcaatcagcaggtctgcggtttcgataccggcctgctttaatgttgtgtggcttacaccatttccaacaatccccataacatccactgtatccgtaagggcacttactttttcgggacgggagtcgatcactacgatattgtgattttcgatacttaaggcttctacaagcgtgcatcctactttaccgcagccaacaattataatattcat

SEQ ID NO: 624 - DNA, 7351 bp, unidentified
  source 1..7351: mol_type = unassigned DNA
ttattttatggcgtcgagtgcgtttgagatatctgcaatcaaatccaccttgtcctcaagacctaagcttattctgataagctctgccggcactcctgcttccttaagctgctcatcattcatctgacgatgcgtgcttgttgccggatttaagcagcaggttctcgcatctgccacatgtgtctcgattgcaccaagccttaatgccttcataaatgcagacgctgcctctctgccgccctttaagccaaatgatacgactccgcagcctccgtttggaagatacttctgtgctctctcatagtatttgtttgaaggaagccctgagtagtttacataggcaacctttggatgattttccaaaaattcagccactgcctgtccattttccacatgctttggcatacgcacatgaagtgactcaaggccaagattcagcataaatgcattctgtggtgactgcacagaaccaaaatcgcgcataagctgtgctgtacatttggtgatgaacgcaccttccttgccgaatttctctgcatatgttatgccatgatagctgtcatcaggtgtgcacagtcccggatatttatccgcatgtgccatccagtcgaatttgccgctgtctacgattgctccgccgagtgtggctccatgtccgtccatgtactttgtggtagagtgtgtgacaatatctgcgccccactcaattggtctgcagtttacaggtgtcgggaaggtattgtccactataagcggtactccgtgctcgtgtgccacctttgcaaaaagctctatatcaagcaccgtaagcgcaggattggcaatagtctcaccaaacataagctttgtgttcggtctgaatgctgcattcagctcctcctctgtagcatcaggagatacaaatgtagctgtaatacccatctttgccatagttaccgcgatgaggttgaaggtgcctccatagatggatgatgatgccacgatatggtctccgcactcacatatgttgaacatggcatagaaattggccgcctgtcctgatgatgtgagcatggcagcaatgccaccctccatagctgcgatttttcttgctaccgtgtcacaggtcggattctgcagtctgctgtagaaatagccctctgcctcaaggtcaaaaagctttcccatgtcctcgcttgtgtcatatttgaatgtagttgactgaataatcggaatctgtctcggctctccgtttccggctgcatagcctgcctgtacacactttgtacctatactgtattctttcattgtgcttctcctttattatgttaatgtttcagttggatatagtatattacatttggcgcgttttgacaaattcagattatataacttttatcatcataaattcttaagctttataacatattgtatctaccagtgcttcatagctgctgtcatcagcttgcagtatctctctgacattgtgctgctctaatgctgctgttgttttttcacctatcgagtatgctgtttccacgtatgcattctccggcagcatatgaaaaaatctttccacatttgatgcgcttgtaaaaaccgcttcacttaccatgtttccaatgctttcagtaatactctcatatgcctgctcatttacatatgcatcaattttttctaattcacatatttctttaagccctgcctcaatgtcaggtgaagcctcctttgccgagaaaatgcagactttgatttcatcattatcgcccatatacgaactcaattctcctgcaagtccttttccggtctgttctgccggaataatatctgcctttatgtgatgctttgcaagctctttttctgtagcttttccaactactgcaaaccttgcatttgctataagtctgatgtctgcccctgccagatccagattatagaaaaatgatcttacaccatttttgcttgtaaaaactatccagtctgccgatcttactttatcggcaaattcaggaattattatcggctttattatgcctgtcttaaccggtgtgacatctgctccaagctgctgtaattttgctatcaattcgtttgttttgatatacggtactgtgatctttcttccaaacagcggtcttttttcaaagaaatcaagcctgtcattcagtgaaaccacatctcccacaacgattatagccggtgatgtcagctttgcttcctcaatcttttctccgatatccgcaagcgttccgatacatttgcgctgtgcggcaagtgtgccgttcgatatcactgctgccggagtatccgctcttcgtcctgctttcataagccctgctgcaatgctttttacatgcgcaagacccatcaaaaatacgcaggtgattgtctcatctgtaagaagggaatagtctatatctgcctcctcatcctttctgctgtgcgcagtgatgacctgaaagccttttgctatacctctgtgtgtgataggtattcctgcagccgcaagcgctgcaaccgatgaactgacacccggtaccacttctacctccacatttctatctaccaggtagagagcttcctctccgcctcttccaaagacatacggatctccgccctttaaacggactacaagctcatgatattttgatttctcgtacaaaagctcgtttatggcattctgcttcatgacatgcttgtgattttccttgcccacataaataagctcacagcctgcctttgccattgaaagaaactctggtgatgacagcctgtcatacaccagacaatccgcctgttttatatatttttctccttttaaagtgagcaggcccgtatctcccggtcctgctccaactaatactacttttcctgtgttttctctcatgattttcctaattactttccaatttataccgaatatcgtgcaccgcacgctccacaatattgtttctgtctgatgtcatatcccatacctgctctgtccttgcaagctgttttccatcctctgagccaaacatcgcaagaagctttagcctgttatttttgttgctgtcattaccgcggtctttttcacttacaatatcacagtatgcagctacaggcaaatgacagtttccaccgatccgctttaaaaattctctctcaatgcctgcgcacagattggttttctcatctgacaaagcatcaagctttgccatcagcttagcattgtcagcacgtagctcaatcgccagtgtgccctgtgccggagccggaatcatatcatcctccgaaaagtactgtgtgatctcagaatctcttccgatacgctttattcccgccgctgcaagtacgattccatccagcctgtattcgttatacttattctgtttttcgttagctatctcattgttatttacagtattatcggcaacctcttcatatataatttcaccatcatatagcttacgaagcctcgtatcgatatttccgcgtatgccaaccaccttaaggtcaggacgcagctttaaaagctgatattttctgcgcttgcttccggttcctatcacggcaccatgaggaagctcatccagtgaagcggcattttttagcaccaaaacatcccttggatcttcacgcttccatgcctttgcaaatgtaagccctgctgccggttcatcaggcatatccttcatggaatggactgccatatgaatctttcccgataaaagctcgtcctctatctcctttacgaagataccctttgagccaatcttatcgagtgcctttttctgctctaaatcgcctgttgtctttatgataacagccttaaaatcatcatccggatatgctctttttaacttatctatcacgtaatcagtctgaacaagagcaagctttgagcctctcgttcctattaaatacctcattttactctcctacggatcatgccattttccatttatcatttataaatgaacaacaacttaaaatctgtaataccatactttaaactatatttccggaatccttccattatcaatagctgcacacaatatttctttaaacacacgctttctctcggcttccgtgtcatattgcgctattactctttcgcggatctgtcccatgtattcgttcagctcaccaagaaacggagtaagaatctcctgctctttgcctttcagatactgagtcagcacagggctgtttcctccgctcgaaaatgccgcaacaagattcttttcctttatgtatgacggaaaaataaagctacaatcagccttctgatcgaccgcatttaccatgatgtccttagctttgcaatactctgcgatctcatgatttaaagcattgtcatcagtggcagcgataaccatttccatgccgtcacagtctttttgctcaaaccttctttttatgaacgtaattctatctgctgcatccgggtccgtctgattgttttctttatttgccgtatatgagcccgttttatcctcgcttgctatatcatcaattgtaagctttctcagctcatcacatatatcctctgccacaaccgtgaccttcgcgccaaaatccagcattacgatcaccttgcggtatgccacatttccaccgccgacgatcagacactctctttccgtcatatccacaaacatcggaaaatacgccatttttatctccctgtaataccatatccatactttatttcatacattatttcatgccttattttatactttattatacgctttatgctttattttttgccttatgcttcacactgtatccattgagcattccttcaaaaacaggacgaagcttagcagaaaacactgctgccgatacgcataatataaagtccggtgcaacagttatcagacagtaatctactattacgatgccccagttgacaggtgttgccgcatagaaatttttcatgcagtaaaagtatattgcaccaactgtataatatgccaccagtccaaccgttgccggaagaatgagtgtaaacgcattggtctttttaagcttttctgtgatagctccgattaaaaatgctgcaagcacaaagcctaggaggaacccaaagcccggtcttaaaatgtatgtaggaccaccacctgccgcaaatacaggcactcccaccagtccgatgcacaaatatactatcacgctaagcgatgccagctttgccccgagcagaaatcctgccatcagcacaaagaaccactgtaatgtaaaatgcatggtgtacataggaagcggaatatcaatcttgataaatgctccaactgctataagtgccgcaaaaagtgcacatgttgtaagttccttcgtttttaatttcattttcgaacgctctttcgttttattaaatatacatgctataataacatctttctctaaaaaagaaaagccatcttcgatgaagctgacttttctttgcagctttcgctgcgactcaaaacattaacatatgatttagaagtaatattcatcagaatatattcgtaaatcctctttcgtgacctgtccaccctcgatatgaaacgagttgattacaggattttctgccataagcgacattatcatgtagctcgcatttggatcgtatgcaagctttatatcctcatccgatggccttgaagggctagacggatgtgaatgccagttgccaagcggcttaaggccatttactctcatgtcctttatggctgccagctgctcctttggatccattgtgaaatggtcctcagcatggtctgtattcgtcaggtaatatacctttgtgatgagacgaccgttttcgtcctcactgcctgctatcagaccgcacgcctcctccggcagatgctctttagcatattttgctatttcatccagaaacggatatttcattcttatgatactcatatcgttcctttccttactgtctttttattcctgtgtacgaggtgcatcaaatctgcccgctgtctcctcgcagacctcctgctcgtagtcgattggctcgagaatagtcggatggtcgccacagactgcacagttgtgtatatcctttggaagcttaatcttgtggaactccatggtgagtgcatcatatgtaagcagatatcctgtgagcagctctccaacaccgattaaatacttgatagcctccatagcctgaagcgaaccgattactccgcccatagctccgataacgcctgcctgcttacatgtaggcactgcatcctttggtggcggattcttgaatacacatctgtagcaaggtccctctcccggcacatatgtcatgagctgacccttgaaacggatgattcctgcatgtgaaaacggctttttctcaagcacacatgcatcgttgattaagaactttgccgggaaattgtcagttccatcgatgatgaaatcataatccctgataagctctctgatgtttgacgcatctacaaacatacggtatgtattgacctgaacgtccgggttcatggcattcattgtctcttttgctgactttaccttggctttgcccacatcggctgttccgtggataatctgtctctgcaggttggataaatctacctcatccgcatccacaataccgattgtgccaactcctgctgctgcaagatacatggctgccggagctccgagtccgccggcaccgataataagcaccttgccctttaataatttcttctgacctttaacgcccacctcattaaggataatgtggcgtgaatagcgttcgatctgctcatcagtcattgccattagcatccacctcccatgaagtaaaggaactctacattgtcgccatccttaagcactgtcttgggcttatcctctgtggcaacaaattcctcatttattgaaactgttacatactcaggcatatctacattctcaagctcgataagctccggtaatgtaagtccatccttatattctttcttctctcctgctactgtgatagtcattttatttcctcctgtgtcacagattgtggtatctgtatgtgttattatcctgtatcagactgctttatataataatctaaaaactataataattcttcaacccatgctttcaaatcggcaggcttttgtgcgccgacctttctgtctaagacctctgcgtcttttacaaaaagcagtgtcgggtttgcagtcacctcatactcatcagcgagctctccgtcaaagtttgtgttgaccttgtatacgtgaagcttatcctcataatcatcctcgatatctccgagaaccggtgccagcttcttgcaggccacacatgaatccgagtaaaaatcaacaattaccggaagcttgctttttaatactttttcatcgaaatcagcctttgaaattcttgctgccat

SEQ ID NO: 625 - DNA, 25655 bp, unidentified
  source 1..25655: mol_type = unassigned DNA
gtgttgcggaagccctttgcaccggtatgggtctcgatgccggcagtctccggcaagccctgcgcctgtgccatcagggtgacggtctgcagcacatcaaagccgccgatggcaccgctggtcaggtgcaccttggcaccgccctccacggcagctgccttgacctgtgcgtagaaatccagatccgcaaaggcaccgatggacagaatgaccagattcacgccccgcttcagcaccgggatggccatagcacgcaccgactccaccgaagcggcctccacgatgtactccggctcaagcgccagcagcgcgtccacgtcctcacaaacagcgcagccgacattggcggcggtcttttcagccgaggcgcgggtgcggctggtcacgcccaccagctcgtagtccggcagcagacccttcttccacgcgtcaaccacgatgttgcccagaaagccgcagcccacaatacccaattttgttttcatatccgtatcctaaactcctttttctgcctgtggcagcatattcaaagccagtataccataccgggcacaaaaagggaaataatgtttgcagcagcccggcggtgcaggacataaaaagttaacaaaataaattacaaaaaaattacaataccctattgcaaaatggtttcaaaagagttacaatatggttacagcaagggcaaagtcccaaggctgtgtgtgaaatctttttcttcttgtttttgggatactgggcgcgggtcctcctcctccggctgttctccttcacagctatgacccatgcgccgcacaggcagtgtcccgcttcgtgtgcaaaagggctcgtccgatgtttcggacgagcttttttgcattctgtaagctctgttttggctgcaaaagtgatacttcaaaaatcaaagtatgaccaatgcctaaaaacgcttggcaatttgtctgtttttccgcaaaggacaattataaagtttggcgcggcaggggtttgtattcttgcgggctttgtggtaaagtatatacaatcaatttataggcagcaaacatgaaggattttgatgctgatctttatcggatgcgttaaaggtgtatctggaaacaaagaaaatgacgaatatttcgcaagcacaagcgggatttaaggcaaatagccgcaggaatcctttgtggatttcaaggctgtttaacgcaaaatccagctgtgcttgtagaaataggctaaattttcgacttttcagatacaccctaagagaaaaggagtttgattatggcttatttctacgaagaaccctcccgcacctttggcgagtacctgctggtccccggctattcctctgcggagaatgtgcccacggcggtcagcctgaagaccccgctggtcaagtaccgcaagggacaggaggagtgcccgctgcagatgaatatccccatgatcagcgccatcatgcagtcggtctccggcgataagctggccattgcactggctcgtcagggcggcgtttcctttatctatggctctcagagcattgagaacgaagccgccatggtgcgccgcgtcaagagcttcaaggccggctatgtggtgtccgattccaatctggctcccactgccaccctgcatgatgtgctggaactgaaggcacgcaccggccactccaccatcgccatcactgccgacggcactcctaacggcaagctgctgggcatcgtggcttcccgcgattaccgcatcaaccacaccccggacgacgcctgcgtcaccacctttatgacccccgttgaaaagctggtcaccgctccggccaacacctccctgcacgactgcaacaacatcatctgggacaacaagatcaacactctgcctctggtggatgccgagggcaatctggtgtatatggtgttccgcaaggactacgattcccacaaggccaacgtcaacgagctgctggacaagaacaagagctatgttgtgggtgccggtatcaatacccgcgactacgcccagcgcgtgcccgcactggtagaggccggtgtggatgtgctgtgcatcgactcctccgagggctactccgagtggcagagccgcaccatcggctggatccgcgagcactacggtgacaccgtcaaggtgggcgccggcaacgtggtggacgccgagggcttccgcttcctcgctgaggctggtgcagacttcgtgaagatcggcatcggcggtggctccatctgcatcacccgcgagaccaagggcatcggccgcggtcaggctaccgctgtcatcgaggtcgctaaggctcgtgacgagtactacaaggagaccggtatctatgtgcccatctgctccgatggcggcatcgtccacgactaccacatcaccctcgcactggctatgggcgcagacttcgtgatgctgggccgctactttgcccgctttgacgagagccccacgaacaaggtgcgcatcaacggccagtatatgaaggagtactggggcgaaggctccaaccgtgcccgcaactggcagcgctatgatctgggcggctccaccaaactgagctttgaggagggcgtggacagctatgtgccttacgccggtcctctggcagacggcgtgcagaccaccctgtacaaggtgaagagcaccatgtgcaactgcggcgctctgtccatccctgagctgcagcagaaggccaagctgaccgttgtttcctccacctccatcgtggagggcggcagccacgacgttgtgctgaagaacgccacccccagcattatgaacggctgagcctgatttatttgttataagcgcagagaccgctgcacagcgtttgtgcagcggtctttttgcgcgaaaatacttgcacaggcagggaaatcgtgctatcatgatagaaacgctctgtcatgacagggcggcagatccccctgccgggcaagcggcaggcggcgcgcagtagggaagaactgacgccgggtacagatagagaggaaaacattcatgaacgagatcaaggttgagccttatatccccgatgaggactacgataaccccgcgatggtggtggatttttacgaattcaccatggcaaactgcctgttcctgcatggctttaaggataccacactggtgtttgatatgttcttccgcaagaacccggacaatcagggctattctatcagcgcaggccagcgcaagctgacccgctttttgctggactatcacttcaacgagcaggatatccactggctgcgcaccaagggcatgagcgaggagttctgcgagtatctgcgcacctacaagtggcagggcgatatgtacgccctgcccgagggcacggtctgctacccccatgtacagatggtgcgcatcgagtgcgatctggtgggcgcgatcctcatcgagacctacctgctgcagaccatgaacttccatagcctgatcgccaccaaggccacccgcgtcaccggtctgaacacccacaccccccgcagcgtcatggagttcggcacccgccgtgcacagggcgagagcgctggcaacgatggtgcttacgccgcagtgctgggcggctgcatcggcacggccaactgtctggccgagatgaagttcggcgcagaggtcaaggccgtgggcaccgtggcgcacagctttatcgagtttttccccaccgagttcgatgccttcaaggcctttgctgatacctacccggattcggtcagcctgctgctggatacctataatattatggaaagcggcctgcccaacctgatcaagctggacgattatctcattgagaaataccccaacgatcccaaccgccgtgtcaagagcgcccgcatcgactccggcgaccttgctcgcggctccaagcggctgcgcaaggcactggatgccgccggtaagccctacatcaagctggtggcctctaacggtctggatgagaagaaaatcgccaacatggagctgtacgagcacgcacacttcgactcctacggcgtgggtgaaaacctcatcacctccgcctccgaccctgtgttcggcggcgtgtacaagctggtggcggtgaagaagccggacggcagctacacccccaagatgaagtgctcggactccgccagcaaggccattatcccgggcaaaaagatgccgtggcgtctgtacgacgaaaacggtcaggcgcagtgtgacctgattgccatggacggcgaggtcatcgaggccggtaagccggtcaccatggtcaatctggactcggacgccatcgagcgcaccatcacctttacccccaccgctgtgcgtccgctgctggtgccgcatattctgggcggcaagctggccattgaactgccctctattgcggagaagaaggcctatattgcaaagcagctcaccgaggaaacttgggagagcgagctgcgtctggagtgcccccacaagcactacgtcaatatgacccccgcagtggccgagtgccgttcccggatgtacgccgagctgcacggcggcaaggtgtaagcagcaccgaataagcggtttttcttgacaaagtacggaaactattgtatcataaatatcgctgaatttcatgttacttcaagtgacggcaagtcatttggatgacattttacctcacacctgttattcccggttccctcccaagccagagggcagcagggctttgtaagccgggtttgcgccgctgtggtgaaattggcagacacgagggacttaaaatccctttctggagacagagtacgggttcgacccccgtcggcggcatgtagaagctcagaattgttcgttgattcgaatgattctgggctttttctttttattccattttctggaagtgttgagcgggcgagagggatttttcgcgaaaaaaggaggagtctctctcgtgcgtaaccgtgatttaagacccgctgccaaggcaaaccccaccatccaacaggcctttgaaaggttccaaaagtacaaccggctcaagaacctctcccaaggctcgctcgacttctacgccgcaaagggcagaagcttctttcggtttctgggggatacggaacagcccatccataccatcacagaggaaacggtggaggattatatcttctaaacgagttcaatgggctaagatggtagttcttatgtgtgacctcaaacagatatacacaaaactgtgcacaagttctatatcagtttcaaaggccgcaaatccgccgggctgtgtgctgttctgatattaaaagccgctctttaagttcacttcttgaccgaataccgcataaaaaagagccctgctactcgtgtctgagcggcagagctctgttgctgtgggatgtgctataggaaatgatgataggtgtcagcgctcaatgatttcagtggtgattctggattgaccttcaccaagaagcttgccatacgtgcggtctgagattcgcttgaactcctctgctttttctcttgatgccggtctccatgcagtgctcgtgcaccatctcgtgcagcagagtggaagcggtctcctcgatggggcggtcaagggtagccgacgaaatattgatctcatacttgttctcgccgcctgcctgccagaccttggaacaggtgatatgaccataggcggacggggtctttttcaggctaatgatgggctcgggcagcttgcctgcaaagtagtgcttcttgagctcgcggaacatcttttccagctgaccggcagcgcgggaggttttgacagtctgtttcatgatttttcgaacctttctcttgataaaaaaggccgggacaggtataatattggtgtagcccgccccggcgggtgtagtgggctctatacaacgcaaactttggtcagggagcgctgtatggggcttttcttttcaggtgatgctcaggtgggtgccggtgactgttttgctgtactggtcgtacaggtcgggagctacggccttgatggctttgctgtccagtcgggtgctggagaaatcggacaggcggactttgcgacagcctacttccagatagttggtggagcgctcagccagtgccccgcggatctggatcttcagctgctcctgctcagccagtgcggcctcgatcagttgggcggcctccttgtactgctcgacaaggatcagtaaaacgttgatactcatgtgtgtacctctcttcaaatcgttggtgaatggtcggatgtgagaaccggtgttcccgatggcatgagtataaactattcgcgggaatatatgaagatggaatgttgtacaatgatttgggcgtaaatttgtgcaaaatatatattcacgagaataggtgatagatgctataataagcactataatgtacgggaggaaaaatcaatggcaaagacgagtgcagcacaacagcgtgcagttcacaaatatgtgaaaaataattatgaccgtttggagctatcggtgcccaaaggagaaaaagtaactatccagcaggcagcgaaacaggcggggcaaagcgtaaacgcctatatctacgaagcggtatgcgccagaatgcagcaggaaaacgccacgtcagacaccccgggggtagttaaaaatctggaaggggacactgacccagtagaatgagatagttgttttatcttcccagacctgattaaaatctagcagcagaaggcctctgtctttcacagaaatgtgatcggcatgggcctttttagcgcaaaaatagcctgacccggagcaggtggtagctgcagtgacgggatgctgattgtacctatatataaataggggcagcaggggagaggataaaaattatgtagtactgtgcgatatacctcgtcagaactcctgactgatgtgacagcatataccggcttttcagcgcgaggggacgctctctatttaacggttgtcattacatcggggttgctatcacacctgactgcactctccagcgccttggacaactatatgaccacacattttgtccatcgatgatttcatctggagctttcatgcgaaactgggcaatgtgcaaaaaagttctggctgaatcgcatttttttctaaaacatggatggatacatttcctcggatttctattgattcccagatataaccatgatagaataataagagaattcagacggccacgtagaagaactggtatcctctgttttgtgatggaaggatacgccttgattgcggtaaggaggtgaatccagtgggcttatgtctgtttgcgaacaatcatgtgatagatcatgaggaaacccgaatgatagatcaaaataaaaagcccactgctgtttcccttgctggcgtgatgcgcaaaggtgaaaatggagtgggcttgttgaggttctacaaaaatgtgaaatattgcatactggaagcaatgcacatacggcgcttgagctgtagcatgacgttctggttttcattacggccacattgcatttgaaatgaccttgggcgaagctgtcgtccgagggcttttgcttgcccggagatcaggaataacggtctgccggttttaggaaaagaggaacggttatctaaaaggaaggtgcttgcgggaacggtgtgagttaaagggattactttatagcagtttgtgtttttaatgcgcaagcagcatccacaaactgcatatcgcaaatatgccgtgttgatagggcactatttctgaaaattgcgataaaacgaatgacgataagaagtgcatagacaaggatttatgtgaggagaaaaaatggctacgaatactgttggaatcgataaagaagttgaagttaatcgcaaggaaaatctgcgcgaccatcgcctgtactggatcggacgtcggacgcaggatattattttatcttctgtggcactggtggtgttgtcaccggtcatgctggctacggctatcgcaattgtggtggatgacccgtctgctggccctgttttcagccaagagcgcatcggccgcaacggcaagcccttcaagttctataagttccgctccatgtgccccaacgcagaggcaaagctggacgatttgctggatcagaacgagatggatggtcccgtgttcaagatcaaggatgacccccgcattactcgtgtgggcaagtttatccgcaagaccagcctcgatgagctgccgcagctgtggaatatcctgaagggcgatatgagcatcgttggcccccgcccggcgcttccccgcgaggtggagcagtacggcgactacgaaaagcagcgcctgtatgtgacacccggcctgagttgctattggcagatcgccccgcaccgcaacgacctctcctttgaagagtggatggatctggacgtgaagtatgtcaaggagcgcagcttctgggtggattggaagattatctttaaaaccttcaaggtgtgtctgctggggcgtggggagtaaaaaagtacatggaaggaatacggttggagagacgagatggagagagaccttagaattgcggtatttggacagaagcggttgtcaagagagggcggcgtggagatcgttgtaaaggagctgtgcacgcgaatggcgcagcaaggctgtcaggtgacctgctacaaccggtctggacatcatgtgagcggtgcagagtatgacgatatcgatagcacgaactatgaggaaatccggcagaagcgcgttccgacgatagaaaagaaaggggctagagatataatagggtcaaccaagaaaaactacgataactaaagggttttgacagcttgggttgtccttcaaatgttttatttgttgaaaaactgcaagaagcgggaaatcctgggggttatatgtaggaggcttttggaagctctgttttgacccacaaaaaggagcagcaaataaaatagaaggataacacaagcctacggtagattgcgataagtggtctgccgtgggcttgttgctgttttataaagagaaaagtgaggagaatgaaaatatgaaaaattataaaatcgccgtagcaggcactggatacgtcggcctctcccttagtgttctgttagcacagcataatcaagtgatggctgttgacattgtgcaagcgaaagtggatatgattaacaatcataaatccccgattcaagatgactagatcgagaagtatcttgcagagaaagaactgaacttgatcgcaacgctggatgcaaaggctgcatactcggatgcggactttgttgtaatagctgcgcccacgaatgtctacgcaacaaaccgtattgacgtagcattgccaaaaagaacctgttttgcacactaattgagttactgaaattggccatatttcacagctatatgagctataaatgctagatacttatacaaaacgctgaacttttgacccctgtggcacaaaattggcacaactttttcagaagaatcatagaaatggcggaaaacaagagaaagcaacaaaaatccatgagtttatcattaacgtctgaaactgctgttgagtacactatctgacccgctaatgacacctacatcataacggtttgttgagtcatgaaaattagagaaaaacagatgatttctacttcataaaatagctgttgagtagagcatggatggcaatgataaatacatgttttgagtggttggagtgaatgatttgttcatgatgaataatgaatggtgagaaatggactgggtaatatatacagttttaacaaaactcatgcgccgacagggttcgattcaacaatccaacacttagaaaaaacgtcattgcagggtatatggggttcgactgtataaaacagcacttcggctatagagaaatagagacgagtgtactcaacggatgttttatgaagtagaaaacaaggaaaatatgattgctggggtaattggatacgacagcataagaaaacacttagccgtgtgagcggcaagaggaaaaagaaataccatctgtgaaaagcagatgtgtacatagatttgcggaagaaaaatggcgaggagtatttgagggatgaggaagaataaaattagaatactgcatgtggcgcaggccgcaggtggcgtggatcgctacatccgaatgcttctcaagtatttggacaaagaaaagttcgagaatatattggtttgctcacaggatttccatgaagaagactacagaggtttggctgattcttttgaacaagtcgagatgacgcgagccattggtggcaatgacttaaaggcgattagagaggttagagcactgataaagaaatataacccgaatatcgtctatgctcattccagcaaggcgggggctattgctcgtgttgcggatataggattgagaaatcactgtgtatataatccgcatggctgggcttttaatatgcgctgctcggcaaagaaaaaagcgatatacacaatgatagaaaaaattgcagcaccgttctgcgataagattatttgtatttctgatgcagagaaacaatcggcattagacaagaagatttgtaaagaggataagctgcaagtcatctttaacggtgtagacatcgaagcctatgaaaatggagtgcatggtgcggttagacgaaaagacctgagtataccggaagatgcgtttgttgtcggcatggttgggcgaatgagtccacaaaaggcaccggatgtctttattaagatggcaaggcaagtgaaagatagagtctctaatgcacattttattattgttggcaacggaaaccaggaagccgagattagaaaatatgcaaaagccaacggtatttcggatagcctacatataacaggctgggttgataatccaatgagttatgtggagctttttgatgtcgcatgtttactgagtcgatgggaaggcttcggactggcattgcctgagtatatgatggcgggcaagccgattgtggcaagtcgggtggatgccattcctaatataatccgagatggagaaaatggtctgcttgttggagtggatgacgctaccggagcaagtaaagctgtgttgcgaatctatcaggatgatggattgaagaatagattggtgacgcagggcatggaagatgtgcatagtaggtttaacgctcggagagtttcagaagaacacgggaaactgtttgagagattataaatgacggaggaatagatgttatgaaaggcattattttagcaggtggatcgggcactcgtctatatctattaacgaaagtaacgagcaagcaacgcgagtgcagagggttacacgctggaagatggcactgcgctgaacctgagcgataaagaccagaattggctgggacggaagaatacttttaaattttaacggagaagaaaattaaaatgattacacctaaagatattgaaaataaaacaatgagtcctgaaaagagaaagtctgcaaaaaatgactatttcgctttttatgttggaaggcccttgtcttatatcttgaccattccgtttttatatacaaatatttctccaaatgcggtttctttgatttctatcattccaattattattggatttgtacttatgtgtattggaaccacaaagacaatgctgattgcaggatggttaatgtttttcctgtggaatcttctagacggagtagatggaaacattgcaagatataaaaagcaattttcgaagatgggcagtgtatatgatgcaatgagcggctacatcgctatggttttatccttctttggatggggtgtggcagcagcacacaatcctggattattccaaagtattgttcagttaccgatggacttctatattattctcggtgcattatctggaatatttgtaatatttccacgcttcataatgcataaagcaattactacactgggtgatcaaggttctatgaagacggtaaaagataaatcagaatatggtttcgttaaactgattgccctgaatttaacatctatagcaggatttgttcaagtattgatgttgattgcggtgctttttaacattatggatttgtttaccataggctattttgttttgaattttatggttatggtagtttctttaaaaagtatttttaatgtgaagtaaaaaggagattaagcagtatggcaaacattgcaattattatcgcaggcggttcgggacatcgtatgggacaagacattcccaaacagttcattaatgtatatgataagccgattcttatttacacgttagaaagttttcagaagcatcctcaaattgatgctattgaagtagtttgcattgacggttggcatgacattctgtgggcttatgcaaaacagtttaatattgataaattaaaatgggttgtttcaggcggaagcacgggtcaggagtctattagaaacggtgtttatagcctggagggtaaggcaaatccggatgatacggtaattattcatgatggtattcgccctcttgttgaaccgtctgttcttacagatgttattagtaaatgcaagcaatatggaaatgctgtgacatccatgccgtacaatgagcagatttttgtcgtggataaggagaatgaagccacgaccacgcagtatattccgcgtgaaacgctacgtcgagtttccacaccgcaagcttacaaatttgatttgctggatcgtaaataccatgaagcgtttgaaaaagaaatcggtatttatggatcatcctatacgaacacaatgatggttgaattaggagagcgcctttactttgcagccggctccgataagaacatcaaattgacgaccaaagatgatcttgaaatgttcaaggcttacttaaaggcagataaagacagctggctgaaataaggagaggactatgatagataattcaatttacagagaagacattaaatatgtagctggtttggatctgccgtgggaaaagctgagtaataaaagtatcttaattaccggagctagtggcttgattggcagctttttgattgatgttttaatggaaaaaaacctgcatggattgaagtgcaaggtatatgcattgggacggaatcttgaaaaggcaaagaatcgatttgagaggtattggacatcacctttttttgaatttgtgtcacatgatattaatgagccactggaattggagaatgctgatcaggtagattttgtagttcatctcgcaagtaatacgcatccggtggcatatgcaacagatccgattggaactgtgactgcaaatattatcggaacaaataatcttctgaaatttgcggtaaaacatcatgcagaacgttttgcattcgcatcctcaaatgaaatttatggagaaaacagaggagatgtagaattcttcgacgagaggtactgtggctacattgattcgaatacactgagagctggttatccagaaagcaaacgttgtggtgaagctctatgtcaagcatataaacagcaggaaaatttggatgtcgttattcccaggtttacccgctcttatggtccaactatgttaaaaactgatacaaaagctatttcacagtttattaaaaaggcagtggacggcgataacattgctttgaagagtactggaacacagtactattcctacacctatgtggcagatgcagtggcaggatttttaacagttattctgaaaggtgaaagtggtgaagcctacaacattgcggatgaagcgtctgatattatgctgaaagatcttgcaaagattattgctgattttgcgggtaaagaggtcgtatttgaattgcctgacgaaaccgagaaagctggatacagcaaggcaacaaaggctagacttgatggttctaaactgaaaaaacttggttggacagctagatatgatattaaacaaggcttggaaagaactatgaaaatgctgactgagataagcgagtaaaaaatgtttgatgtgaggaatagtaatgaatttattgtttatacagggtggatctaggtggaaatatgactcagaaggaacactttatacagacccgaattttaattcacagatttggagccgatataaaggatactgtgacgagttaactgtagtattgcgtagagaggatcgaatttacacaaaggaagaagcgcggataaaatttaatgaaattggtaactcaattgatcactgtgtggcactccctgatatgtatagacctctttcaaatgcattgtcgtgtcaaaagagaatgttggtaaaaagaaccattgaatctgaagtgaaaaaagcagacaaagtgattattcgatccttaggaaatatctatactaatacggcgttaaaatacgcacaaaagtatcataagccgtatttggttgaggttactggttttgcatgggaatcattgtggtatcatagcttgcacggaaaatttgttgcaggattcaaagaaaatcaatataagcgattaatgaaaaatgtaaagtatggtgtgtatgtgacaaatgaagccttacaaaaaagatatccatgcaaaggagaaatgttgggatgctctgatgttgagcttatgccttcagacgataaattgcttgaaaatcgtattctgaaaatacaaaagaatacaggcaggattgtgctaggaacagctgcttttttggatgttggctggaaggggcaggagtatgttattcgtgccatgggagagttaaaaaatagagggttaaataatttcaagtatgaaatgattggaaatggatcaggagataaactgagaaagttaatcgctgaattgcatctggaagattgtgtttctatcttgggagcgaagccgcacagtgaagttttttcatggcttgattcaatcgatatttatgtgcagcctagttttatggaaggtttgtgcagatctatcgttgaggcaatgagtagagcatgtccggtgatatgcacgaatgttggcggaaattatgaattggtttcaagtgattgcctgtttgaaaaagctgattatgttagacttgctgacatactcgaaaaaatgatgaaaccaaaaatgcaaattgaagaagcaaaacggaattttgaaaaatcaaaagaatataataaagaagacttaaataagaagagagatgctttttatcgacgctttattgagtctggagtagagtgaggatgctatgatttcattagtgatgacaacatataatggattaaagtatatttctgaacagcttgagtcaataaaaaatcaaacagtgttaccggatgaggttttaatctacgatgacagatccactgatggaacatatgagtatgtgcaggagtatatccaaacaaacaaattagacaaatggaatgtcgtaagaaacaaagagaataaagggtattctttgaattttagcgatgcaatgaaagaatcgcatggagatatagtctttctctgcgatcaagatgatatatggcatttagataaaattaaggtgatgtcagaaataatgaattcacacccggaaattcaactgctagcatctaatgttcacccattttatgatggggaacatccacaaaaagttaattttgagaaattttatggacaattggtaaagattaatcgtattggaagttggataaaaccagcaagacctggatgtgcaatgtgctttcgtagatgtttgctagagaattatgatgatgtgtggtttgaaaattatgcacatgattgccttttatggggaaaagctgttttgtctgaaactgcatatatatataatgaagacactatagaatttagacggcatgataagaacgcatctagtagaggtggaggaagtctaaaatatagactggaaggactaaataccgaaattgatataatttcaaggatgcttcttttttgcaaaaaaaatatacgaaatgaaaaacatataagctttttaagtgagcaattagtggtgtataaaaaaagaaaaaatatattagaaaccaaaaatgtaattcgggctttccttgctttcccatatataaaatattatggccggagtagattttggataacggatattttctattgtttaaagagatgaaatttgactggaggtattttatgattaaaaaaacacagataaatgaaggtttgcttctgtattgcataatatatttgtgttcttttaatttttgggatacaaagtttggaatgctttttaaatatttttttttctgcgtaatacttattggattgataggctacggaaagaggttattagtaaataagggaaaaatacagacaactgcaaaagacagtgtgattttgtacatattttgtattggattatttttgattcaagtaataaatgttgaaaatagtagccaaagaaatcttgctttttatcagtatgttttttttatgatgatgataccatctattctgtatttattggaatactgtgaaattaggaaaatactaaatctattcaagactattggagtggttctctctatatttgccatatacgaggtgttttctggctcatatattattcaaaatgaatatttaggaataatgtataatggttcgcgtgtgataagagcaatggtgttttcagggtcattccttacatttggaacaataatggcaatgatttcagtcgtttcgttttatgatttttatacaaatacaagcaaacttaatctaatttgtttgattataaatgtagttgggttgctaatgtcttcatcaagagggccattagtagcgtttgtcataagtgcaatagttatttatgtttatattggcggaagagtgaatcttttaaaggtttttaaagttatattgataatgtttatcattggaatgctgttagcaattttgggaactaccttgagtagaaataattcgactattgctttttatttgaatagactacaatccatttttgactggtctgagaatagcgcatctaatacgggtagaatagattgctggctttattccatagaaaaatttaaggagaagacaaattggatattcggaattggaccggctgcaacaggtgctagagcaaaggcaaattggggaggatttgtcacagagagtgggttacttaagagatttcttgaattaggagctgttgtagcggttgtatactacatgttcttttttagtacagtacatgctggattgcgaaaagcccgtaaagaaggcaatcaatatattgctctagctttgggcattgtaatatgtattcttattgaagatactattttacagattacagaagagttgagtgtcactttcttgctttggatgtttatatgcatactgttaagaaaagagaaacaaaatgacgagaggatatgaggcagagtcagattccttatccaatagatagtaaagaaaagacagttgactatagaggaggtaatattgtgaatatacttgttattcattcacataacgcaaatagaggagatgaagctgctgttaaagcaatggttgatgaactccttataaaatatccgggagccacgattacgatttctaataatggattcacaccatatcctggtatgccggaaaatgtaatccaaattgatcgctttccgaagcttgaatcgagaatcgcacaattggaatttttcattgtccttttgtttaaagggaagtttgcacttacaaaagaagcaagaaaatttattcgtgcattaaaagaagcagatgttgttttacatgcaccaggaggtccatccattggcgatacatattttaaagcggaaaaattgtatttatggcgtctgaatttaatccgtcgaatggggatcccatatattttttatgctccatcaatgggaccatttaattgcgcatctagaaataaactaagaaaagaagtgatttctggtgcggaaagaattgttttacgagatcctatttcggtaaaatatgttaaggactttttgccgggtgttgaggttgaacaggcgttggactcagcattacagcatgatattgatattgataaaaacgaaagaaaatacaataactatccagaactcaaaaattttattgagaaccacgaaaaatgtataggcatcacaataacggatttaaagtggcatccagtacataaaaatgaaaagataatagaacagattccaacagcattcaaggcatttataactcaaaaagtcaaagaaggatatggtgttatttttattccacagttatatggtaacttgaatgatacaaaggtcatgaatgattacatgttagactctggtacatttatgattgatgctttttcagaagaacgagatacttactttcagcaatatgttattggcaagttatacgctgtagtcggtatgagatatcatagtaatattttttcagcaaaaatgggaatcccatttgtatcagtatcgtatgagcaaaaaatgaagggatttatgcaatctataggtttgagtgagtactgtattgatttgaatgagttgtcagagaaaacattatttgcaaagtttgggcaactggaagcaaatcatgatgcttataaaaataggttgaaaaatattcattcggatatgaagcaacaggcgtataaaacaacggaaattgtagttaatttcttgcaagaaaaaggagtaacaaatgcctgagttaaagaaaaaaattaaattcatcattgatagattttcgatgatatatgaattttggcgtgattactgtaattataggagatggaattataataatcctaaagtcgttacaagagcagcacaggaatcgaaaatgctgcgtcagacccatatgattgaaaagggtatgtcactgtcagaaccacgtaaaggcttcgggcagcaaaagattgcagtgctttttgaaatgatggatcaatacttgaaaatgggatacccttccgatggtatgccatttcaagatgcaattattgtcttgaatgcttatgttgacatgcaaaaaggacttggctatgaaaatgctgctatggtggaaaaactgaaaacatatgatacatatcggattgatggtcttacagcaggcatcaagtatgatacacgagcaaatctaatgaataatgtagacaagccttttccagagtttttttatagtcgacattcaatgcggcagtttgaaagtaaatcccttaacattgaagatgtggaaaaagctattaaaatcgcgcaaaaagctccaactgcatgtaatcggcaagctagtaaagtttatttgtataaggataaggcaacaaatgatgctctaggagaactgattgcaggaaatactggctttcagcaagaggtaccaaattatcttgttgttacggcagatgtctctgcgttttatgacacgtttgagagaaatcaagtatatgttgaagccggactgttttcaatggctcttgttgaggcattacattattatggaattggaagttgtattctccaaaatggcgaatactataagaaaaataaaaaattcaaagaaatttgcaaaaacattccggagaacgagcgtattattttgtttgttgcaactggatattataaaaatgaattttcctatgcgatgtcactacgaaagaatgttgaggatgtgtttattgtaaaataagaaggaacatttgttaatatggtagatagaaataaagaactagctataaatacagttatacttggaattggacagctaattcctaaatttttggcaattgtattgttgccgctgttaacatcatacttaacaacagaagaatatggaaattacgatctgattttaagcattgcgagtttattgattccggttgtaaccatgcaaatacagcaagcagtatttcgttacttgcttgcatcgaagagcgctgaaaataaaacgctttatgtgacagggtctctggtttatattggcatatcgtctgtagtatgttatccgattgtgtatttgattttgagactattcaaaatcgattcattatcggcagttttaatttgtttgctttttttaagcgaagctctttattcacttttggggcaaatcgttcgtggtttaggatacaatgctaaatattctgtaagtgttgtggtttattcagcggtcaatcttgctgcaacagccgttatgctgatgggatttcatttgggtcttcaaggggtgattatatctctaacgataggctacttgagttcagatctctatatggtactcgtatctgggatgcttgcctattttaaactggacgagttttccagaaaggcgcttaaggaactgcttgatttttcaatgcctattgttcctagttctattgcattatgggttgtaaacctgtcagatcgtttgattatcattaactttatgggcgcggcggcaaatggaatctatgctgttgccaataaaataccttcgttatatagtactgcgtacggtatttttaatttggcgtggacagaaaccgcttcaaaagtttctgatgatggggatcccgctgaatattacacaaaactcttttctggtttatttaagtttttgattggagttatgttagctttgatagcagtgacccctattatttttaaagtgctggttaaaggcgattatggaactgctttttttcaggtgccaatattgtactttggaatattctttaatagtcttgttaatttttacagtggaatctatattgcattaaaaagaacaaaacaggtaggatattcatcggttgccggtgctgcaatcaatgcattaattaatatttttcttattgggaaaattgggctgtatgctgcatccatttcaactgcggtatcttttttggtgattgcggtttatagagcagttgatcttaataaggttattgaaatcaaatataataaaagagaaattgtaattggaatgagttgttttcttgtagctgcagtttgtttgaatcagtctaatatgctaacaatagcgacttgttttctttttgccattgtttataatattactcaaaatattcaaattattaaaaaaattgtgcgtaaatttttaaagaagtgactactgagaaaaatggattgcgaaatttgtaatgtgaaatataaactgttgacataaagtgaaagaggaataaaatcttgagagcagagcagagcagagcagagcagagcagagcagagcagagcagagcagagcgtttatcatggcttgatgtattaaaaggaataggtattatccttgttgtaataggacatgtctattccaatcgcacagtctttaattggctatactcattccatatgccacttttctttttggcagcaggttgggtgtataaagaaaaatcagttttaacagatataaagaggagaatccagaccatagttgttccgtatttctcgttcggtttgctggtacttttatattggcaagtgatagagagaagattccggaattcggatatgagcttcatggattctctcctaggactattttctggttgctatgacaatttggacttcaacgttcatctgtggtttttgccgtgtttctttgtaacggtagctcttttcaatatactggtcaatctgggcggcaagaaaatagcttatattgtttctgcgctgatgagtcttatctatgttgttcttccgatgccggagctgttttggggacttaatcgcgtgttcaagtacataggtttttatgcgctgggcgtggcattggcaggacaaattaaagctgggaaagtggcagaacggaagattacatcaggcggaatagcaattattctgattgtactgaacttcattctggctttttatggcttgaccagggggctaatgtggtttgtaactgctatgattggagtggtaggcgtaggtttgatggcaatgctaatcaaccaaaaccgtctcctgcaatacctcggacggatttcgttgatggttctctgcattcatggtcctgtgtatcgaattgtagtaaaaatagtatccattcctttgcacatgagcacagatgtcgtacgagagaatcttctattagcgttaatcgttgtggctataacacttgctatctgcagtatagcttatgaggtgattataagaatcgcaccatggatggttggaaaaagacacaacaaagccaaaaagatgtctatatgtggatgactttctaggattgtgatatgaccatcggtgaaataagtcgaatcattaaaagtgtaagaaaggaattgctataatggcgggaacaacgatagtagatacactggatgttgatgaacaaatagaagaggcgaaagcgtcattagatagaataaatgcctggataaatagctgtgattcaaaagcaggcatagtgcttgcgttggtaggagttctgctgacaattatttttacaaatgacggaatggcagaaatgtataatgtgttgcaaaatattatgccgcctgcaaatttctgtacgatcttatatattggatttcttgggatagcaacatttatgttgtgcgatggaattgcacgactgatttttacattagttgcaagaatcaattccaatgtttacaatgaacctgatttgataacagattcggtactattctttggaaaaataagtgataaggcttcttatcaggttttccaaaatgatgtattgaacatgacaaaagaagagtatctgaatgatcttctttctcaaatttacataaattcaaaaattgcaaatgaaaagcacgtgaactacaataaaggaattaagtggacgataattggcttcattgcacttgtagtgatgtttctaattggaatctatttgtactgagggtagaaagtaatggcagattatgattataaagcgggcaaacaacgtttagaagaaattttggacaacgatatggaagttgtggaacaagacaaacttccaaatgatgatgattttacgtttacaaatggttattatagttgggtgagtgctatttttgtggatatgcgtgattcgacggaattatgcgcggatgaagataaggagaaattagctaaggttttccgaagcttttcctcggaaattattgagattttgagagatgatgataatcttcgagaaattggcatgcgaggggattgtgtatatgcagtgtatactaatccaaagcaggcggatgtatatgaaactgcaaataagtgtttttctatgaaaatggttgattatctcaaaaaagccttgatttacgggcatacaagcaggatttcaaactgaatttactaccaatttactacttttgagggaaagagccttgatatgccgcccggaaccctgcaagcccaaacaccagcacacagcattgagaaagaataaatgaaaactgaatacgacgcaaacgcggcgtttctctatcccaataccgggagaacaggaacgccgctttttttatgccctcatgttacgcagtaggggcgaaaaaagccttgctatatgcggctttgcgggcgcacttctgccggggacagggatttatacctaaacccggcaaaacggcgttctatcgcgtaacaaatccacaaccaaaggagtgatgaagctatggcagttttccgagtggagcgcaacaagggctataccgttatgagcaaccaccatttacgcaacaaggagctgaccttaaaggcaaaggggcttttatcgcaaatgctgtcacttcccgaagattgggactacacccttgcggggctgtcacagatcaaccgggaaaagatagacgctatccgggaagccataaaggagctggaacgcgccgggtatatcgtccgttcacgggaacgcgacgaaaagggacgcttgcgcggagccgattatgtgatctatgagcagccgcatacagaacctacgccggatttacctacattggaaaatccaacattggataatccaacgcaggaaaaaccaatgttggaaaaacctacgttggaaaatccaatgcaattaaataaagatatacaaaaaactgatttaccaacaaaagaaaaaataaatacagatttacaaagtacccattccattcctatcctttcccctaacccctctccctctgacagagaagcggctacgccgccggaacggaaacgaaaggaaacggaaacacagagcgcatatgagatttaccgggagatcatcaaggacaatatctcctatgacattctcatgcaggatatgaagtttgacggtgacaggctggacgaaatcgttgacattatgctggaaaccgtctgcacccggagaaagacaatccgcattgccggggacgactaccccgccgagctggtgaaagctaagtttatgaagctggacagcgaacatatccgctttgtgctggactgtatgcgggagaacacaacaaaaatccgcaacatcaagcagtatttacgggcggtgcttttcaatgccccgtccactatcggaaactattatacgtcccttgtggctcacgatatggcaagcggcgcacttgcgccacaggagccgcacgacccctattcattcaaaccgggcgaaagcctgtaaccacccacaaccacaaaaggaggattttattatggcagcacagaaaatgacgggagcattggtatttgacgagcgcacagaccgctatgacattcgctttgaccttgccagttactacggcgggctgcattgcggggactgtttcgacgtgttcacccgcggcaagtggaagccgacccgcattgaaatgaacatgaaacaggaatggtacttagtgggtatcagagccgacgaccttaacgggctgcgggtgcgtatctgaccgccgccccatagactaccccgaaaggagggaaagaccccatgcaggacgagatcaacgaaaaaaccgttgccctgtatatcaagaccgggaagctgaccgccgaagtgctgcaaaaggcaatgaaagccgcgcttgcacaggcaaagaagcagatcggcaagcagccccacgggaaacagaccctaaagcagcttatgaagcagaacacgggcgtttccaacattgagatcacaaaagacaatatcaaggcgtttgagcataccgccaaaaagtacggtatcgactttgcgctgaaaaaggacgcgacggaaaccccgccccgctatcttgtattcttcaagggcagggacgcggacgcgctgaccgccgctttcaaggagttttccgcaaagaagctgacgcaggacaggaagccctcaatccgaaaggcattagccgctttccgggaaaaggcaaaggagctgaacgccagccgccagcagaccaaaaacaaggacagggaggtatcgctatgaagccggaagtaaaaaagctgcttatcctcaatctcccgtatctgctctttgtgtacctgtttgacaaggtgggcgcggctgtccggctttcccctggcatggacgcaagcgcaaagatattacatcttggggagggctttaccgccgcttttgccagtgccgcgcccagcttacaccccgccgatttactgatcggcattgccggggcggtgattatctggcttgccgtttacctaaagggcaagaacgcgaagaaataccgcaagggcattgagtacggttccgcacgctgggggactgcggaggacataaagccgtacatagacccggtatttgagaacaatatccccttaacgcagacggaacggcttaccatgaacagccgcccgaagcagccgaa

SEQ ID NO: 626 - DNA, 7831 bp, unidentified
  source 1..7831: mol_type = unassigned DNA
tcagccattgtatgcctccttaatcactttttcaaatttatcttcgcctacgcgctcgatcgtaaattggaaacgctcgcttggatttgcattgtcatcaaagaactggatcgctgcatccgttacgcggaacaatgtctcttcgtccttgatcaccggcacgacttcttctcctttgtgaatgcggtttccgaaaagtccaccgaaggatacgagatatcctgtcgtcacatcccaggcatcggttggacacgctttggcgcatcttccgcagtagttacacttactttcttccactttgatctttccgtcttccagtttgatcgcatcggtgcggcacgcttttacacacacaccacactggatacaggcatcctctttccattttacgatagaggcacctttcactccgacatcgttttcctcggacttcaaacagttattctggcatccggtgacaccaaatttgaatttatgaggaagctctcttgcaaaatatctctcgtccagtttctgagcgatatcgtaggaatcaatgtttccacttggacagatctgatttccctgacaggctgtgacagtacgtacacgtgggccgcagacacccggcttacaatcgcctttctccagttctgctttcacttcatcgatctgatccagtttgataaatgggatctctacgccctgtctggatgtcagatgtacatgtccgtctccatatttttctgccacttccgcaatcttagccagctgctttgctgtcagatttcctcctaccactgccagtcgcagggaaaagttatttttttgtttctggcgcatgaatccgccttttttcagtgtagcataatctactgccataattcacttcctccttatttcttctcaatcgcgtatttaaaatcttcgatgatatcctgaatatcttcaatgccgacgctgattcggatcaggtcgtcaaatactccggcatcttctttctctttttccgtgctgtgcgcattcagcgtcgattcgggatgaatgatcagggactttgtatctccgatattggagacaatttttggtaattttaaatcattcataatctggaaagcacgttctttgcttccgacccggatcgtaagtatcgcgccatagccatgttccagagttttttctgcagtctcgtgccatgggctgtctggcaatgccggataatttactttgatgtccggatactgcgtcaaaaactcggctaacttttcggcattgaaacaggcacgctccatgcggagtccgagtgtttcaagccccagcatattgtaaaatgctgtctgtggtgccatgcaggcaccggtatttcgaaacaagccatttctgagtttcgcggtaaatgcaaattttccaaattttgcatattctttcatgccgggatatttttctttatcccatttgaagtttccgctgtcggtgatcacaccgctgatggcatcgctgtttccatttacatatttcgatgtcgaattgacgacgatgtcggcaccaagttcgagtgggcggacaagatacgcggttgcgaccgtgttgtccatcacaagcggaagtccgttctcatgtgccatctccgccagctcgcggatgtctacgacatccagtttcggatttccaatcgtctcggcaaagatcactcttgtcttgtcattgatcgctgctttgactgcctcttcgtcatgaatatcgacaaatacggttttgatcccaaatgcctcaaaatcatgaaagacatcgatggaacctccgtataaactcgtgcttgccagaatttcctctccggcattcacgatattaagtaaggcattgaagatggctgccattccggaagcacaggcgatcgaagaaagtccattctccaatgctgtcatccggttttcaaaggctgtgatcgtcggattattcaatcttgtatacgaaaatccgtttgccttattatgaaacaatttttcatgctgttctgcagacgtctgatagaaggcgctggattggtagattggcgtgagcgtcgctccggtcgcctcatctcccatttttccactgtgcaaaagtgctgtgttgaatctcatacgttccctccattttcgtctcttcaaatgtagttgccattgcgtacggatgcttctccataaaccgactgtttgcggatataggctgccacttcttctacctccgtaccattttcactccaattcgtgatataattttcatttttatttgtaatgctgtctgcctgttttttgtcaacaagaagcaggacaacgattcctgcgcggtgcaggtgtttgagtaccagagaaatgtcctcgccctgtgccggtgcatacagatacgtatgtctgccatcgatgtgaagaactttttccacatcttccacaaacgcacgattgactttatcggatttgataaattctaccgtaactgccgtctgtcctttgactgctgcgcggactttgcggtccacacgtccttcatacagaccatgctcttcagcatttacattttctaccactccacaggcagatgtcatattagttacacggtcaatgagaataaattcacccattgtcttatgtttcttaaattcatctacgacgatcttgtctgccagtgagatcttacataccgcgatctcgtttttgctgagcgtttccaccggtttctgctcgccggtattgacatcaatcgcatattcaatcttggtaaccgctcccgggatggtctttgtacccagtttaaagaagaagttctttccactgatgagttcatcgtcgtccatccaaaggagtgtcgttgtcaaggtcgatgcgattttcacctgagaatccacagaaagcacgcagcctcttgatacatctacttcgcggtcaagctggatcgttaccggctggcctttcaccgctttgtcgctctgcttgtcgccgacataaatactctttactttcgctgtctcattgctaggcagggttgtcagttcgtcgccgacatgaatctcgccatcttccacctgaccctgaaagcctcggaatgtgtggtctgggcggcatacacgctgtaccggcatatagaaacctatttcgtggtcgtcttcagaaatgtcaatgttttccaagtatgtcaggagtgcctcaccgtcataccatttgatattgtcggattttgtcgtaacattgtcgccttctgtcgccgaaaccggaataatcttgacattagcaaggctgagttcttcggaaagttccttgatctgtgcttcgatctcgtggaatctctcttcgctgtaatccacaaggtccattttgttgacggcaaatacaaaatatttgattcccatcagctcacagattcttgcgtggcgtcttgtctgtacgagcacgccctgttttgcgtcgatcaaaatgactgcgaggtcagcaaaggaagctcctactgccatgtttcttgtgtattcttcatgtcccggtgtgtctgcaacgatgaagcttcttttctctgtcgtaaagtaacggtacgcaacgtcgatcgtgattccctgctcgcgctctgccatcaatccgtcgagaagcagtgagtagtcaatctcgccgccgcggcttccgactttactgtctaattccagtgctttttcctggtcggtatacaatagctttgaatcgtataaaatatgtccaattaaggttgattttccgtcatccacgcttccgcatgtaataaatttcaataatccgctcatattagaaatacccttctctctttcttcgttccatactgccagctgcttcattgtcgatcactcgtgtcgttctctcggaagatacggcgctcagtgtctcgtcgataatttcgtccagtgtcgtcgcagtggactcgcatccaccggtaagtggataacatcccagggtgcggaatcgtacactcttgtactcgatcttttcccccggacgaagtctcatacggtcatcgtctaccatgataatgttgccgtcgcggtaaacgaccggacgtacttttgcaaaatacagagacgggatctcgatattttcacggcgaatgtactgccagatatccgtctcggtccagtttgacaatgggaatactcgtacttcctgatgtttctgaatcttggaattgtacaatttccacatctcgggacgctggtttttcggatcccacgcatgatgttcgtttcggaaagagaatattctctcttttgctcttgatttctcctcgtctcggcgtccaccaccaaacgcagcggtaaatccgtatttgtcgagggcctgtttcaatgcctgtgttttcatgatatcggtataagcagaaccgtggtcaaatggattgattccgtcttttaccccttgttcgttaatgtactcgatcatatcgatgccgagttttttggccgttttgtcacggaactcgatcatttctttaaatttccatgttgtattgacatgtaaaaacgggaacggcggtttctccggataaaaagctttcattgccaaatgcagcattaccgagctgtcttttccgatggaataaagcattaccggtttttcacattctgcagccacttcacggatgatgtagattgcttctgcctccaatttgtcaagatgtgaaaactcactcatatctgtgtccttcctttcgctagtacttatttgattcttttttgttgataataacctgttctttgctgccatcttttcgtaatatgttccagtataactgattttcttccgaaagtacagtcatcttgcttcccatacctccaatatctgctcccaggtaaagagcaatcgcgccaaaccggcactctttgatacaggatgagcatccccagcagtctttcgggtacttgatataggcttttttgtcgtcgtccatcttgatcaaccttcccggacaaactttcgcgcaggcggtacagcctttgcacaatgccttgttaattgctatgctcataatgctcctcccttccaaccaggtctcggaagcggatgatgatctcgccatcttccattctggaatttacatattttaaccatttctggtcttttttaggataatctaaattttcggcaaaactgtgccatcttgtctcttttcttgcttccaaatgtgcaataacgacaaggcacacggtaagccgttctctcaactcatagacaaacatcaattcatgcatatcctccgctgcaacatcctcgctgagttcgatcagctgtttgatcttgtctttcgcaagtgccagctgcttttcattgaactggtaatgcgtcgaaattcctccggcgtaattgtccatgactttctgcatcgcctcttccaaggcttcgacggtaaacatatcgttggttcctgtcaaataatggttatattcttttatcttctcttccaatgccgtttcttcttctgcctcatttaccggcagttcctgcccggcatccagttcttttaccatatgaagtgccgcgatctcgccttcgaccattgccccggtcacgtatttctgcggacatcctccggcgacatctcctgccgcatacagtccgtggatcgtcgtctggcggtccgtgtccacccaatatccgctggcggtgtgtccacccacgatataaggttcggttccctcgatttccacattctgctcgctcggtttcttgccggattcaatccatttgagtgtctggcttggtgccatattgaggtaagcttttttcaatgactcatcctgctcgtcggaaattccttcggtccgcagataacaaggacctcttccctccagattttccatcaccgttccatacactcgttccgaagtcgtcagaccgtatttatcttcgtaaacttcgccttttgcattgacctgttttgcgccgacgccctgtgcgatggttccggtcggtgcaatcgtatctttgcaccggagagcgataaagcgcatctcaaaggttgtcatctcggctccgctccgaatccccatcgcatatcctgcgccggtattaaatggcggataccacattttatgtcttgaaaatcccggattgttcggacggtaaagccctgccgctccaccggtcgcacaaagcactttctttgcgcggatctcgtacgcagtgttttcttccatcgaaaatccaaacgctccgcggatcgtattattctccacaatgtaatcggttatattaatccggtttaatacggtcacattcggaaggcactcaactgccgaagccagcaacggcttcatattttcgccgttgatctttatatttcgatttccgcgtgcgacgtattctccattttcatctttcaaaatgacaagtccgagtttttccattttttccgttacccggttgaggccctctgacattgtcataagcagatcttctctcacgatgccatccgcatcttttttcgcatattccacataatcttccggctttctgccttttacgatatatgcattgatcgcgttgacaccggcagccaggcagccactccgcttaatatttgctttttccgcaataatgatcgaataatcggatttttcgcggatcgtcaatgcggcgtaacatcctgccgttccaccaccgacgatcaaaatgtccgtatgaagtatttttttattttcaatctgcatcgcagctcctccttgaatttcctgttctttttgtgttggcaatttgcctgtttgccagctgccctacgggatgcttcgcagcttacgctgctagatataaaacacgtcttgttcctgcatctctttattttcgagcagatacgtctgcgcctcgtcaaacacatacaatcggtagatcaacacatgtactgtctcgccgacggacaccagatctttttccagcgaccgctcgccgacaacctcaattccgtttatatccacggtaatgtcgatgcggtttccgcggaataccacgtcttttacgacgccggtctctgccgcgctgatgtactgatcgagttttccactctttgatatttttataaattccggtcggatgacggctctgtctgccccctcgacctggtcaaacccttttaatttcccatattcttccaccaccgaagaccggccgatgaatttggcgacaaatggggttcccggtgatttgtaaatttctaccggcattcccatctgctcgatggttccgtggttggtaatgatgatctcatcggctacctctacggcctcatcctgatcgggggtaacgaaaatactcgtaattcccagtttttctaccatttctttaagccagctccgtagctcggttcttactttggcatcgatcgccgcaaatggttcatccagcaaaagtacctgtggattcggcgccaatgctctggcaaatgccactctctggcgctgaacgccggacagctgattcggatatcgtttttccatccccgaaagtccggttaattcgagaagttctttgactctctctttaatctgttttttcggcatcttctgcaattccaggccaaacgccacattgtcaaaaactgtcatatatcggaacaacgcataattttgaaatacaaagccgatgccccgctttgatgccggaatgtcattgacccgctttccgtcgatgaagatatctccggaatttggattttccagccctgcgatcattcgcaaaagtgtcgtttttccgcttccggaaggtccgagaagcgcgaccagttttcctttttcaatcccgaaactcacattgtcggaggcaaggaaatcgccgtatcgcttgtatatgttcttcatttctacgtacat

SEQ ID NO: 627 - DNA, 9807 bp, unidentified
  source 1..9807: mol_type = unassigned DNA
tcaggacagggtcacagcaccgccacggcgaggaaccgcacaacgagcgcggcaagccatgccacaacgcactggtttacgaccataacggtggcccagcggccgcccatctcccgcttgaccgatgccacagcggcgatgcagggagtatagagcaggcagaacaccagcaggggaggagccatacaggatggtaagggtggagacaacgctctcctttgccataaagccggtgatcagcgccgtggacacccgccagtcgccaaagcccagcggtgcaaacaacggcgcgatgccgctggcgatccaggccaggatgctctcctgcgggtctgcggtcaggctgagctggaagtcaaagttctgcaggaaccagatgatgatggttgccaggaaaatgaccgtaaaggcacgctcgaggaaatcccgggccttttcccagagcagctgggccacatttttcaggccgggcaggcggtagttgggcagctccatgacaaagggcacggcctcgcccttgaacagcgttcccttgagcagaaaggccattccgatgcccacaaggatgcccaggaaatacaggcccaccatgaccagtgcggcgtactccgggaagaaggtcaccgcaaacaggctgtagatcgggagcttggccgagcagctcataaagggcgtgagcaggatggtcattttccggtcccgctccgagggcagcgtgcggcttgccatcacgccggggaccgtgcagccaaagccgatgagcatgggcacgatgctgcggcccgaaagaccgatacgccgcagcagcttgtccatcacaaaggccacgcgggccatatagccggtatcctccagcagggaaaggaagaagaacagggtcacgatgatgggcaggaagctcagcacactgcccacaccggtaaagatgccgtcgatcaccagcgaatgcactgcatcgttgacgttccatgccgtcagggcattgtccacaaggatcgtcaggttctcaatgcccagttccagcaggccttgcagccccgcgccgatcacgccaaaggtcagatagaacaccagcgccataatgcccacgaatgccggaatcgccgtgtactttccggtgaggaagcggtcgatccttgcgctgcgcagctgctccttgctctggtggggctttaccacggtctgattcaccagctgatggataaagtggaaccgcatatctgcaatggcggcggcgcggtccagaccgcgttcctgctccatctgcaggatgatatgttcgatcatctctttttcgttctgatccagcttcagggcctcctcaatgcgggggtcgccttccaccagctttgtggcggcaaagcgcaccgggatccccgccgcccgggcgtggtcctcgatgaggtggatgatgccgtggatgcagcggtgaaccgcaccgccgtggtcatcctcgccgcagaagtccatccggcccgggcgctcctgatactttgccacatggatggcgtgatccaccagctcatccacgccctcgttcttggcggcggaaatggggaccaccgggatgcccagcatcgcttccatctcgttgatgttgatggtgccgccgttgccgcgcacctcatccatcatattcagtgccagcaccatgggggtgtccagctccatcagctgcatcgttaagtacagattgcgctcgatgttggtggcatccacgatgttgatgatgcccgtgggcttttcgccaatgatgaactggcgggtcacgatctcctcgctggaatagggcgacatggagtagatgccgggcaggtcggtgacttcggtatcagggtgctcccggatggcaccgctcttgcggtccaccgtcacgcccggaaagttgcccacatgctggttggagccggtgagctggttgaacagggtcgttttgccgcagttctgatttccggccagcgcaaatgtcagcaccgttccatccggcagcgggtgttcgccctttttggtgtggtagcggccgccctcacccaggcccgggtgctccaccatccggccggccttccgtgccggggccgctgcgggtgcttccgccggggtgatctcgatccgtgccgcatcgtccagccgcagggtcagctcatagccgtggatctgcagctccatggggtcccccatgggcgcgaatttcaccagcgtgaccttctcgccggggatcagccccatatccagaaaatgctggcggagttctcccgttccgcccactgtatcgatcacggcactttcgccgatcttcagttcctttaatgtcatggcagatgcctttccttcgacaaaatgttagtgtatgtgaacagtcttaatataagctaactcaaaggcattgtcaaggcaggaagcggcaaaaattctcgcctgtccccgctgttttttgtggaaatctttctcctgttccggcaggtttccgggcaaaagaaaacgcacccctgaattttcacgttcaaaggtgcgttttgagaacagttctgtttacttcacggtgtggtagccgtcggggttgttcttctgccagttccagctgtcggcacacatctcctcgatgccgtactcagccacccagcccagctcattcttggccttggtgggatcggcatagcactcggcaatatcgccgggacggcggggatcgatcacataggggagcttcttgccgcaggccttctcaaaggcatggatgacatccagcacgctgtagccgtggccggtgcccaggttgcagataaacaggccgcagttggtctgcagcttcctgatggcgcagacatggccccgggccaggtcaaccacatggatgtaatcgcgcacgccggtgccgtcgggggtggggtagtcgttgccaaagacgtgcaccttttccagcttgcccacggccactttggcgatgtagggcatcaggttgttggggatgccgttggggtcctcgccgatcaggccggacttgtgggcaccgatggggttgaagtaacggagcagggccacattcagggtggggtcagccttgcagacatcggtcaggatgcgctcggtaaaggccttggtggtgccgtaggggttggtggtggcacccacggggaagtcctcggtgatgggcacgctggcggggtcgccgtagacggtggcggaggagctgaacacgaagttgcggcagttgtggcggcgcatcacgtccagaatgaccagcgtgcagttgaggttgttatagtagtactcgatgggcttggagacgctctcgcccacagccttataggcggcaaactggatgacggcatcgatatcggggcactcggtgaagatcttctccacgtcctcgtgctttgtcatatcggcctgatagaaccggaagtccttgccggtgatctgcttgacccgatccagcaccacgggggaagcgttgtaatagttatctgccaccacgatgtcaaagccagcgttcagcagttcgatacaggtgtggctgccgatataaccggcaccgccggaaaccaaaattgccataaaagtacctctcttctcgtcaccaaaattgcttgcgcggggcaggcccgctttctgccacaaggatacaacgttttggccgcagaatcaagtaacgggaattttataaggatggatttttgtttccatttatttttccgcgcattgatttacaagcattttttgttttttgcgcatggagtgatggaacgctttgtgcaaatcagaaaaaaagccctctcaggcaaagccgtcaggctttgaatgagagggctgcattttacagcttcccgcactgtttgccggtgaagaaccgcagggtggtgttggcgcggaacactttcccggcccgcagggcggtggaggggaactccgggtgggaggggctgcagggaaagtgctgggtctccagcgcaaagccgccgtatttctgcatcggcacgccgcccttgccgggggcagggcagtcctgcaggaaattgccggtgtagagctgcacaccgggctgggtggtatagaccttcatgctgatgccggtcttatcgctggaagcccaggcgcacaggctctggctggccccgcggcccctgtcgatgacaaagcagtggtcatagccgccgcccaccatggtggtctgggaaaagccggtgtcgatgtcccggccaatgggcttgcccgcccggaaatccatcggcgtgcctgccacgggcaggatattgccggtggggcaggtctcgttgttgccctccagatagcgggacgcatagatgcgcagcttctggcccagcacatcgccgccgccatccagattgaagtaggtgtggttggtcaggttgatgatagtgtcggcatcagaggagacacggtagtccatccgcagggcgttgtcctcggtgaggatataccgcaccgagatcttcagatttcccgggaaaccatcctctccatcggggctttcggcctccagaagcagggtatcgccaaaggtctttacctcatacagcttgcgcgggaaggtgccgtgcaggtggtttttgccgttgttggcttccagctgataggtcttgccgcccacgttgaacacggcattctcgatgcggttggcgtaccggcccacgaacgcgccgcagcaggtactgccggacgattcaaagtccttgacgtaatcggcgtaggtatcgtggcccagcaccacatccaccggcccgcgcttggtgggcacccagatattcttgatgatacagccgtagttcagcacactgaccgccagcccgccggggttcgagatgatgtattcattgatcttttcgccgtttggagtcatgccaaagggcttggagagaaactgtgccatagggctcgcctccttttgtattttttggggacagcacactctctgttttatcctttattgttttgattatatcacaattttctccttctgtgttggcattttttaagggaatctatccaatatttcgagagattttttgtaagttctgccccataggcagaaaaaagccccggagggccaggggtaggcgctccggggcttgtatgtcagattagatattactgctggggctttgcagtaacctcataagtcattgcaactgcagcgtaagtcttgccattgacagtcttagctgcaacaccaattttcgtaattttgacagacacaccatatgcacttgccattccatccagcaaatcttgcatagtatccgtaccctgattcagacttccaatgttatctgcagtaatttccattacttcatagatgccattctgcattttgccatccttcatcagaggcaatgccatcgtcatagaacccttaccagtcaaaatatcttgctggaactttttgtaatcctcaacggagtaggatttccgagaatcaaaagtgcccttctcggtgtcgatcaaatcaatcttgctctcagcgagtttcttcaaatctgcatcatttacctgaatacctgtggcctgcttcatagcaccaaaagctgcatcttcagtcttctgtgcgaaagaaggtgcgctgtcatcgccgcaagcggtgagcagtgccagagccattacgccggccagcagaagggcggccattttcttgagcattttcatttgtagaacctccaatgtaaaatgatattttaccacacagaaagcatacccctacaccttctgcattgtgaactcattttacatctcccccccccctgtcaagattttttattgaattcctcaatttttggagactgtgccaaagctgcggcaaattttttagcagattgacaaaaagcacccctcacatagctgtgaagggtgctttgggaggttttcttactccggctgagcggtgttctgggcgatatactcggcagcatcatcggggatgtcgtcaaggttttcatcgccgatatccacgttcagcggcggcttcttgaagaggatgtcgtacatcaggggcacaacgtacagggtcatcagggtggcgtaggtcaggccgaagatgatgacgatggccataccgctcatcagctggctggccatatcgccgctgaacaccagctggagcatggccagaacggtggtcagggtggtcatcaggatggggcgcattcgtgttttgccggtggcgatcagggccgcgcggcgctccatgccgccgatgcgcagctggttggcgtaatccacgaacacgatgccgttgttgacgaccgtgcccatcaggacgatgaagcccatcagggagatcatggtcaactgctggccggtgagcagcaggcccagcaggccgccggtaaaggccagcggaatggtgaacagaacgatgaagggggagagcaggctctggaactgggccaccataacaaggtagacgaagggcagagccaggaacatccactggcccatctgatccaccaccatgccgttgatctcagagccgccgcccatgtagaagctgcagccctcgggcatttcatcggatgcggcaaactcgttcagcttcttttccagcgcgcgggtctcggtggtggtattggtgccctccaccgcgtccgccgtcacgctgatatagcgggtctggttcttgctggtgatggagtccggggtggagccggtgacccaggtggccatatcgcccagcgtgcaggtgccggtctcggtggtaccgtcggcagccataacggaggtcgtaaaggtcatatccatcatgttttccttggtcatggggtccagattgttgctgatctggacgttcatggtggagccatcgatggcaacgggggtctgggccgtggtagtggtggtcagcttggcggcgatctgctggtagacctgcgccacggtcaggccgtaggaacggaccttatcccggtcgatctgcaggttgatggtggcatcgccgctgcccagaccgttggtggcattggtgaagccgtccatctcgttgaccatatccaccaccttctcggagagggcagtcatggtatcaatgtcgttgccggagacctgaacggtcaggcccatatccagctggctggtcagctcctgcattccgctgatctcaacggtggcggtgcagttctccacgccgttcacagcttcctccagcgcctcacgggcctgttcgatctgccgggaggagaggctctcgtccagcatcacgttgatctggtaggtgccgtagctgttggcggctttcagcaggtcggtgatggtctggggcaggcccagctggccgacatccattccggccacgcggctgtcggtggtaacgcccacctcttccacgttgtccacagccagcagggcatcaatgacattctcggccacagcataggattcttccttggtcagatccttctcggtggagagggtgacgatggcctcgttgctggtgatggtgggcagcatctcaacgcccatggacatcacgcgccagccgcagaacaccagcagcaccactgccgcgcccaacggtgcccagcggtgctggaagcaccattccaggctcttgacgtacttttcctgcaccttgtcgaaccacttgagctctttgggcttggagtttttcagcagggtagaggaggccgccggggcaaccgtcagcgccacgatgagggaagcagccagacagtagccaatgcacatggacatgggctgcagcaggctcttgatgacacccgatgtgaagatgacgggcaggaacacgcagacagaggtgagggtggaagccatgatggccatgcccacctgcttggtgccctggaccgccgcgcgggcagcgggcacgccgcggctgcgcagacggtagatgttctcgatgacgacgatggagttatccaccagcataccaatgccgagggacaggcccgccagcgtcataatattcatatccagaccggtgaagtacatgagcaccacggcaaacagcaccgacagcgggatactgatgccgaccaccagcgtgggcttgatatccttgaggaagatggccagcacgatgatggcaagggccgcaccgatgagcatactgctcaggatgctgctgacgatgatgctgatgtagttgccctggttggacagcacgaccacatgcaggccgtcgtatttctgttccagctccttgaaggcggccttgcagttgccggaaacttcaccggcgctggaggagttgctcttgaagatcttcagcaccacggagcgctcgccgttcaggcgggtaaagctgtcctcggcgttgtcaatgatctgcacatcggccacgtcagacaggcggacatcgccaaagccgtccacatggagcagcagggcaccggagatatcctcgatgctgtcgtactcctcgccgaccttcagcagccaggacttgttgctggaatccttgacataaccggcgggcatggagaagttctgggcatagatcagctgtgccagcgtgtcaatatccagcatcttggccacgtcggagttctccatggccatctgcttggcatcctcatactgctgcttggcatcggccagctgcttctcgtaatcattcagcatctcgcgggcctcggtgaacttgatataggcctgcagctgctgctgggaatagctgcccacgatctgggtgaactgatccatcaggccgggcacgtcgtccatggccttgatggtgctctccagcgtgttataaatgttgctcaggctctgctgcacctgcagatcatcgaccagctccccggccgttgtgccggcggtgtcgccctgcgcgttcaggcgctgctgcagatcctgcaaagcggtggtcagcttatcggtgatatcgcgcagctccgccacgatctcgatcagagaatcgatatcctgcattccggtctcgttgaacttgtccacgacccgctgcaggccgtcccgcacatcgatcagggcctgctggatctcaggctcgttgaccacggcaatgagctggttgacgctctccagaagggcctgtgcctgcttcttgaccagcatgaaggaatcctgcagttcgccggaatactggctgttgatggtatcgctgaccagcttgtcgtaactggccagctgggtctcgtactcctttctgcctgcctcgatctgggcctcggcagcatccagctgggcctttgcatcggccagctgcacgtcaatgacttccagcagcttttcattgatggcatcgatcttttcctgatcgagctgcacctgcaccatccgggtgaccaggccattggcggagatattggaaacgccgccctgacgctcgatataggggaccatggtgtcgttgacgaaatcggccagctcataggaatcgctgccctcgcggctgacggccacggtcataaaggcgttcatgttcagggtatattcaatgatggagggggtcatacaggtgcttggcaggctggaggtggtctgatccaccttgttggacaccttgaccacggcactgttcatgtccgtatcgtcctcaaactccatcagcagcagactgtagttttctgccgaggtggcggtgacgtttttcacgcccgagatggtgcccagcgcactctccatcacgtcggagacctcgttctccacacgctccgggctggcaccgggatagaccgtgaccaccatcaggtacggtgtgttcacgtttggcagcagattggtctgcatattctgcacggacacaaggcccagcatgatgaccatgatgactgcgaccagaacggtgaacggttttttgacgctgaatttttccat

SEQ ID NO: 628 - DNA, 13086 bp, unidentified
  source 1..13086: mol_type = unassigned DNA
  misc_difference 2589: note = a, c, g, or t
  misc_difference 2590: note = a, c, g, or t
  misc_difference 2591: note = a, c, g, or t
  misc_difference 2592: note = a, c, g, or t
  misc_difference 2593: note = a, c, g, or t
  misc_difference 2594: note = a, c, g, or t
  misc_difference 2595: note = a, c, g, or t
  misc_difference 2596: note = a, c, g, or t
  misc_difference 2597: note = a, c, g, or t
  misc_difference 2598: note = a, c, g, or t
cccgccgcatgtctcccgagttttccgatgaggcagcaagatgtctggcagccaacggcatcaaggcatacatttttgaatctttaagacctaccccggagctgtcctttgcccttcggacgttaggatgtactgcaggtattgtagttaccgccagccacaaccctcctgagtacaatggctataaggtatactgggaggacggcgcacaggtaaccgctcctatcgataaggacatcattaccgaagtacagtccatcaaggattatcataccgtgaagaccatgagcagagaggatgctgtggcagcaggactctatgaagtgatcggcaaagagatcgatgacaagtacatggcagagctgaagaagcagatcattcatcccgatgttatcaaggaaatggcagatgacatcaagatcgtatatactccgttatgcggtaccggtaacaagccggtaagacgtatcctgtccgagctgggatttaagcacgtctatgtagttcccgaacaggagaatccggatccaaacttcaccacactggattacccgaaccctgaggatcccaaggcatttacatacgcactgcgtctggccaaggagaaggatgcggacatcgttctggcaaccgatcccgatgcagaccgtctgggtgtgtatgccaaggataccaagaccggcgagtatgtggcatttaccggtaacatgtccggtatgctgatcgcagaatatatcctgagagagaagactgctaccggcgctatgcccgagaatcccgcactggtaaccaccatcgttaccaccaatatgaccaagcccatcaccgaagcttatggtgtaaagttgatcgaagtactgaccggcttcaagttcatcggtgagcagatcaagttcttcgagcagaccggcagcaacaattatgtattcggtctggaagagagctacggctgtctggcaggtactcatgcaagagataaggatgcagttgtagcagttatgtgtctgtgtgaagtggcggcttactgcaagaagcacaacatgactctgtgggatatgatggtatccatgtatgagaagtacggttacttcaaggagacccagtacaccatcaccatgaagggtatcgatggcgcaagacagatcgccgagatcatggagaagcttcgtaagaatcctcctaaggcattcggagatctgaaggtagagaagttccgtgattaccagaacgatgttatcatcgacatggagaccggagagaagactaccacaggacttcccaagtccaatgttctgtacttcgagcttcctgacaatgcatggtgctgtgcacgtccttccggaaccgagcccaagatcaagttctacatgggtgtcaagggaaccagcttagaggatgcaaaggctaaggtagagaagctgaccgaggatgtaaaggcagtactgtaaggcagtgctccataaatcatattagttttcaaaagagcgaatcgcccgagcagggcggtttgctcttttatgaaaagctggaggtatctgtggcaaagctaaacaaggcaaaccttaagaaaactctatattatctgcaacgtaacggcctgagggaaacctggatctctgtgagggagcgcctgacagagacagaccgctatttttttgtgccctgttcggaagcagagctggagaagcagagccggagaaaatgggaaagaccgattacgttcagtattgtggtacccttatatcgaaccccggaagcttatctgaacagaatgataacaagtgttatgcaacaaagctatccccattgggaactgatcctggcagatgccacggaggatcacagtgtggaggaggtactgaagcagcagggattcctgaaggagcagccgacggatggcgagacagaacctgtcgcagcagatcccaggctccactatgtgcatctgaaagaaaatgcgggaatcgctgctaataccaatcaggcgcttccctatgcgaagggagagtatatcggtctgctggatcatgatgatgtattgacaccggatgcgttgtacgaaatggctgatgcgatcaccaaagcatatgacagaggtgtcaaagtcgccttcgcttattcggatgaggataagtgcgatggagaagagaccagatactatgatccaaatcataaagaaaactttaattacgatttaattttaagtaataactatatctgccatttcctggtcatggatgcggaactgatgaagaggctgcgattccgaccggaatgtgacggcgcccaggactatgacttggtgttacgggctgtggcagaagtgctgacgacggacgggcaggccggggagaagagcattcttcatatccccaaagtgttgtatcactggagatgccacgaggcatccacggcagccaatccccacagcaaaaaatacgcttacgaggcgggacttcgggctctgcgggatcatgccgcactgcgggggatccctgcgactgcctgtgagaccaggcatgtgggattttatcgtttacagtataccgatgtattacagaaccgcccggatgtggcaggccggggggnnnnnnnnnnagccgtgggaggcagagtattgtccgggaagactggcaagatcatcggcggcagaatgactgcggagggaaaggtgttctacgaggggttgccgcagggattcggaggatatcttcacagagcggaattgtcccaagatgcgcaggcgctggatcttcgctgtattcgtattcagccttcctgccaggaagtattcgagaaaattgtgggagttccgtatactgagatacgaagacacccgggagagcaaccggtattcgatgtaactgtactgccgtcaggagtggacatccgaaccttaagtctgcgattgtccgaagcgttacggcaaagaggaagattactctatctgccggaatatccggaggagtttaaaccattatgagtgaaataacggttgttataccaaattacaacggaatgaaatatctggcagagtgcatgacttctctgtgcagagagcagcaaaatgcccccggatatgaagtgctgatcatcgataatgcttccgtggacggcagcgtggaatatctgcaaaaggaatggtgtggggaaggtgtgcgcctgatatctttaccggaaaacaccggattctgtcatgcagtgaatctggggatccgggaagcgaagacaccatatgtgatccttctgaacaatgatacaaaggcagaagccggttttgtaagaggcttatatgatgctatccgcgaaaatgaaaagatattttccgtcagtgcgaagatgctgatgtgggacagaccggagctcatcgatgatgccggagaccgttactgcgtgctgggctgggcctattcccgggggaagggacgaccggcggcggattatgataagtctgtcccggtgttttccgcctgtggcggtgccgcaatctacagacgatccgtatttgaagagatcggttattttgatgaagaacattttgcctatctggaagatctggatatcggctaccgtgcccggatctacggctatgagaaccggtatgaaccgaaggcggctgtgctgcattatggcagtgcttccacgggatccagatacaatccccggaaaacgttacttgcgtctgccaacagtatttatgtgatcggcaagaatatgcctcttttgcagtgtattctgaacctgccgttttttttgcttggatttggcataaagtttttgtttttttgtaagaaaagaatgggaaaactatatctgaaaggactggcagctggcctgaaaagatctgtaggaaccacgggaagacagcacaaagttcccttccagtggcatcatctggggaattatgtgaagatccagtggcagctgtatttcaatgtgtttcgaattcttatgaaatcttaagaaatggcttcataaattcttaagttgagaaaaaaacatcgttattgtagaatgaaatcgttaaaaagaagcttttcagacttacagattgggtgacccatatgataaaagacaaccagaaagtctttaacaggcttcttgtgataatggatgcgctgatcacagccatatcctttgtccttgcctattatatcaaattttatatattgaacgacggtcccggaatcggtgtcctgcctgtgcaggagtattataagctgcttccttttattgtgcccggttatatgttcctatattaccggtgcagcgtgtattccccgaagcgaaccgtccgccgcagacatgagatttacagcattctgcaggcaaataccatcggcctggcggcattgatcattatactgtatatgatcatccgtgagatcaacttttcgcgatccgtcatggcaattttttatgtgctgaatgtatttctgacttcggtatcccgcatcataatgagaaaagcgttgcggacactccggaaaaggggatacaatctgaagcatattttgctggtgggatattccagagcggcagaagagtatattgacagaatcttaagcaatccccagtggggatatgttgtatgcggtattctggatgaacacattccgggagggactacctataagggagtgaaagtcctgggaacgttggggaatctggagtatattcttccggagaacaagctggacgagatcgcgatcacgctttctctgaaagattatgattatctggaaggtgttgtggatatctgtgagaaatccggcgtgcatacgaaattcatccccgactacagcagtctgatccccagcagaccttacacggaggatctcatgggacttccggtgatcaatattcggtatgtgccgctgaccaacaccggaaatatgatgatcaagagagccatggatattgtcggttccctgttcggcatcatcattatgtcaccgatcatgctgttgtcggcaattctggtaaaatgttccagtccgggacctgtgatcttcaagcaggaacgggtaggacttcataataaatcattttatatgtacaaattccgcagtatggcaatgcagactgcagcggaggagaaaaagggctggacggtgcgaaacgatcccagagtcaccgggatcggcaagatcttaagacgaaccagcattgatgaacttccacagctgttcaacatcctgaaaggagatatgagcctggtgggaccgagaccggagcgccctcagttcgtggaaaagttcaaggaagagatcccgagatatatggtaaaacatcaggtgaggccgggcctcacgggatgggcacaggtcaacggcctgcgtggtgattcttccatcaagaagcggatcgagtatgatatttattacattgagaactggaccctcgggtttgacattaagatcattcttatgacattttttacaggatttatcaataaaaatgcttattaacacaaggagaagacaagatggcaacaaattctaattacaatggcggcaatggtcagagaccagccggaagcggaagaagaccttccggaaatggacagagacctgtgggacagagacctgcgggacagcgacctgccggcaacggacagaggacaacatccggcaacggacagaagagagtatctgccaagcagcgtgctgccaagaagagaagaaaggttatcatcttcggtgtagagatcgcggttatcctgatcatggtagcagtactgtatctggtaatgacccacacaaataatgaaggccccaaggtaacggtattagagacggaggaactccggattccggaagaagtacaacaggacgaagcaatgaaaggttatatgaacattgcactgttcggtgtggatgcgacaaaggacagccagttgtacaagggcagccgaagcgacagtattatgatcgccagcatcaatatggataccggcgatatcaaactgatcagtgtatatcgtgatacctatctgaacatcggtaccgactcctatcagaagtgtaatgcagcttattcctatggcggagcggagcaggcagtcaagatgttaaacatgaatctggatatggatattacgaactttgtaaccgtgggctacagaggactgagtgaggtcatcgacggtctgggcggtgtctatatcgatgtggactccgaggagatcaagcatatcaataactaccagatcggtattgctgaggtcttaaaatgtgactacacaccggtaacagagaccggagtacagctgttaaacggtctgcaggcgactgcttactgccgtatccgttataccgcaggtaatgacttcaagcgtgctgcgcgtcagcgtgaagtgatccaggcgattgaagatcaggcgaagaaggcggattacgataccctgtccaaggtatttaacagtgccatcggtgatatttacaccagcctggattccaaggatattctgaatctgttggctaacatcacaaaatatcgtattgtggacgagggaggtttcccggaggagaccatgcgagctaccggtaatatcggtgcgaagggaagcagcgtagtgcctatggatctggagagtaacgtcgtatggctgcatcagttcctgtttgatgatgcgaactacaccgtaaccgacagcgtaaaggaatacagtagaaagattgcatccgatacggcaccttatctgaataaataagaaaaggaattgacgagggagtcttccggagagcaccggagctccctcgcgtcatatgaaaaagtcttgtgtaacagacggggataaagtataatagaccagagattgggaaagtaaggagcgctctgcaatggagatcgatgtgatcattcccctgtataaaccggggaaagaactatttacattattagataagcttgacagccagagcgtgccggtacatgaagtgatcctgctgaacaccggggaaaaatattttgagcagttgatctatggaaccagatttctggagaaatatcagaacattaaggtatatcatgtctccaaaaaagaatttgatcatggcggcaccagacgtatgggtgtgaaaaaatcttccgcagatatttttgtcatgatgacccaggatgctatgccggcagatgacaatctgatcgaacaactgacggaaccgctgcgggatcaggtggcggtatcctatgcaagacagctgccgagagaagattgtgcaccggtggaatgttataccagggactttaattatccggcacagtcacggatcaaatccgcagaagatcttaagacattggggatcaagacatttttctgctccaatgtgtgtgcggcatatcgacgggagatctatgaggaactgggtggattcgtaaaacataccatatttaatgaagatatgatctatgcggcgaaagcggtggaagcggggtatgcgatcgcttatgcggcggatgcccgggtgattcattcccataattataccaatgtacagcagttccaaaggaattttgacctgggggtatcccaggcagaacatccggaagtcttcgcagcatatccttcggagtccgagggaaaacgaatggtgaaagatgtgacagcatatttgcgggacaatcatatgtccggcaagttgccccatttttatatacaatgtgcctgtaaatatgcaggctatctattaggtaagaactatcgcaggctccccggaaaatgggtccttgcttttacttccaacaaagaatactggaaacagaacagaaaggatgtatgactatgtgtggtatcgtaggatatattggaacagaacaggcagcaccgatcattttagacggtctgtccaaactggaataccgtggatatgattccgcgggtatggctatttttgatggggagaagatcaacaccaaaaaggcggtcgggagacttaaggttctggaaaatctgacacacggaggcgagtctatgaagggaacctccggtatcgggcatacccgttgggcaacccacggtgctcccagtgatatcaattcccatccccatatgaataacgccggtaccattgctgtagtacataacggaatcattgagaactatattccactgaagaaaaagatgcaggataaggggtatcagttcatctctgagaccgataccgaggtactggcgcatttgttagactactattataagggaaatcccctggaagcgatcactaaggtattgcatcgtgtagagggttcctatgcgctgggtatcatgtttgccgatcagccggataagatcttcgctgcccgcaaagacagtcctctgatcgtaggcaagagtgagagcggcagctttatcgcatctgatgttcccgcaattctgaaatataccagaaccgtatattatgtagataatcaggaagtggtggaactgaaggaagacggtcttagattcttctcagtggacgaagaagagatcacgaaaacccccgtgaccatcgactgggatgccaatgctgcggaaaagggcggctatgagcatttcatgctgaaagagatctacgaacagccgaagacgatcaacgataccatttctccccgtatcaaggataatgatatcgtcatcgaagaactgaatatgagcgatgaggagattcaggagatcacaaagatccatatcgtggcctgcggttccgcatatcacaccggtgttaccgcaaaatatgtcattgaaggtctggcaagaatcccggtagaggtggatgtggccagcgaattccgttatcgtgatcccatcctgcagaagggcaatatggtcattgtcatcagccagtccggtgagacggcggatacgctggcagctctgcgggaatccaaggaaaagggcttcaaggtactgggtattgtcaatgtcgtcggcagctccatcgccagagaagcggacagtgttatgtacacttgggcaggtcccgagatcgccgttgcaacgaccaaggcttacagtgcacagctgaccgcactttacatgctggctatgaagttcgccaaggtgcgtggaaccattgaccaggagaagttccagagtatgctgacagatttaagatgtctgccggatcagatcgaactgctgctgggacagaaggagaagatccagcatttcgccaaccgttatgtgggcgcaagagatatcttcttcatcggacgtggcattgactatgcgatttccctggagggatccctgaagttaaaagagatctcctatattcattccgaggcttatgcagccggagaactgaagcatggcaccatttccctgatcgaagatggcaccctggtagtggctttggcaacccagccggctctgttccaaaagaccatcagtaatatggtagaggtaaaggcaagaggcgcttttgtcatggcggttaccatcgagggcaacaaagccatcgagaaggcagcggattatgtggtatacattcccgagacgaatccgtattttaccaattccctggcaatcattccgttgcagctgtttgcttactatgtggcagtgggacgtggctgtgatgtggataagccgagaaacctggcaaaatccgttacggtggaataacaagaaaaatccggagaggtgaaaacttcttcggttttttttgatctttcataattgcttcagaaagttatcacaattcggtcacatttggtggatatactatgttcataaggtgagaggaagaaatggaaatagtaaaaaatttctcacttacagataggataggaggaagcattatgtacgagaatgataatttttccggttacgaaaccggagatgaaaatacaaccggtacattcagcggagtaagcgctgcgggaagtgcaaacggttacaccacataccagatgggcggaagcaccggtagcaatacagaacctaagaaccccaaaaagcatggtggttatttccgaaaagctatggtaagtgtcagtcttggacttttcttcggactgtttgccggcatcgggttctatgcagtacagcagggcaccgggatgcttaagaccggtgcggataccgcagtggtagatgaggtcacttccgaagctgcaacagagagcagccagagtacaccgcagcttgcgaccaacgttacttatgtagagtctgatgtatctgatgtggtggagaaggttatgcctgctatggtatcgattgtgaataactttactgagacagcaaatgtcttcggacagcagtatacacaggaagaagcagccagcggttccggtatcattgtaggcaagacggatgatgaactgctgatcgtatctaacaaccacgtagtagagagcgcagatacgctgaacgttacttttatcgacggcagtgaagcacaggcacaggtcaaaggactggattccgatatggatctggcagtgatcgcagtatctttaaatgatctgagcgatgataccaagaatgccattaccgttgctactttgggcagcagtgatgacctgaagcttggtgagccggtgattgctatcggtaatgctcttggatatggccagtccgttactaacggtatcgtaagtgccctgaatcgtgagatcactctggagaacggtgctaccggtactttcatccagaccaacgcagccatcaaccccggtaattccggcggtgcactgttgaacatgaacggtgaggtcatcggtatcaactccaacaagatcggtggtactgccgtagaaggtatgggctatgcaatccctatcacttctgcaagtcccatcattgcagatctgatggagcgtcagaccagaaccaaagtagctgaggatgaagtcggttacatcggtatctctcagcaggaagtaacttcccagatctctcagatgtacaacatgccggaaggtatctatgtagtatccgtagaggaaggcagtgcagcagcgaatgccggtatcatgaaaggtgatatcattaccaaattcgacggcagcagcatctcgtcctactctgatcttcagaagatgttacagtactatgcagccggtgattccgcaaccataacggtacagagacctcagaacggtgaatatgtgtctgtcgaactgaatctcacactgggcagcagaccagcagataaaaaataaatatagcggttcccaatattgaatattggaaagacagaaaacccccggaagatcgtctgaatctcccggggattttgtttagaaaaacttcacttgtagcagtcattcgaattagatataataagcgtaggcatgagcagtgcaaggatcgtggattacgaaaaccgactgcttgcaggcgggattacgtaagacacgatacgtgtagggcgaagcccggatatcgaggtagcacgaagtgataccgagataagcactgcgcaatagacaaagaggagaataacatgacagataattacaatgatgattatagagaagtgattcctgaggaagagaaaacagagaccactctgaacgaaaaaaaagataacgaaaaaaatagcgagaacacacaggtagcggatactgcgggtgaaaattccgctgagaaaaagacagaggacaaaaaggacagcagcgagtacgaggatgtctgcttcatctgccgcagaccggagagcaaagccggcagaatgttcaagctgcctaatcatatctgcatttgcgatgactgcatgcacaagaccatggagactgtgagccagttcgactaccagggcatgttgaataatccgggcgatctgaaccagtttggcggacagaacggattcccaaatatcagctttgtgaatctggcagacctccagggagacggcggcatccccaacaagcagaaactcaagaagaaaaagaaagccgaaggtcccaagccggtattcaacatcaaggatattccggcacctcataagattaaggcaagcctagatgaatatgtagtgggacaggaaaaagccaaaaaagtcatttcagtagcggtatacaaccattataagagagtagctaccgacaccatggatgcgattgagatcgagaagtccaatatccttatgatcggtcccaccggttccggtaagacttatttagttaaaacactggcgaaactgctggatgtgcctctggcaattgccgatgctacgtcactgacggaggccggatatatcggtgatgatatcgagagcgtagtatccaagctgctggcagccgccggtaacgatgtagagaaagcggagaaaggtattattttcattgatgagatcgacaagatcgccaagaagaaaaataccaattcccgggatgtcagcggtgaaagtgtacagcagggcatgttgaaattattggagggtgccgaggtggaagtaccggtcggtgccaatagcaaaaatgccatggtgcccctggctacggtgaacacccgcaatatcctatttatctgcggcggtgcattcccggatctggatgagatcatcaaggagcgcctgaccaagaccgcatccatcggttttaattccgagctgaaggacaaatacgataaagataccgatatcttatctaaggtgaccgtagaggatatccgtaagttcggcatgatcccggagttcatcggacgactgcctatcatctgtactctgcagggactgagcaaggagatgctggtgaagatcctgaaagagccgaagaatgccattttgaaacagtaccaaaagctcctggaactggatgaagtgaaactggagttcacggacgatgccctggatgccattgccgaaaaggccatgaaacgtgacaccggcgccagagccctgcgttccattattgaggatttcatgctggatatcatgtacgagatccccaaggatgacaatatcggaagagtcaccattaccagagaatacatcgaaggtaccggcggacctatcattgacatccgcagtaatgagatcctggagcctgtggagaatctgaagcagattccggtggaagagaaataaattgaaagttagtgaaataccacccggatgactttgttgtcttcctgggtggtattttggt

SEQ ID NO: 629 - DNA, 7105 bp, unidentified
  source 1..7105: mol_type = unassigned DNA
gagggctaccgccctgccgccgacgtgctgatgttcgcccacaagtatggcgaaaagtttcacctgctcaccgaccccgccgagggtgtgaaggatgccgatgtggtggtgaccgccgcatggaacacggcccccggcacccccgaaagtgagcgccgcctgcgagacttcgcgggctttcaggtgaccagcaggctgatggagggcgcaaagcccgatgccatgctcctccactgcctgcctgcgcaccggggcgaggagatctccaccgccgtctttgaggagcacgccgacgagatctttgacgaggccgagaaccgcctccatgtgcagaaagccgtgttggccatcctgctggccggtctgtaaaaacgagaaagagccctggggctgcagaaaattgcagctccggggctcttattgtttctctcagggtctgcggctcaggccggggccctcatcagacaccagagtaggcggagaagccgccgtcaatgggcaggcagataccggtgataaagccggcagcctcgttgttcagcaggaacagcagggcacctaccaggtccttttcgctgtcgccgaagcggcccatgggggtggcagccaggatcttttcggtgcgggcggtgggggtgccgtcctcgttgtagaggagccgtgcgttctgctcgctggcaaagaagcccggggcaatggcgttgacccggatgcccaccttgctgaagtgcactgccagccactgggtgaagttggtgacggcggccttggagccggagtaggccgggatcttggtcaggggcagataggcgttcatgctggagatgttcatgatgttgcagccggggcggcccaccatctgccgggcaaaggcctgcgtgggcagcagggtgccgatgaagttcaggttgaacaccatctccacgccgctctcgtccaaatcgaagaaggtcacggtgtcatcgtccagatccgccatctcgaagaattccttgtcggtgttggcccgggggttgttgccgccggcaccgttcaccagaatgtcgcagggacccagatccgccatcacctcctctgccacctgcaggcagttggccttgttcataacgttgcaggtgtagcccttggccacgccgccttctgcctcgatcgcattggccagctccttcagcttctccatgttgcggcccagcagagccactttggctcctgcccgggccagagccttggcgaaaatggaacaaagggtgccgctggcaccggtgaccacggcaaccttgccggacaggtcggtgttcagaacattcttttccacgaggatactccttttttgatcagatggttgtggtgatacggatgattgttttcaagcggacaaggcatcagaccctgccagcgcccttgtccaggatcttattgaactggaggaagaaggtggtggcggtcacggcagcggcgatgatgtcactgacgggctcggcaaggaacacgccgaacacggggtttgcgaccacatggggcaggatgaagatgagagggatgagcaggatgagcttgcgcaggcaggccagcagcaggctgaccttggcctgacccagcgccataaagctctgctggcaggcgatctggacaccggtggagaagatgcccgccatgtagatgcgcatggcccaggtggtgtaatcgatcagggaggcatccgaggtgaagatgccagccactgcaccgggaaccagcatcatcagcagccagaagatggtggtgtagctcaggcagagggtcagctggaagcggaatgcctgcttgacgcggtctttcttgcctgcaccgaagttgaagctcatcaccggctggccgccctggcagatgcccgagatgggcatggtgcacagctgggaggcgctggtgatcacggtcatggcacccacggccacgtcaccgccgtagcgggccaggctggagctgaagctgatggacagcaggctctcggtggagagcatgacgaaggtggaaatgcccagtgccagcacgggcaggatgatcttcccttccagcttcatgtcctctttgcggatcttgaggatggtcttggggccggtgaggaagcggatgacccagatggcacccactgcctggctcagcacggtggcaatggcagcgccctttacgcccatgcccagcccaaagatgaggatggggtccagcacgatgttgatgaccgcgccgataacggtggtcagcatactgatcttggcaaagccctgcgcggtgatgaaggtgttcatgccaagcacgatcagcacgcagatggtgcccagaatgtagatgcggctgtaagccagagcgtagggcagggtggtgtcactggcaccaaacagccgcagcagggtgggtgcggcggcgtaaaagacgatggtcaggacgaccgagaagagcagcagcatggtaaagctgttgctgacgatcttttctgcctgcttcttgtcgccctggcccatggcgatggcggtgcggggtgcgccgccggagccgatgagcatggcaaaggcgttcaggagcatcaggatgggggtaaacaggcccacgccggtcagagccgctgcgccgatccccgagatgtggccgatgtagatgcggtccacgatgttgtacagcaggttgaccacctgcgccacaacggcggggatcatcagctggagcaggagctttttcacgtcacccgtgcccatatcctgctgttttttctgcgtttgtgccatggaaagtgtctcctttggtttgagcgagacggagagggctgccctcagaacgtcaggccgaagttcatctcgtagtagttgcctgcggcatcacggtaggcgtaagccttgccgttttcgtccttcatgctgtcgggcatgtaggcatcctttgcaaagccgggcacgtcgttggggctgatgcagacaccgtccgcgttcacagccagcacctcgtcgcccttgggcagggtcaggggcagcttgccaacgggagcaaagcggccgaacatcacatccagcgttgcggaggggtaggtgtcaaagccgacggtcagagcgtcggagaccttctccacattgccgacctcccaggccagcgggcagttgatgttggaaacgaccttgccgccgtgggcgtggaccgcagcagcgataccggccagacggtttgcgcccaccagagtggtctccttgtgggtctcggtggtgggcttgccgctctcgtccacgttgcagaccgtcttgtcctcgcagatgtccagctccaggtagcccggggtggcgttgaagtatgcaccggactgggggctgaccatcagcagggccacctgggcctcatcgggggtgtccaccagagtgacattgcccagcatctcgcgcagggccttggtggcggcctcaccggcctcggcgctcttgccaaaggcctcagcgtagaccttggtgccgtccttcaggggcagggtgccgtcgttcttcagcaggacaacggactcgcggtgcacgcgggaagcttcctcccagtcggccttggtggcaacgacctcggcggccttcctggggtcggcgtaggtgtcctcgaacataccctgacggaacagctcggtcagggtgcggctgacagcgcggttcaggctggcatcggtcagcaccagatcttccttcttgaagccggcgggcaccgcgtgggtgtcgtagtagtcgttggtgccgcgggcgtagctctcctcgcccagctcgttgtccagcaggccggagatcaggtccacgccgctctgggtgacagcatagccgatgcgctcgggctcgtccagcatgtcaacgccccagcacatgttgtggacgatgccggtgtcggagttgatgtagcccttgaagcccatctggccgcgcagcaggccgtcgatgaacaccttgttgtaggcaaagccgtagggctgaagctcgatggggttgccgttgaagtcctcctgcggagcgctcttctcggcgctgggcttggagtagtagggcatgatggactcggcattgtggcggatggcggcgcggaatgccgggatgtggtacttctgcagggagccgggggtggcgtagatgttccactggcctgctgcatagtgggggtcaaagccgttctcacgggcaccgccgccggggaagtgcttcacggtcatggaaacaccctcgggggtaacgccgttgctgccgccctggatgccggggatcaggtggtcgaagatctcctcaatcagtgcggggtcctcgccaaaggtgccgaaggtgcgctgccaacgggggtcggtgacgcagtcggccatgtacatgtagcccttcttcaggccgcaggcgttccactcgcggcggatggtgtcggcgaacttgtcgatgatgtcgatgcgtgcagtgcccttgacagcagcagcaatgcccagggtgccgggataggtggcaaacacgccggtggcatcgttcatgccgaacacgacctcgccgttctcgttgcggctgttggacatgacctgcatgggaacaaagtgatcacaggtctcggtcagatactgcagctggttcaggtaatctgccagatcctcgggcgtggggctctcgcgcaggatgacgtggcggttgaagctcttcttgaccatgtcagaggtgctgggcagggactgggagccgaagatgctgtcggagacgttcacgggtgcctcgtccagcaggccgctttcgtccgccacgggcttgtggccgttggctgccagacggggggaaggatacttggggcccatgcgccagtcggaggtgaagatctggccgatcttctcgctggtggtcagaaccttgacataggcctcggcgcgctcagccggggtcaagcgccagtcgttgactgcgctgacggtgccggtgccgtcgatgtccttgaaatacaggccgtcctgctcgatgaccttgcgctccacggtgctgatggtggggccgttggggttctggtagcgctttacacgctcggatgctttcactgccatagtgttttctccttttcttttgaacgcagcggcccatgccacagagccgcagatgctatacctattataataggccgccgcgcggaacaactagaaaaatttttggatatttccgcactttccttgtattctttttttgtgcgcggttagaatacaagcccgttttgtggaatgtgctgtactagtatcttgcaatcatgtgcaaaatgacgaacgctgttttttaaaactgttgatttcgcccaaggagagtaaaattgtcctgttttacctcaaaattttactaacagaaatttgatggatagttcataatgtatacataaaaatcccccggttcgcgatgtggcagccgcagcccacgggggaccgaatgaaaggccggagtgagtggcagcacaccggccgcagaattgaaaggagagcttctctatggcaaaggtcaaacagccgcttgaagaaaacggcatccacagagcgaaaatgtgggagatcatgatgtacgctctgaacaacacctccaccaacacctacatgatggtggtcggttacatcagctacttcctgatcggtatcgtcggtctggcatccgtgctggccggttccattgttaccatcatgcgtatctgggacggtgtcaccgacccgttcgttggtatgatggtcgataagaccaacggcaagttcggcaaaaaccgtccgttcattgtcatcggtcagatcatcatgttcgtcaccaccttcgtgatgttcaacttcatccccaagatgggcactggtgtccgctttgttgcgttcatcatcatctacatgatctacatcattggctatacctgccagtgcgttgtcaccaagtctgctcagacctgcctgaccaacgatcccaagcagcgccccatcttcgcaatgtgcgataccgtgtacaacatcatcctgatgaacatcgtcatccctgtcatcgttaccgacagcctggttcccaagttcaccctgactgccgaggccaacgctgcagagatcgcttctctggtggcacagaaccccgctctggcaggcatcgtggagaagtctggcggcaacctgtccgctttctacaaccccggcctgttcaccaccatgcagctgatgttcggcggcctgtctgcagtgtttgcagtctgcgccatcattgctctgtggcgtaaggaccgtcccaagtacttcggcctgggcaccacccagaaggtcggcgttaaggattacgttgacaccctggctcacaaccgcgccatccagatgctggtggtctccgcatctaccgataagctgttcatgtctaccatgagcaactccaccgttatgatctgcctgttcggcatcatcttcggcaactatgccgcattctccagctactctcagatcacctctatccccatcgctctgatctccatcctgctgatgaacaagatcgctcgtcagatgggccagaaggcatccatgatgaccggcacctatggcggtatcatcggttctatcatcatcaccctgttcctggtctttgtgaaccccaagggcgatgcttccaagtttgcgatccccgcattccgtatcatccgtcccgacacctggggcaccctgttcaccggctggagtgcagtgggcctgatcttcatcctgctggtcatcgcatggcgcggtgtgcaggctctgtcctcctctatcgttatcaccatgaccgctgactgcgccgactacgaggtttatcgtaccggtaagtacgtccccggcctgatgggcaccctgttcagctttgtggataagctggtctcctctctggcaaccactctggtggccctgttctactccatggtcggcttcaaggacgctctgcccgataccctgactccgtactctgacggcatcttctgggcaaccatcggctgctttgtcctgctgcccatcgttggctggctgtgcaacgttgttgccatgcacttctatcccctgaccaaggagaagatggaagagatccaggctgagatcggccgcatcaaggctgaggctgctgcaaagcaggcttaa

SEQ ID NO: 630 - DNA, 5549 bp, unidentified
  source 1..5549: mol_type = unassigned DNA
atgacggacaagaaacggaaactgacacgtccccgaaccggaagaatactttccggtgtatgtgcaggactggcaaactttttcggacttgacgtatctttagtacgcatcgtttatacgttcgctaccgtctttactgcttttgcaggtgtaattatatacattatattattgattatcataccagaagaatccaatagatattatagaaatgattaaagtaggaatcatcggcggagccggatacacggcaggcgaactgatacgtttactgctcaaccatccggaagcggaaatcgtattcataaacagttcaagcaacgccggcaacaaaattactgatgtacacgaaggactgtacggtgaaacagatttggtatttaccgaccagcttccgctggaagaaatcgacgtgctgtttttctgtacggcacatggcgacacgagaaaattcctcgaaagccacaacgtgcccgaggagttgagaatcatcgacctctccatggactaccgcatagcctctcctgaccacgatttcatttacggcttgccggaactgaaccgccgcgccacctgcaaggcaaagcatgtagccaatccgggctgctttgccacctgcatacaattggggctgctgccgctcgccaagcacctgatgctgaatgatgacatcatggtgaatgccatcaccggaagtacgggtgccggagtgaaaccgggtgccacgagccacttcagctggcgcaacaacaacatgagtgtttacaaagctttcgagcaccagcacgtgcccgaaatcaagcaatcactccgccagctgcaaaacagtttcgatgcagaaatagattttatcccctaccggggtgacttcccgcgcggtatcttcactaccatcgtagtaaagaccaaagtggctctggaagaaatcatccgtatgtacgaagaatactacgccaaagattcctttacatttgtcgtggaaaagaacattgacctgaagcaagtggtgaataccaataaatgcctcatccatctggagaagcatggcgacaaactgcttatcatttcctgcattgataacctcctgaaaggcgccagcggacaagctgtccataacatgaatttaatgtttaacctggaagagaccgtaggattacggttgaaaccttctgcattctaaaaaaaatgaatttattcgacgtataccctctctttgacatcaacatcgtcaaaggaaaaggctgccatgtatgggacgagaacggtaccgaatacctcgacctctacggtggccatgcagtcatctcaatcggacatgcacatccacattatgtagagatggtgagtaaccaagttgctacgttaggattctactcaaactcagtaattaacaagctgcaacagcaagtggcagaacgcttgggaaaagtctgtggctatgacgactactcattcttcctcatcaacagcggtgccgaagccaatgaaaacgccttgaaactcgcctctttctacaatggccgtacccgtgtgatatccttctcaaaagcattccacggacgtacctcactggcggtggaagtaacgaacaatcctaaaatcatcgctcccatcaacaactgcgggcacgtcacctacctcccgttgaacgacatcgaagccatgaaggccgaattgtccaaaggagatgtctgcgcagtgattatcgaaggcatacaaggtgtaggcggcatccaactgccgacagacgaattcatgcaggctctccgccagacttgtacggaacacaacacggtcttgattctcgatgaaatccaaagcggctacggacgcagcggcaagttcttcgcccatcagtacaacggcatcaaagccgacatcatcaccgtggcaaaaggcatcggcaatggtttcccgatggcaggcgtactcatcagcccaatgtttacaccagtatacgggcaacttggaaccactttcggcggaaaccacctggcttgcagtgccgcccttgccgtgctggatgtgatagagcaggaaaacctgatagagaatgcagcccaagtcggcaacttcctgataacggaactaaagaaattccctcaaatcaaggacgttcgcggacgcggactcatgatagggctggaatttgaagaacccatcaaggaactgcgcctaagactactgaaagagcagcatgtattcaccggtgtaagcggtacgaatgtacttcgcctgctgccgcctctgtgcctcggcatggatgaagcaaaggaattcttggaacgcttcaagaaagtactttaatatttgacacaaataatcagccagcaaaagaaacgaccgaaaagcagaatacctttctctctcggtcgttttttgtagaaaatttatctacctttgccagcaaaacaactcttttaacaacaaaaagatatgaaaacagtaattatcggtgcaggaaatatggggggagccattgcccgagggctggcaaaaggaacaatcatccctgccggtaacatcattgtctccaaccccacccagggcaagctggacaagctgaaggcagaattccccgcattgcaagtgaccaatgacaaccaggaagcggcagccggtgcagatatgataatctttgccgtgaagccatggctgatggagccagtgataaaggaactggaactaaaaggcacagagattcttatatccgttgcagccggcattccttttgaagagctgacacactatgtagcagacaaagaaatgaccatgttccgtcttattcccaataccgccatcagcgagatggaaagcatgacactcatcgccagccgcaatgccaccaaggagcaggagcaactgatgctggacattttcaaccagatgggactcgccatgctcattcccgaagaaaagattgcggcaaccactgccatgacttcctgcggcatcgcctacgtgcttaagtatatccaggcagccatgcaggccggcgttgaaatgggtatctatcccaaagacggcatgcgcatggtggcacaatccgtgaaaggggcagccgagctgattctgaacaacgacacgcaccccagtgttgagattgacaaggtgtgtacccccggaggaattaccatcaagggaatcaacgagctggaacatgaaggattcacctccactgtgattaaagccatcaaagcgagtaaatgatatttaatgtgctaatgtaacgatgtcccgatatgcctatgagctacggtataattaaacattgtgcagcctattggcacattgccacactttaataacaacccattaaaaaaatataattatggacgaacaaatcagacaaatagccgaacgcctgcgcggactgcgtgacgtattggaactgactgccgacgatatcgcccgcgactgcgacatctctgcagaagagtaccgtctggccgaaaccggagaattcgacatctcggtcagcatgctgcagaagatagcacggcactacggcatatcactggacgcactgatgtttgggcaagagcccaaaatgagctcctacttcctgacacgtgccggaaaaggaaccagtatagaacgtaccaaggcatataaataccaatcgctggcagccggtttcatcaaccgcacggcagacccgttcatcgtgaccgtagaaccgaaaccggacagcgagccgatacattacaacagccataccggtcaggagttcaacctcgtactggaaggccgtatgatggtcagcatcgacggcaaagacttaatcttaaacgaaggagacagtctatacttcaactccaaactgccgcacggcatgaaggcgcttgacggaaagactgtaaaattcctggcagtaatcatgtaataaagttatggtagaaagatttttatctcaaacatccttcacctcacaggaggacttcatcaagaacttgaagataaacgtaccggagaatttcaacttcggctacgacgtagtggatgcctgggcagccgagcagcccgacaaacccgcactgttgtggaccaatgaccagggcgaatgccggcagtttacctttgccgacatgaaacggtacacagacatgacggcttcctatttccaaagcctcggcatcgggcacggagacatggtgatgctgatactgaaacgccgttatgaattctggttcagcattgtggcactgcacaaactcggtgcagtggtgattcccgccacccacctgctgacgaagaaagacatcgtataccgctgcaacgccgcagacattaaaatgatagtctgtgccggcgaaagcgtcatcaccgaccatatcacggcagctatgccagagtctccttctgtgaaacgcctcgtaagcgtcgggccggaagctcccgaaggattcgaagacttccacaaaggtatcgaggccgccgctcctttcgtgaaaccggaacatccgaacacgaacgatgacatctccctgatgtacttcaccagcggtactaccggagagcccaaaatggtggcccacgacttcacctatccgttgggacatatcgtcaccggcagcttctggcacaacctgaaagagagcagcctacacctcaccattgccgacaccggttggggaaaagccgtgtggggcaagctctacggacaatggattgccggtgccaacgtatttgtatacgaccacgagaagttcactcccgcagccatactggagaagatacaggattatcacgtcacgtcgctttgtgcaccgcccaccatcttccggttcctcattcacgaagaccttacgaagtacgacctatccagcctggaatactgcaccatcgccggagaagccttgaaccccgctgtattcgagaccttcaagaaactgacgggcatcaagttgatggagggtttcggacagaccgaaacgaccctcaccgtcgccaccatgccctggatggaaccgaaacccggcagcatgggattgcccaatccgcaatacgacgtagacctgatagacaacgacggccgttctgtggaagccggtgagcagggacagattgtaatccgtaccgacaaaggcaaaccgctgggattgttcaaggaatactaccgcgatgccaaccgtacccacgaggcatggaacaacggcatttactacacgggagacgtagcctggaaggacgaagacggctacctctggttcgtgggccgcgccgacgacgttatcaaaagtagcggttatcgcatcggcccgttcgaagtggaaagtgcattgatgacccacccagccgtagtggaatgtgccattaccggtgtgcccgatgaaatccgcggtcaagtggtaaaagctacgattgtgttggcaaaagagtacaaggcacgcaccggagaagagcttgtcaaggagttgcagaaccatgtgaagaaagtgacggctccctacaaatacccgcgtgtcatcgaatttgttgatgagctccccaaaaccatcagcgggaaaatccgccgtgtggaaatccgggagaacgaccggaaataa

SEQ ID NO: 631 - DNA, 28873 bp, unidentified
  source 1..28873: mol_type = unassigned DNA
gttacaagttctttcgatattgttcaattttcaaggtcctgtgcgcctcagccttagcggctgacagcttagttattttatcactttcgtgataaattgtcaagcacttttttgaaagatttttgagattcatttttgattctgtcgaatctctccgtttgacgtcgtttttgaagtatttcattctgtcggacgtccgcctgacagtaatatattttagcacagcatccttcaaaaagcaagctttttttacaaattttacgtcaaaatcattcttttgactttttgcccagttttttacattttttatagacacttcctcccttattcctccaaaagccgggcacgcagccggatcaggatcttacgttcccgcctggagatctgtacctgtgtagtatgcagtgcttttgcagtctcgctctgggtgcggttgccataaaagcgcagacgaatcagttgcttgtcctgctctggcagcgcttcgatcacctctgccagactgatccggtctgccagttcctcctccggagattccaccgggatatccagctgccggtctccatcctcgccgccctccggggtcaggctcatggcgggctgcgcggcctgtatagcaagggctacattctctatcggttcgtccaactgctctgccagctgctgcaaggtaggctctgcgccgcacagcttcatagtatgctcccgtgcagcttgcacccgcattcccagttctttcagagagcggctcactttgactgtaccgccatcccggaacagctttttgatttcaccaaggatcaccggcacggcataggtggaaaaacacacgccccgactctcgtcaaaattatcataggctttgatgagccccacgcagcccgcgctgtacaggtcgtcatactccatgccgcgcccacggaatctgcccgcacaggcgtgcaccagtcccagattctgcgtgatgaatgcttcccgccgggtcttatccgttaccatataccggaccgcctttcctttttatgtaggctcccgtcgggacagacgcttgaccagcagcacccttgtgcctttgccgggctttgaggtaacttttaccctgtccataaaactttgcatcaccgcaaagcccagaccggagcgttcttccgggttgccggtggtgaacaatggctgcatggcctgctccacattggggatgccgatgcccttatctgtaatggtgatgtgcacctcccggtcggggtagaccgctatggtcatgcacaccggcccgatatgctccgggtaagcatggacgatgcagttggtcaccgcctcggacactgccgttttcaggtcggccagttggggcacggttgggtcgtatcgcgccagaaaggctgccgtaacgccgcgggcgtaggcctcgttgctgctaagggaatcgaactggatgcgggtactgttctctgctttcattgcgcattctccttttctatgttctccgtacaggggatgcccgccagccgcaggactttttgcagctgtgcgggggcgtgctgcaaccgcaggctcgtgcccagaacgtgggcgcagcgctgccgccccagaataagtccgatgccggaggaatccatgaaccctaccccgccaaggtcgataattagggtgcggggactgcggctgaccagtgcatcgtccagctgcatccgcaggctctgggcggtatcgtggtcgatttcccccgccagataggcatacagggtctcccctgctgcgctgaaagtcaccgttgccattgcttgtccatctcctttttttgcaaaataaaagatcccgtacacataacttcagtgtacgggatcttcgggttattttttagaaaaagctgtcggcagcttacgcctttgccagcagctcggcagcttccagcgctgccgcctcgctgccgcagaccagcagcccacggcgggtgttggcgtgcgccagctgcaccgcctcgtccagactggtgcagagctgggcgtcaaagtgatactttgccttctcggtcagacgccgggtcagctgctcctccacaccggcgggcgtgacgagatacaccttatcaaaggggctctcgctcatgccgggcatggtggatttatcctttttctgttcctcagggctcaggccggtctccagcgcggagaagaaggcttcggcgccctcctcctcggtcaggccgatgatagcgctcatgtggcgcaccttggccatgttcaacacgcgcagcagcgcggcagcctgctgcggggtgcggcaggcatccagaatgaccagcgggcgctgggaaagcacccggatgctgcagcggttgtccacggcggcaatgccatccagaatcgcttcatcggagatgtccacccccttgcggcagagcgccagtgccagctccaccgccatggcggcattgcctgcggcgtgacgccccagaaaggccagcggcaccgtatagccgccgtagtctacccggcttgcgaactgctccgcctccaaaaaggtgatatcctccgggtcgggcactaccagctcacagccacacttgcccgcagccacaaccagctcactgagcaccgccttgggctgctccggcgcggtgacgcagatgctttccttgcgcatcacgccgcctgccaatgcagccagacgttccaccgagcggctcacgccgtccggtcccaccgctgtgacggcgcacaccggcatttttggcagcaccgcagccagacctgcgtccggcagctctactaccgccagcgtgcagccggcttcgccaaagcagtacgcagcggcaacaagctctgccgcctgcaaaggcagctcctcatgggcagcaagggcatcggcggcgcggcacagcagtgcttcgtccaccggcttgccatccacacggatgcgggcagcaagcggctcgcacccggcatggtagacaccggcacggatcccctgcgcgtgcagaatggctgccagcagacgcgccaccgccgttttaccggcagtgcctgccacacccacgaactgcacctgctgcaccgaggcgggcagcagcgcacccagctgcgccgggtcggcaaagccgtccggcagagctgcaaaatactgatttgcctgttggatggtcattcgtatctcctttttatgtgataatacagtccctcgcaggccaacagcagtacgatggcaacaaggatgccagccagaacaccggcagaatccagccacacatcggtgacctgactgctgcgtccctccgagaagagctgaatggtctcatcggtcagcgccgtcagcacaccacccagcatgggcacggtgatatgccgcagcgggtgacggctgtacacccgcatacagagcatgagcagaaagccctccagcgtatactcgcaaaagtgtgccagcttgcgcacgatgtgcatggtcagatgctctgccagccccggctgccccaagcggcgcaggatgatgcgcatccacgccagcacccggccgctggagccagaggagaccgtcgccaccgccatggagttggaaaagatgaaccagatacaggcgatgagtgcaacggtaaagaccacacgtcccgcaatgacccacagcgaggtgcgttccgtatcgttatagcgttccacagtctcaacccagagccttgatgctctgctcaatgttggccagcttgtcctgactcttggcgaactttgtgcggatctcctccaccagagccgccggggcacgctccacaaacttggggttattcagctggttgccgaacatggccatttccttttcggccttggccttttccttgttcaggcgagccaattctttctcgcggtcgatgagctccatcatggggataaagccgcgggcagcgtgggtggacacctgcaccatgccatcggtgctgccctcgtacttttcggtaaaggttacatcggtggcaaaggcgaacttggccagatagacttgtgcgttctggaagggggctgcatcggcagtttcaatgatcatgctggtcttttttgcgggatgcacattcatctcggtgcgcatggtacgcacagccttgatataatccatcaccttttcaaaggcttcctcctcggctgcccagttgtgagcggcgtcaaaggtgggccaagcctgcgtcatgatggtctcggcagagccgggcagagcctgatacagttcctcggtgatgaagggcatgaagggatgcagcagcttgagcgccttatccagcacatacaccagcacacggcgggcggtgtcggcctgctgtgcatcgccggagttcaggcggggctttgcgatctcgatgaaccagtcgcagtagacgtcccagataaagctgttgatcttggcagcggccagccccatctcgtagtgctccagattgtcggtcatggcaccggccacctgattcagcttggtcagcacccacttgtcgctcatgtccagcagctcttcgctgggcagacccggctcaaagtcctcgggcaggttcatcagcacaaagcgggtggcgttccacagcttattggcaaagttgcgggcagcctccaccttcttttcgatatagcgcatatcgttgcccggggtggagccgtccaccagcataaagcgcagggcgtctgcaccgtactgggcaatgacctccagcgggtcgatgccgttgccaaggctcttggacatcttgcggccctgactgtcacggacgataccgtggatgcagacggtatcaaacggagccttgccggtgtaagccagaccggagaagatcatgcggctgacccagaagccgatgatgtcgtatccggtgaccaaggtgttggtggggtagaaatacttgaggtcggcgctgtcctcgttgggccagcccagcgtgctgaagggccacagcgcagaggagaaccaggtatccagcgtgtcggggtcccgggtcagctttgtgctgccgcacttggggcaggtgcagggagcggactttgccaccacggtctcgccgcagtcgtcgcagtaccaggccgggatctggtgaccccaccacagctgacggctgatgcaccagtcgcgggtgttcttcatccagttcatatagttcttggtaaagcgctcgggcacaaacttgatctcgcccttctctacgctctcaatggcgggctttgccagcggctccatcttgacgaaccactgcttggagatcatgggctcgatggtggagtggcagcggtagcaggtgcccacctcgtgcttcaggggctcgatctccttcaggaagccgccctctttcaggtcggccagaatagccttgcgtgcctccagcgtagtcatgccggcgtacttgccgcagtccagcacatggggctcgttgacggtgttcttaccggcggcaaacagagcatcggcggcagccttgtcggcagcgccggtcatgtggccgtcgtaagtgaacacgcgcacgatgggcaggtcgtggcgcagaccgacctcaaagtcgttggggtcgtgggcgggggtgatcttcacgacaccggtgcccttggtcatatcggcgtgctcatcgcagacgatggggatttccttgttcagcaggggcagcaccacatggcagccgtgcagatgggcgtagcggggatcctcaccgttgatggccacggcggtatcgcccagcatggtctcggggcgggtggtggccagctccagcatctcgccggtctccttgaccgggtacagcagatgccagaagctgccgtccttctcctcgtactccacctcggcatcagagatggaggtgttgcagtgggggcaccagttgaccatgcggttgccgcggtagatcaggcctttgtcgtacaggcgcacgaacacttccttgacagcctcagagcagccttcgtccatggtaaagcgctcgcgctcccagtcgcagctgctgcccagcttcttcagctggctgacgatgcggttgccgtacttggtcttccatgcccaggcgcgctccagaaaaccatcgcggccgaccatctccttggtcaggccctcggcgcgcatagcttccaccaccttggcttcggtagcaatggaggcgtggtcggtgccgggcacccacagggcggcatagccctgcatccgcttggtgcggatgaggatatcctgcatggtgttatccaccgcatggcccatgtgcagctgaccggtaacgttcggtggcggcatcacgatggtataaggtttcttgtccggatcggccttcgtgtggaagtagccgccgtccagccagaactggtagatacgatcttccacctgactgggatcgtactgctttgcaagctctttcatagtgtcctcccaaaaatttgatgaagtgggacgcaaaaagccgccccacggagcgttccatgggacggctgtaaatacatgaccgcggtaccacccaaattgcgcggaaggttccgcgccccttgatgcccctgtaacgtagggcagacccgaaagcggcttaccggcaaggctcaccgctcctgctccaaagtgacagtgccccgccggtatcccgccgggttttcagctgcccccggctctctgtgcggtcccagacgatgcacactctttttcaacgcatttataaaaagaatataacgttttttgtgggatttgtcaatcagtttttcaaacctttcacccaccgcaccagcttccatgcctttgcgcccagatgcgggcagtagcttaccatcagcgcctgcagcttctggctttgatttcccggcggaatctcccacgcagcatgacggtgcagctttgctgttttcagcagcattttttccttctcggaatcccgctccggctggttgaccagccggaaatatacctcggcgcaggacatgacgcagcgctgttccgtagtgctgcggaaggggtccggctgcccctttaccagctgccagatctgttcccacgccagtgccgccgtgtaaaagcgcaggctcggctcctgccgcacggcagagcttggacgttcaaggtaagcatacagcgggcagttcaaaaatgccagactgcctgccttgaggaattccgttacaaagaacagggcatcctccccgtagaacagcgccgggtcaaagcgaacatcctgcagcacctcccggtgggtcagcatccgccagcagtgcccgccgctccattcctgcatccacgagtagttttccgtcgtgattttctgcggtgccgggcactccgtcaccgtccacagagtctcgttttcccgtatgctgcggtagcggcacatggcaatgcgggtaccgcagctgcacaaagcatcgtacagccattccagatactgcggcagcacaaggtcgtcggaatccacaaagcagatatactcgccccttgcctgctccagcccaaaattgcgtgccgaggacaccccgccgttttccttgcggaaaatacacacccgggcatcctgtgccgcatactgctgcaaaatttcccagcatttatccggcgaaccgtcatccacaaggagcagttcaaaattctgatacgtctgcgccaacaagctgtccagacatgcaggcagatacttttccaccttataaaccggcacgatcaccgagatcaagggctgctcctttgcgttcattccgctctccttttcaatatcttcagtccgcgctgcctcagcgtatcatattcttcgctgccacggtagaacagtacgatcactcctgcgaacacagctgtgtaaagcagcccatccagaataaaaataccgaaattgcccaccgggaaccgctgcacccacagcaccgctgccgcagagaccgctgctgtaaggagtgtgcgcttcagatactctgcaaaataatcccgaagtttcttctgccatgcatcctgaacgccatacttcaaaaagatgtagggttctacccaggcacaggtacacagcgtgctgatgatggtgccccagataatgccggtcacgccgtactgccgcaccagtacaagcgaggccaccagattgatgatggattccgccaccgctttgtagcggtcgttccagaacagccccatggcctcccggaacagcagattcgtctgccgcattcgtgtaatgtaaaactctgccacaatgaccatcacggtggtcatcgaaaaacagtatttcccgccaaacaacagcgtgataaaggggttaaacagcatcatcagcccgccggtcaggtaagcggacatgacaaagaacataaaatccatttccttatagattttatacagccggtccgaattttccattactgcaaaattgccgatactgccggaaaaagccacagcaaattttcccatcaggttgttcagtgcattgatcaccaaccggtaattggagtaaaggcccaccgtcgcaaggccaataaaggaggacatcagcagactgtccgtattgcgcacgatgatggttgacagcttgtgcatactcatggcaccgatatttttcaggatgccgttccgttcctccctttctggcagctcatggcattccttcaggtatggaaactccttgtccaccatgcgggaaaccataatgttgggtaaaaactgtatcgcctgctgaaccgccagatacaggatgaagttccgggtcaacagcagcaccgtgatctgcgaaacagtcttgatgcactcgcacgccatactccatcctgcgcagatatagcctttctggtaggcctgatagatggaatttttataactcagcagataggaacttgctgaaccgagcacatatatcatatagatcagggtgatatgttcaatgccctcgccgcccttgatgaggtaggacagaaacggcagcagcaccaacccgaacagcaacaccgagactgccaccgcccggtacatccacttgtacaggttcatcagccgcgccagtttctgctcgtcatcccgggctgccggttcatacatgctgaacaccatagccgtaccgatgcccagctccgcaaaattaaggatgctgagcacatcggtaaacaggccgttgacccccagatattccgctgaaaggcaacggatgaacaccatccggttgatgaaggacagcagcatcgtcaaaaactgcccgccaatgttaaacagcatattgatgatcgaataacgtgttctcatgcgatttttaattctcccctgcctttgatgttccgcagccacatatattcccgcggaaatagccgcaacagcaggctttgcagccagagtcccgccggaacggtacaatactgccgcgtccggtccaccacatcaaactgcatccgcagcatttcccggctgcggggtgccttgcgcagcgccgggggcagctgccggtacacccggctcacgctgcccatcgtaaactttgccgcatttgccagcgcatcgtatacctcgttttccacgaggcagttccaataccgctgtgcggcctcggcagcatcgaaatggcgcagcgttttgcttccgttcataatgctgctgccgcgctgcacataataatacagctcctttggcaccaccacggcctttttggtgttcagacagatttctgggagcacaaaaatatcctcgttcagcttaccctccgggtagcgcagctgcgcaaagatagcgcggcggtacagcttgttccacgcaggctgcgccatcgtattcgtggctcttttcagcagttcccgcccggtaaagatccgctgtgcaagcccggtgtacggcggcaggcagggtgtgcctgcctcgtccaccgcagcgtaatcgcacagggcaaggtctgccccggtgctttgcacggccttgtacagtgtttcgtacatttccggtgcaatatagtcgtcggaatccacaaagccgatccactcgccccttgccacatccagcccggcattgcgggcagcagaaagcccgccgtttttctggtgaagcacccggatgcgggcatctttcgcggcagcggcatcacacagcgcagggcaaccgtccggcgaaccgtcctccacaagaatcagctcaaagtccgtaaaggtctgcgccagaatggaatcgatacatttttgcagatagttttccaccttgtacaccggcacaatgatgctgagcaatggtttttcgcaggacacagcgtgttcctcccgttttatcttttcagtccgtcacctcggtgcgcaggcgggcaatgagccgttccatcagcgccacccggttgaagggggtcatcaggtaaaagccgtctgcatagggcgcagccgccttggcagcctgcactgagacttccaatcccagctcctcgcctgcggcgcggtccagcccttcaaacttctggatgatggcatcatccacatggatgccgttgacctcgttttccataaagatggcgttgcgctggctgaccaccggcaagataccggccagaatttttgcccgctcgcccagcgtctcccgggcttttttcaggttttccaccgcctgcgccgacagcaccggctgggtaaggaagccactcatgccgttttccagtttttcagcggcacggcgcagttccacctcaaaattgcgggcgttcaggttcagcgcaccgaacaccgtgatgggtgcgggcatctcccgcccttctcctgccagcgacacgatatactgtgccagcttgcgggagttgaactggtacacatttttcacctcgtcccgctcggcggtggggatggggtcgccggtaatggccagtacctcccgcacgccctcggcgtacagtcccagcagcagcgctttggtagcgttcaggttgcggtccctgcaggtcatgtggggcagcacgttcatgcccagctcccggtgcacccggcaggccaccagcgaggaatccatccgtgcccgggcaatagggcagtctgcaatggtcagcaggtcggcaccggcggcctgcagacggcgggccccctcgagatacacggtcaggtcggcgtccttgggggaatccagttccaccgcaatgacccgctgtccggtgcgcagcttgcgcaaaaaggcatcgtccgtttccactgcaggctttgccgctgcagcgggctttgccgccggggcggcgggcagcgcttccggcagagcatccagcgcggtgcgcagggcagcaatgtgctgcggcgttgtaccgcagcagccgcccagaatgcgcacgccctcactggcaaggcagctcagctcccgggcaaaatattccggcttgccctgataacgcacctgcgcccgtgccaccaccgggtagcctgcattgggcatgaccgaaagcggcagccccgcatcccccagctgctgcaccagtgcccgcatcgcgcccggggcagatacgcagttcaggcccacggcatccaccacgccgctctgcaccacgcggcgcacaagctcggcacagtaacggccctcgcgggtgtagccgtccggcagcaccgcaaaggataccagtacaaaggcctccggcacggtctgcttcagcgcacgaatcgcttccagcacaccgtcctcggcgctcagggtctcgaacagaaaattccgtgcacccagcagggcaaagcgctttgccacagcaagatacacctgctccgccgggagattttcggtatccggtgcggggccaaggtcggcaaacactgccgcgccggtctccccggcggcctttgctgccagctgccagcctgcatctgccagctgctcccagccgagctgctgcgccgccgccagacgcggcaggctgaaggtgttggtcttgatggcgtccgctccggcagcaagatacgcccggtgcaccgccagaatgccctcggggtcggtcaggtttgcctgctcgcactcttgccccggctttgctttataataggtacccataccgccatcgaacagcagcggccgctgggctaacagtttgcgcacatctaacatcgatactttccctttcctataaaaagacttcatttttcagtttatcgtagttcacccatccggtcaagcggttttcttgatttcgcttgcggcgcggccgtttttgtgctatcttagggataacttttgagaaaagggagaggatggatcatgcgccacaccggcacacctgaactggagaccgaccgtctgctgctgcgccgtctgctgccgcaggacgccccgcagatgtacgaaaactgggcaaatgacccggctgtgacccggtttttgcgctgggaaccgcacaaaagccctgccgagacccgggaactgctttcggcgtgggcagagttgtatccgaacccggattattaccagtgggccatagtagaaaaggccaccggacaggtgtttggctccatctccgtatacaacgccctgctgggtgagccgcagcaaaaggccaagtggccgggactggaactctccggcggcatctgggagccgggctactgcatcgggcagaagtggtggggcaagggccttaccaccgaagcactgcaagctgtggtagatttctggttcaatcaggtgggcggtgccttcctcacctgctgccacgcggtgcagaaccctgccagcggccgggtgatggaaaaggccggctttgtgtaccatcacaacgacgtttaccacaaatttgacggcacaccggtggaatgccggtgctatctgctgacaaaagaacgctacgataacagaaaggacttactttgagcgagctttatgatattctgaccgagacccctcccacaaaggtggtgctgctggcactggatcagggtctgtgggactgcgagcgcagtctggcagagctttctgccctgtgcgaagccaaccacatggaggccgtggcgcagatcacccagaagcgccagaccccggaaaccggcatcgtgctgggcagcggcaagctggaagaggcttcccttgccgcccagacgctgggcgcggaatgtgccgtgtttgacggcgagttgaccggcagccagatccgcaacatctccaacgcgctgggcgggctggaagtcatcgaccgcaccatgctgatcttggaaattttccgcagccgcgccgtgaccaacgagggcaagctgcagaccgaactggcgttgctgcgctaccgtctgccccgcctgcagggcatgggcgaagcgttgagccgtcagggcggcggcggtggcggcggcggcggcgcccgccgcggtgccggtgagaccaagctggagctggaccgccgccatgtgcacgcccgcattgatgcgctggccgagaagctggccgagatggaaaagcgccggggcgagagccgcaaggcccgcgctaagaccgggatgccggtggtaagccttgtgggctacaccaacgtgggcaaatccagcctgatgaacgccctgtgcggccccagcgtagccgaagccgatatgctgtttgccacactggaccccaccagccgcaagctggtgctgcccagcggcatggcggtgctgctggtggacacagtaggctttgtgtcccgcctgccccacaatctggtggaggcgttcaaatccaccttggaggaggccgcatggtctgatgtgatcatccgggtggcagacgccggggatgaacagcgcgaggaacagctcgccgtcaccgacgaagtgctggacgggctggactgcgccgatatcccccgcctgaccgtctacaacaagtgcgataagcccaacaccctgagctttgaccccgacattctgctgaccagcgccaaaaccggctacgggctggacaagctgctgcaaaagctggacgaggtgctcagcgaccgggtgcacaccatccgggtgctgctgccctacgacaagcttgggcttgccgcccccatgcgggagcgcggcagcgtacaggtggaggaataccgggaggacgggctgtatctggaaggcatcgtcaaaaccgaggacctgcactgctttgagggctatctggtctgataggcgcatacgatttaaattgcctccgctgcgctctggctatcatcagcggaataatattttgatatagagcaaacccggaaagtctgcggactttccgggtttgcattttcacgggtggggtcgtgaccggaaacaactgctccacggttcaagtccgtggtttaccgccactcccttttgtgaaaaagaaaaaagccccaacaaacacaaaaacccgcctggcagcgggtttttgtgtatagaggggtgggaaagtatataaagtggtgaatctcaatatcattggcagacttttattcattgcgctgccttgcatgatgtattatacccgtttttcttttcttgtcaaacaggattttcggattttgctttaaaataatactttacttttttgcaaaaactttatataattaacatagaatttcagaaacgaaattttattccatttccgtgggtttgcacaacataaaaactttactttcagaaaattttatacaatccaacatattttgaaggaggctcttctcatggacgatcttgaccgcaaaatcctcacccttctggcaaaaaacgcacggatgcccgtcaaagaaattgcggaacaggtatcccttaccagcccggcagtctccagccgtatccataagctggagacggacggcatcatcagcggctacactgtcacgctgaaccgtccggcagaccggatgtatgtggatgcgctcatcagcctttcggtggccccctccaagcaggatgcttttctggaactgctgcagaacagccgcgaggtgctgcagtgctaccacgtcaccggtgcgtacacctttctggtcaaggtcagctgcggcagcatggcacagctggagcacctgatcttacagttccagaagctgggcaccaccagcacccagatcatcctgtccaccccggtgaaccatggcgatctggacgccttgatgctgtaagcaggcgctgttcataaaactgttactttttccctgcaattttgcggtgcggtggttcgtatccagaatagcagcccaaaaccggcacacactacctgtaacgtgtgcgcccggctgcgccttccacacacagcactatgaaaggaaatgcaatactatgaaaaaattcatcgccgccctgctggcagggctgaccctgtttactttggtgggctgctccggcggcagcaaggccgacagctccacccccaaggactacgcccagatcatccacgacgcccgcagcgacgaggacaacgagtacgatatgatcttcaccaagggcgaggacggcaagtttaccgccattgacggttacagcgccgagtacgagcccgaccagctgaacgaagagatccgggacatcctgatgcccctgctgaacctggaggacggccagtacaccgcctttgctgccagcatttccagcatgatggtacgcagctacgctgttgccatcgtaaagcctgccgagggcaagaccgatgaggtaaaggcagcactggaggcctacgttgccagcgagcagcagtccatggagcactatctggaggaccaataccttgttgccaaggccgctaccgtcactgtagcccccaccggcgaggtcatccttgtctgctgtgagggcagcgataccgtccttgccaacatcaaagccgctctcgcaaaataattttcccgcataaaccccggcctttgcagtatgtttcatctgcaacggccggggtttggtttttatgcttattccagatccagcttatttttcatcagccagctggtaaggacaaaatagactgcgccgatcagaatcgttacaagaaggacgagccagagattgccgctggcggaataagccatcggcatcgctgccacagagccaacgatcacccgaatcccgccgcctgcatccagtttgccctgaatcagctgcaacaggaagaaggccagaatgctggcaatcgtggaatggttcctgaactgatgcccgatcatgcaggcggcgtagatacagaggatgaggactgcaacgcccgccagaccaaggacgatgatccacgccagctcgctccagaattcaccgccgatgctctggatcgccttccagctgaatttcaggacatcgccccagcccgtcgtgatcgtctccccattgatgaccgttttggaatcctcgaaggcgcacaggccgaccagcatcagaaggacggacaggatcccgaccactccgctgcagatcacccagaccatgctggaaatgagtttggacgcaaccagctgctctggatggaccggaagggtgtgcatgagatagccctcccgccccaacagatttttggtgaaccgctggatgatcgtcacaatacagaccactccgatggcaaccccgatggcaaagtaggcaaacatcaggtatgcccagatctggctgctgccattgtcccagacttcgtcccgcatcgagatccccattgccagcgcaaccagcagccagaccagatacaggccgccataggtccgtccggtcgcccggaattcatacttcaacagatttttcagcatttgaatacctcccggaaatatgcgtccacgctcattccctcattctcacggatctcatccacactgcggtgagcaaagaccgttccctctttcaggaagatggcctcatccagcaccggctcgatatcctcgatcaggtgggtcgagatgaggacggtcgcgtccttgctgtaattggacaggatggtgtgcaggatataatcccgtgccgccgggtccacgccgccgatgggttcatccagcagatagagccgggcattccggctcatggcaaggatgagctgcaccttttcccggttgcccttggaaagggtcttgaggacgtctttgggggaaagttccagatttgccagcatctcattcgcccgggccggatcgaagtccttatagaagtccccaaacatcttcaccagctgctctacccgcatccagccgggaagccagtcggcatcgggcaggtaggatacgatcgccttgctctccacgccgggcttcatcccggcgatccggatgctgccgctgtcaggctgcagcagaccgtttgccagtttgatcagggtggtcttgccgctgccgttcggccccagcaggccaacgatcttcccaaagccgatgtgcagatccacaccgtccagcgcggtttttgcgccgtagtgttttgtcagcccttcacaggtcagaagttcactcatgattcggttctcctttcgtctgacgggccagcaattcggcgacctgcgccgggctgtacccgatgccccgcatcttttccagaaattcttccgcgaacttttccgcggtcgcggcacgcaattgttcgatcaacatggtatcctccgtcacatagcggcccgccgtccgttcggtccggacaagcccctccgtttccagctgtgccagcgcacgctgcatggtattcgggttcacccctgcggctgcggccatatcccgcaccgagtcaagatgtcctccgggcgggtatgtccccgcaaggatcttcgccttcaaccgctctaccagctgcgcatagatcggacggctggaatcaaattgttcactcatcgtagccctccctgcattttgtgtttctgtgttaagtgcctaatacaataatactcatttttcagattgtgtcaaggggttcatacaattttttagccaattctgtcacagctccccgggcattgccttgcaaacgagggcaggcgttatccgagaggtttgcatttttgcgataatatgatatactctctctgtaattgacgaaaacaggagtaacttttatgataaaagcgaccatcattatcccaaacatcaacggcaagggctggctgaaggattccatcgagtccatctacgcccagactgagcaggattttgacctgatcgtggtggacaacggttccaccgatgaaagtctggaacaagcccgcagctactgtacccgccccaactttaccctgatcgaaaacgggcgcaacaccggcttttcctacgcagtgaatcagggcattgcccgggcgcagagcaagtatgtggtgctgttcaacaacgacgcctttgccgagccgcagtggctggccgagcttttgcgcaccgccgatgcggaccccaagatctttgcggtgcagagtttgatgatccggcactttgagcgggaactggccgatgatgccggggactatgtaacatggatgggctttgcctgcaagaccggcgatggccgccgcgccagccgctacaccaagcaaaagcgcatcttctcggcctgcggcggcgcagcgctgtaccgcaaaagcattctggacgagatcggcggttttgacgagaatttttttgcctactttgaggacgtagacctgagctggcgcgccaacaatgccggttacaaaaacgtgctctgccccactgccaagtgctaccacatctgcggtgccagcaccggcgcagtgcgctacaacgcctttaaaagccagcagagcggccgcaacagcattctgctgccgctcaaaaacgagccgctgctgatgctggtgctcaactttatcccgctggcgctgggctatctgctcaagtgctacaagttccacaagcagggctttggcgaggcttgggataagggaatgcacgaggcctttgctctgctcaaagcgggcaagctgggcaagcgccccttccgcctgaaagacctgcccaactacatcctgatggaactgtggatgatctggaacatggtgccatacctgtggtatcggctggtggtggtcaggtttgatttaaaataaaacgtacaaaaaacacccgactgtgaaagcaaacgcacagtcgggtgttttcatttacattttacgctgcggtactggcggcatcctcagcggcaggggcttctgccacggcgctgtcagcgctcgtttctgcctgcgcttccggctgcacagccgaggcagcagccgaatctgccgcagcggagtctccggcagtggccagaatggcgtcctgcacatcgctttccgccatgggctccgactgcgcggccgcagagcttgcggcgctttcgggtttcgtctcgctctcggtcaggccggtcagataccagctgccgctctggcgctcgaacaggtagtccatatatttggtgggggtgtccgaggagggattgatgatgctgtcatccgcgctggcggtggggatatagcccacggtaacatgcagcttgccgctgcgcttgaacagcttgaccacagtggcgcggtagtagcccaccgtgccggtgatggggatcttgtagcactgggtggtctcgtcaaactcgacggtcatatcctccatgtcaaagctgcggtgggtcagcttgaagccggggcccagcagctttgccagataggcatccacttccaccgagggcagcagcagctgctcggtctcggggtcggtattgtaattctcaaagccgccctgcgtctcctgaatactgtacacgcagccccacacagctgcctcccgcagggtcaggtcatcgatgttctcaatgccgtcaaagggcatggggtcaaacaataccaagccttccagcttgtcctcgtattcctgcttttgtgcggtatcgtcaaacaggtttgccacaaggcccacaccggcccgcagcaccgtgataaacccgatgagcaccagcaccgtgatcagcagacccaaggtctgccgccagcggcggcgcttgatccgggcgtgttcttccggggtgatcgtatttttcattggtctgagtctcccaaagttttttgtctacccaacagtataccacatccggccgcagagtgcaaaacctgtaccggtggtttttttgtgaaagcaggttttttattcccagtccttccatatttcgggctggtagcccacagtggccttgcgtccgttgcgcacgatgggggtcttgaacagctgctgattttcaaacagcttatcctctttctgccagtccaccagtgcatccagcagcgcaagggtctgcttgtcctttgctgccggatttaccagcgcttcccagccgcccaaagcgcgcgccacgttatcaaactcgccccggctcatgcccttttccttcaggtcgatcatctggaacttaatgccgcgctccttgaaatagcgctgcgcctttttggtatcaaagcacttgctcgtgccaaagatctggatattcatcttatctcctcctgccggttcccggcggtcttattgtaccacaccgtaaaccgcttgcataggcataatttgcggcaaaacgggcaatgctttccgcaaggaggtgtttgcatgaatgcattcgtagaccctgaactgtgcatcggctgtacccagtgcgccgggctgtgccccgcagtgttccgcatggagggagttctggctgtggcagagcccggccccatcccgccggaggaggtgccgcaggccgtcaccgcagcccagagctgccctgtaagtgccatccgcatcgaggagtaagcccggcatcggtaaggctgctgcacagagcttgtgcggcagcttttttgcagtgggacgatttgaaatgccctccgctttgctctgggcataggcagcggaagaacattataaatgatacgattgtcacggcttacgagccgtgacaatcgcatttttacgagagacggcatcacgaaaagcagccacttctcttttttgcgcaaaaagctcccgcgcggtgcggttttgtgctatactataagatgtgaaattacgcaacggaggaactgcattatgcgtttactggtcattgacggcaacagcattgccaaccgcgctttttacggcatcaagctgctgaccaccaaggacggacgttacaccaacgccatctatggctttttgaacattctgctctccctgctcaaggagtgccagccggatgaggtggccgtggcttttgacctgaaagcccccaccttccggcataaaatgtacgatggctacaaggccacccgccacgccatgcctgaggagctggcgcagcagatgccggtgctcaagcagctgctggcagaccttggctaccgcaccgttaccgccgagggctgggaagcggacgatattctgggcacactggctgctgcctgcgccgcccggaaggacgactgcttccttgccaccggagaccgggacagtctgcagctggtgagcgagagcaccaccgtgttgcttgctgccaccgtaatggggcgcagcaagaccgtggtgatggacgaggatgccattcaggaaaaatacggccttgcgcctaagcagcttatcgaggtgaagagcctgatgggcgatacctcggataacatccccggcgtgaagggcatcggcgaaaagaccgcgctttctctggtgcaggccttcggctcgctggagggcgtgtaccagaacattgacgacaagcgcatcaagcccaagcagcgggagcacttgttggaagataagcccatggctgagctgagccacacgctgggcaccatccgcaccgatgcccccatcgacaccgccgagggttcttacaccgtgggcgagggcaacaagcctgccgccgtgcggcttttgcaggaattggagatccactccctgatcccccggttcgggctggacggcgtagcgccggaagccgccgctgaggaagagactgtggagctgccagaagcagagctcactcccctgcccctgacccccgccgggcattatctggtggctgcccgccccgccgttaccggcaagcagggcacccgcaacgtggtattgcagccggaaagctggtacgccgtgcaggacaccaccgtctatccgctggaggatgctgagctgctgcggctgctggacaacgccgatgtgacgctggatgtgttcaattccgcgcccctgtacgccaaggccatggccgccggcggctggggcagcagcatcgtctgggacggcaaactggccgcctatctgctggacgcctctgcctccaaatatcagatcagcgagctgattcccgcctacaaggccgctgccgcctttacctgcaccgattacccggacgccgggcggctggccgacctgtttgcccggatgaaggccgagatcaccgcctgcggcgaggatgcactgtacaacgagatcgagttcccgctggcacaggtgctggccgatatgacccgcaccggcgtgctagtggataaggacggcatcgagcagttcggcgtaaagctgcgggaggaactggaacaggtgctgacccgcatccacatggagaccggcagcgccaccttcaaccccaacagtcccaagcaactgggcgagatgctgttcgacaccatgggtctgccccacggtaaaaagacccagcgcggctggtctaccgatgccgaaacgctggaaagtctgcgcgagtacccgctggtggaggacgttttgcagtaccgcgcctaccagaaactgaactccacctatgtggagggtctgctcaaggtcattggtgaggacgggcgcatccactccaccttcaaccagaccgaagcccgcaccggacggctctcctccgataatcccaacctgcagaatatccccatccgcaccgagctgggcagccagctgcgcgcctactttgttgcaaagccgggctgtgtgctggtggacgcggattacagccagatcgagctgcgcattctggcgcacatcaccggggacgagcacatgcagcaggcctttttgaacggcgaggatatccaccgcagcaccgccgccaagatctacggcattccgcagagcgaggtgacgccccggctgcgctcctctgccaaggccatcaactttggcatcatgtacggcaagggcgcgtacagcctttccaaggatatcggcgtgaccgtgaaggaggcagacgccttccttaaaaactatctggcggcttttcccagcgtgagcggctatatggacaagaccatcgcggacgccaaggcaaacggctatgtgtccaccctgttcggccgccgccgcaccctgcccgagctggccagcaccaacttcaacgtgcgcgccagcggcgagcgcatggcccgcaacacccccattcagggcaccgctgcggacgtgatcaagctggccatggtgcgggtgtggaagcgcctgcgggacgaaaaaatggccagccgcctgattctgaccgtccacgacgaactgatcgtagaggccccggaggcggaggccgagcaggctgcccgcatcctgcgggaggaaatggaaggctgcgtgcagtacgcggtgcccctgagcaccgatgtgcacgcaggcaaaaactggctggaggcacactaaaatgatcattctcggaatcgagtctacctgtgacgaaactgccgctgcactggtggaggacggacggcacctgctgagcaacgtcatctccaccagcgtcaaggagcaggcgctgtacggcggcgttgtgccggagatcgccagccgccgccactgcgagtttatcagtgctacggtcaaaaaagccctgctggacgcaggcaagaccatagacgatgtggacgctgtggctgtcacctttgcgccggggctcatcggtgcggtgctggtgggcgtaaactttgccaagggtctggcctactcggcgggcaagccgctggtgccggtgcaccatctgcggggacacatcgctgcgctctacctgacccacccggagctcaagccgccctttttgtgtctggtggcctccggcgggcacagtcacatcgtggaggtgcaggactacacccactaccacattctgggtcataccgtagacgatgctgcgggcgaagcctttgacaaggtggcccgcacactgggtctgccttaccccggcggccccagcgtagccgccgccgcaaagaccggcgaccccaaggcctaccgcctgccagtgccccatgtggagggcaagtacaacgtgagcttttccggcttaaagaccgccgtgctcaacgaggtgaacaaggcgcagatgaagggcgaggaagtgaacgtgcccgaccttgctgccagctttcaggagcgcattgcaggcattctggccgaaaagctgctgcttgccgctgccgatactggggcaaagcaggtgtgccttgccggcggcgtagccgccaacggacgtctgcgccaactggtaaatgacggtgcccagaagctgggtgccaaggtctacctgccggaactgaagttctgcggcgacaacggcgcgatgatcgccgcgcagggctactaccagtacattgccgggcataccgccgggctggaactgaacggcctgcccaccctgcccatcgactacgaataaacacaacaccggaggtgttcccatgactgagcataaccctatcctgcaaagcctgttcgaccgcaagtcggtgcgggtgtatgaagaaaagcccatccctgccgagatgaagcaggccattttggaagctgccgcacaggcgccctccgcgggctgtcagcagctgtataccattttagacatcaccgacccggcgctgaaggaagcgctggccgaaagctgcgaccaccagccctttattgccaaagctccgctggtgctggtgttctgcgccgactgcaaaaagtggtacgacgcctacttagaggccggctgcacgccccgcaccccgggtgtgggcgatttgatgctggcagtcaccgataccgccattgccgcccagaacgccgtagtcgccgccgaaagctttggcatcggctcgtgctacatcggggatatcatggagaactgcgacacccagcgcagtctgctgcacctgccggactatgtgttcccggcggtgatgctggtgttcggctggcccacccagcaacagaaggaccgcgtaaaaccccagcgctgcgccatggagcatatcgtgcacgaaaacggctaccgcaccatggacggcgcagagctgcgggatacctttggctacaaggctggcaacgccccctttgaccagtggtgcaccgccttttgcaaccgcaagtataactccgatttctccaaagagatgacccgctcggtggaggagtacctgaaccagttccgctaaatccggcgagcattctgcaccccattttcaccgggttgaatccgcgcagttttattacagcgcaactgtttccgcaggaaacgagcgctgtaactgccgtttcccatcacgattcctatcatgaaaaagtggtttagaaacgtccgcagacgtttctgaaccacaagttgtaataatcattcctctgactatgcccagagcaacgcggagggcattccaatcgtttcacccaaaaaagcggcagctgcacggtgttttgtgcagctgccgcttttctcgtttatctttggttttccgcaaacagtgcgcccaactccggcaggatatcatgcggcagcatcccgtactcaccgcgctttgcggcggcgcggtcggcggcggcaccgtgcagatataccgcacaggcagcagcttggtaggcgggcagaccacaggccagcagcgccgcaagcatcccagccagtacatccccgctgccgccccgggcaagtcccggattgccggtggggttcacgcacacccgcccatccgggcttgccaccacggtgcgtgcacccttcagcaccaccacggcattccacgccttggcataccgcagggcgataccctcccggtcggcggcaagctctgctgccgaaaggccggtcaggcgcgccatttcgccgtggtgcggggtaactaccagttctcccgccgggtgcggaaagggcttgccctcggccagcagctgggcggcggcgttcaaaccgtctgcgtccagcaccgcagcccccgcaaagccgggcagcagctgccgcaccagcgtgcaggtctcggtggcccgggcggcgctttgcgctgtgccgccaagaccggggcccagcagcaatacggtagccttctgccgccggagcagcggcacattttccggcgcaatgccgccctgtgcgccctccttacaggggcacaggcagcactccggcaggcgggtgacggcggcgctaaccaccggctccacactggcaagggtgacgatgcccgccccggtgcgcagtgcaccctcggctgccagcagagcagcgcctcggtaaaaggcgctgcccgccaccgccagcacactgccaaaggtgcccttatggctgtcccgggcacggcgcgggatgctttgccagacaaattcttcggtaatttccacagccatgggtacacctccaatggaatgatttgaatgccctccgcttatcgggttgcggcacccagcatccgcatcgtgccttggacggcacttgcgtcttgctggccgctgccccaacaactcctccctgtttccgccactggcggcggtcgtagtcgttgctgggcatttctagcggaatcattattttaagattgtcgatttggaaaatctgcggattttccaaaccgactttttcacaagagaggaaatttggagggatagcatttacgcctgcccctgcacaagggcacggatctgcttttccacgttctgcacttcctcgtggaacatccgggcagacacgcgcagtgcaccatggccaaggatgatgacctgctccataccgtccgaagtcgccacacggacgcggcggctcttgccgatctcatgggtgacccgctcgatgaacatatcggcggtctcggcctccttggtgtagaccacatggatgttgtggtactgctcgatggcgccggggctgccgggcacgcggtaggcatcgaacaccagaatgagcacgcatttctggtagccctgatagttgcacaggatatccatcagcttgcggcgggcggcgtccaagctttccttcgccagcgcgttcaactcgtcccacgcaaagatgatgttgtagccgtccaccagcagatactccggggcaatttcccactgctctgcggcaaaatccgggcgttcggtcttttgcaccggacggaacgccgccagcgggtcccgcttgatggggccgtaggttcgctcaaaaattttgagcagctcggcgtcctcctccagcgtggcgcggtaggccatggcgcggcgctggggcgcagcctgcgtctccgggcgggcgggctttgccttgccccagccgctttccacgtgcatatggctgcgcacctcgctccacggcaccacaaagccagcaccatgggcgcagaatacggaatctgcggggttgtccagatcatgctccggctggtagccgctctctgcaatgacctcctgtgcattgtgacaggggcggtagccgtccatcgtcaggctcagatgtcccctgccccgggtgtagctgaccacctccatggggtagctgcgcatggtggataccggcgcaaagccggtcagagttgcggtctccgcgctgctttccggcggatcaaaactgccctccatgcgctggatatcgctcatggcgcggccgatgttctccaccggcacctccagccggaaggcataccacggctctagcagctggcttttggccagcatcagtccctgccgcacggcgcggtaggtagcctgccggaaatcaccgccctcggtgtgcttgaggtgcgctttgccggcaagcagggtgatctttacatcggtcagcggtgcgccggtcagaacgccaaggtgctgcttttcttccagatgggtcagcaccagacgctgccagtttttgtccagaacctcttcccggcagtcggcggcaaactgcatcccgctgccccggggcagcggttccagcagcagatgcacctcggcatagtggcgcagcggctcgtagtggcctacgccctccatgggctcggtgatggtctccttatacaaaataccgcccgggccaaaggatacctccagcccgaaccgctccgccaacaggctgcgcagcacttccagctgtacctcacccatcagctgcacatgaatttcgcccagcgtctcgttccacaccacatggagctgcggttcttcctcctccagccggtgcagctttgccagtgcagcgtgtacgtctgcgccctccggcagcagcacctgatagctgagcaccggttccagcaccggcacatcgctgtcccgctctgccccaagcccggtgccgggctttgcatgggtcaggccggtcacggcgcacacctgtcccgggccgatggcctcggtcagggtatactttgcgccggagtacagccgcagctgattcgctttttctgcccacggctcgccgtccgcttcgccggagagcagagcctttaccttcagctccccgccggtgacccgcagccatgtcaggcggatgccctgctcgtcctgcgataccttgaacacccttgcaccaaaggcgtgcaacgccggggcggggcgggtgtagcggtccagcccgtccagaagtgcatccaccccgtcgagccgcagcgccgccccgaaccagcacggaaagacgtgccgccgggcaactgcggggataatgtctgcatcggtcagggttcccgcgtccagcattttttccatcagctgctcatcgcacagcgccagtgcttcgttgcgagcggcaggctctgcgccaaaatccacaaaaccctcgccaaggcggtgattcagctggctgagtaactgttcccgggtcatgccgggcaggtccatcttattcacgaacccaaaggtcggcacatggtagcgccgcagcag

SEQ ID NO: 632 - DNA, 28051 bp, unidentified
  source 1..28051: mol_type = unassigned DNA
tcaaaaacaacgtggacgagatcacctcaggcgaggttaaattcataaatccgtttatgtcatttgagagtgaagaaactatctcacagcagctcgtagccaccttctcaaaaggcgatttcaatctgcctgagtcacagattcgtgatgcggtagccgcaggctggaaggagcttgccatgacaagacttgagatacagcgaaagggcgaggaagtgctcgactacatggaagacaccggacgtcgcggaatcgtgctcgcaggccgtccgtaccatgtggacccggaaatcaaccacggtatccctgagctcatcacaagctatggcatctgtgtgctgacagaggattccgtatcccatctgggcgagcttgagagacctctcatcgtcatggatcagtggatgtaccacaccagactgtactcagcagccaactttgtaaagacccgtgatgaccttgacctgatccagctcaactcgtttggctgtggtctcgatgctgtcacaaccgactgcgtaaacgatatactgacaggctccggcaagatatacacctgcctgaagatcgacgaggtaaacaacctgggcgcagcaagaatccgtatccgctcgctccttgccgctataagggtcaaggaaaccaagcatgaaaagcgtgacttaaaaccgtctaactacgagcgtgttgtattcaccgagcagatgaaaaaggacaactacaccattatctgccctcagatgtcacctatacactttgaccttctcgtgccagcctttaaggcagccggctacaatatggtcataccggatatccctgcaatggaatgtgtggacgtgggacttaagttcgtaaacaacgacgcctgctacccttcactcattgtcgtaggacagattatggcagccgtcaaatcaggcaactatgatatgacacacacagccatcctcatctcacagacaggtggcggatgccgtgcaacaaactacatcggctttatccgaagagccctcgaaaaggccggatatcctgatgtgcctgttatctcaatcaacatggtaggtctcgagaagaacccgggctttaagtttactccaagccttatccagcacggactgtatgcgcttgagtttggtgatatctttatgcgctgtctctacagggtacgtccttatgagaaagagccgggaagtgccaatgcactccatgagaagtggaaaaagagagtcatcgactttgtcggcaacacaaagatgctctctcacaagaaatacaaaaagatgtgccgcgaaatcataagggatttcgacaatctgcctatgacagatgaggttaagccgcgtgtcggcgtggtcggtgagattctcgtcaaattcctgcctgcagcaaacaactatgtggttgacctgctcgaagctgaaggagccgaggctgtagtgcctgatctgactgatttcttactctactgctgctacaacacgaatttcaaggctgactatctcggtgcttctaagaaagctaagtttatgaacaaccgacttatcgccttcttcgagtggctcagaaaggatgctagggatgagctggctaagagcaagcattttgagccaaccgctcacgtgcaggatctcgcaaagtatgcttctcctatcgtttcgtgcggtaatcagaccggtgagggctggttcctgacaggtgagatgcttgagctcatcaatgagggcgtcacaaacatcatctgtgcacagccttttgcatgcttaccgaaccatattgtgggtaagggagttataaagaaaatcagacatgatcatccggatgccaatatcgtggctatcgattatgatccgggtgcttctgaggtgaaccagctgaaccgtattaagctgatgctttctacggcacagaagaagcttaagaaataaaaaattcgcccatgcattcatgcatgggcgttatttgtcttcgtatacaattctacagactctaagcaatttttaattaagcttggatttaatttcttccatccttgtatcatccagcttataaaacctcttaaatacaaatatgcccacaatgagcaggataacagacggaatcgtcatccacatacgaagagcatcaagtgtatcctgtgtctgtaccgcagccgcggtatccagatgtatccagtcaaccaccagcccagccagaaataccgctacaccggatgcgagctttaccgtaaatgtctgcattgagaaaatgaccgactcctctcttgtgccattcatcacctcaccataatcaacagaatccgaaagaaatatagtcatgataacattgagcataccatagcccagataaatcaaaatacccggcaggcagagtatgtaccagctctgcagcgtgtagagctttgcaaatgccatgataagtatcaccgcaaagcctgctatctgaataataaatcctgatataaaaagctgacttttgctgaatctcttgcgaagcagcggtataaccatcatgacaagcacctgtgctgcaaaagcaactgcagcaaatatagaatatgcgccctcgtttcccacatcaaaccggaagaaataaagcaccaggttaccacagatattgagtgatgtatatacgagaatgatcgataccacaacagtcatagcctggtcgttcttaaataaagctttaaacatgtcggatatctttcccggcttctcatcacaggcaaccggtctttcaggcacacatgccacgcatacaagctcagaaatcacaaatactaccgctataataagtgcccaccacttaaatccaatcctgtagtcagccatagagcttcctgcaccaagaataggcacaactgtcatcgtgagcaccgtagggatagcatctccaatgccagagcatgtcctcgcaagcgatgtaagctgctccctgtcgctgcccggctcagtgattgcgggaatcatagaccagaacggaatatccataagcgtatatgtgatgccccatgcaaagtaaaacactgtaagccacactctctgcgctgaatcacccatagactcaggagtggcatataaagcatatatggtcacggcattgagcaccgtgccggcaaaaatccaaggcctgaacctgccccacccggtacgcgtctttgctacgataatgcccatcaccgggtcattgaacgcatcaaaaatcctcgccgccatcatcaccgtgccgataaacacactgctcatcccaagcactacattgtaatagtagagcaaatacgatgaaataagcatatacacaatatcttttccgaatgcgccaaatccgaatgcgcacttttgtcctgttttaagcttcatagaaatacctccaaaataatcagctatcccagcctctggtataaagtaaaaataatttacagcttctcaccaaccaccctgcaccgcttcctgcaaaaagcaatgccataggctaaaatatcacaccgcccctcatcccgcagagcctcatcatagcgcttattcttaatctgtgccatagcagtctcgcatgctgcgtcaagctcattcatctccttagcatacttcacctctataacaatcccagcatccggatcctccggctcaatcaaaatatcactaaagccatctcccgactcacgattggacttaatcagccagtccggattgctgcctcgcagcagaccgagaagtaagccgtgatagaaattctccttcatagcatcaggcgccttggtatcgagtatgctaatcatgcggctcataacgatattgagctgcctggtaatctgtttctcatctttatccagaattgcctttgataaaagcttcatagtatcatcatcatttgcaacaacagccttgaaccactcctgaatctgaagaataaacacctcacgcacctctttattaggaatcacaagcttataggcatagctctcactgtcaggcaccttgacctctccgattttggtgagatagcctgtggtaaaaagcacactccacagattgtcaatagtattgtcaatctcatcatatgtcagatcaaggcgaagctgcttctctacaaatccgcctgccacgagcttttcaatctcatccctcgtggtctggtcagccttgtccacaaagcgcttcaccatatcgttgccactactgttaatccagaacgcactcggtctggctgacggatctgaaacaagcttcttggcaaaattaatcacatcccacggacaataaatatccgcattaccaaaatgatagccatcataccattcctttgcatccgggtacctctcgctcctgtcatagtctaaaagcagcttcataacttcatcatcagtgaagccaaactgctcatcatggtcgatatccacaatagaattgatttcaaaattattgagtcctgtaaaaatgctctcctttgacacacgaagacagcctgtgagcacagcaaactgtaaaaactcattggtcttgagcgcctgcccgaaaagccctctgatgatggaaaccatctccttgtagtagccattctgaaaagccttgtcgagtggaacatcatactcatctatgagaataaccactttctgaccatagtgcttatacaacagctttgaaagcattcgtatactatcctcaatattgtcatcctgcccatgaagcatctttgtaaacagtgttctatcctcatcagtcaatacatcacttgttttcaagtaatagtgtctatctatctcacggtctataatagtacatagcattctttttgctgacgcaaactctaatccctccacgcccttgagtgaaagaaaaataaccgggtacttacccatatggtcatcacaaagctctttattgtctgaaatatataagccatcaaacaaagtcttatctgtgcctatctcaaagaagctttttagcatgctcatattgagagtcttaccgaaacggcgagggcgggtaaaaattataacctcaccccaactctgtaagaacttctctataagccttgtcttatcaatataatagaaacccagttttctaatttcctcaaaattttcaattccaaccggtaacttcaaagtacttgccataaaagcctccaaaaaataatccgctatacttaatactagtatagcggattgccatgtaaaatacaatttaaagttaatgtgcttacaaatataatttactgtacattgcgacacattgcgccatctgcactgacattcttatctcattcttatctcacaaaaataggccactttatatacttaaaatacttatacttaccatattgttgtacatattcatcccatgtaaaatatacaatttgagtacatttatctgtgctttcatatatagtaacaccattttcgtcatgcccgagcagtatttgagaatgtttacagtgccccattctgtcatttcccttaatttcatcacatattctaataacagctcccaactccgctgttcctaaatacttcttacaatgttcatgtgtaatggttctgtcagacaaggaagtataaattcgcatcatatcatcttttgtcccggttctgtttgtaaaactttcccaccatatatgccagtatacattccttgtaaagctccaacaattacttctaccataactaggccaatcattatgaccattacaaggaccataaaatatattattttcaatataaggtaatatttttccacgtataatgtaaaacaccttttctacttctgtttcgtcaaatggctcttttctactttctgtaatttgacaatctcttatcatatttctccacacaagagctctatttaaatcaattccggcaatttggactgcatgtggatacaaaaccattcgttttggtgtaactcttagcatctgcctttgccttctggatggatgcaatctcggtggttaagttcaccacctgttctttcttttctgcgatttgggatgcgtagtcgtttgtggtattgattttgggacggtttttgctgcctttcttgctgtggttttgtttagtccatctactatttgctttcctctttggctaagaatactgtctgctgcccttttcaaagaagtatatctttttagaactacttgtgtatttttctgttttctttgaaataatgacaagattcccataatacacccctactcttttgggtagtatgattcattttcgactatcttttctcacatcttcgccgaccataagatcgttgcctactgctcaccacggagaggtgtgtgatattattacgagcagcgtagggagctaacgttctcagtatatcacaagtcagcaaataaatcagccttatacacaccgttctccagcatcttcttaaagctgtcctttactgctgcgacatcttcatgataggtcatgccgtaccaggtgtcgttggtcttcagaaccttcacggacatctttccctgctccagcagttcaccgatgaagatcgggatcagatactcggctttctgaggattgctcggtacttctttctcgaaaaactccttgaaaccattttccagcacatccagaaaatcaggagtcaagccccacatattcatggataccagagaattcacatcaacaattacaccgtctgcctctgctccatctgcagttttcacgatgttcttggtctccacaacctctgtcaagtttccattctcatccatcttgcagatgccgcgagtcacaccgccgttctcggacaaagtgttcttcaaaacgaaaccagccatgcaggacttgccaccattcaccagatactcgtgtacagccttgaagccttctttgccatagtaatcatctgcattaatcacaatgaacggagtctttattacgctctttgctgcaagcacagcctgtccagttccccacggctttgtacgacctgccggaagttctcccggaatatcgttgataccctggaaagcatagtccacagttacattgtgagcggagcaaatggagtcaatacgatcaccgatgacctctttgaactccttctcgatatccttgcggataataaaaaccacatggttgaaaccagcttcaatcgcatcgtggattgagtagtccatgataatatggtttgcatcatcgaccggctccaactgttttattcctgttccaaatcggctgccgattccggccgccatgataagtaatgttgttttcatatttctccttttataaactaattgattacaatcaacaagtcaagactttccttttttccgcatcttcaatttttgtatagtactaaccacaaatgcatcatttgtcacatacatatatatacatgtaataccacaatataaaaaagctcctattgtaatttgaacaaatagtgtttttaatcctgtatcaaacattcttccatatccgtaaacaactacaaacataccgaatccaaatattaaaaatggaatcatattcactatatatttttttaatggtagttcttttcttacaacccacgcttgaatcacacacacaacacactccgctactattgtaccaattgttgctccaattgcaccatatcgtggaatcaagcaaccgtttataataagattaacaattgcacctccaataacagatgataaatattccttatctctctcagttggtattaaatattgcgttcttattacatttgcaaatgacataaatggaattgtcgtagaaagtcccattattaaaagacctgacaaatagaactcttttccccaaaatactggagcaaaaacttttcctattccagccaaaccaaaggctagtgcaaaagctaaacacatcacgtatttcatcgatagtccaatgtatctgtttgcttctgctctattattcgacgataccaaattcgacattttaggaagcatcactgttccgaaagacattattatcgctaacggaatgtttatcattttctctgcattttcataatatcctaactgcgccttactactcaaagtacctatcattattttatccatgtacttatataggctaactgcaattgctggtataaataaaatcagcagaggctttatatgaattaccattttagccatctctggtttaaccaatttcacatattttttcagcggaatccaaagagttatttggctaatgagcatcccaaaagccataataatacaatacttccaaagatctgaaggttgttttacaaaagtaaagacgcaaatgacattcaatatttttataattgtatttctagtaacagttagtttaaacttttctattccaaagtaaaaccaacttatatcaaatataccactcaacacataggcagtttgtataatagcatatacccgctctttggccacaaaaaacgcatatatacagtaaattataaagcatccaaatgaaaagagcatatgtattgctaaaacattagaaaacacttcatttagtttatcctgactttctctattttgtgcaattatgcgattgccataattagaaagtcccaacatcgaaaacaacacaaaataataagcaatagaatatgaatatgaatatgttccaagtccttccgctcctatcactctagcaatatatggagatgtaacgaatggtaagataatgatcaaaatttgatagatcatctggtacataaaattctttttaatacttgttttttgcatactacttatcctttccttccccaaataattcgttttcctaatattataacacctttgtcttgatacggaagattactaattttatccgctttcattcccaaaacaaacattggatacaaaagttctgtactaaccaatgactccgtcaatcccatcaccaaaaaagaacatagggtaaacaatataactttacaataaatgcttgaaatattttcattaagtgtcctacttgcttttactattccagcaagccaaacaacaatgagcaatgctccacccgtcattgaaatgtacaacagataattgtgtggatgcgtagcgacagtaaaattaaatagtgatgcataatcactgtctcctaaatatccatatccaaacagtaatttttctcctattagttgaattgcagtattccaaattccagttctatgtgtaaaattcaaatcttttcccaaaactccaacaattaaaaacgagaatatatcctgaatctggaatgccataattcctaaaaacaatccaccagttatcattgtcatagttaaaagattaaatatcctaggaagttttttatattttctgtgaaacattattaagagaaaaacaaaaacggctattccaaccaatccggtcgacgagccatttaataccatcgtcattgctgacgctaccacaagtagcgctgctgacagcgttatctttcctctacatctgtacgcccgtatcagtgccatacaaacaataggaagtattgttctaatttgtggatttttaaatcccaagaaccaactttgatcaaataaaccactgttatacattccattcggatatgcaagtattgtaaccaagtttatatatatatatatttctagtaccgcaaatgcatttaataatgtatctggatttttatccaaccataatacaaaaatcaaacacattgtcaagctactgcaaattgagcctatacagttttgtatcgaaccagaatttataattgtactaaacaatataactccataaaaagtgctaatccatactaaccctctcggttttttttgagtaagcattatcatcatgcaaaccactataaataccaaaaatttaccaacccaataaattctatgaattgactcgattgtcaaaaagtatgctggttctatcaatataagtaaaaatatgcttaagagcaacctactcctataaatataaaactttttttcattcacaacttcattctccttcactctataaaacaaatatttcaagatatttacgttcaagaaagagtttctctaatagcttcatatatctgttttacattgttttcttctgtaaaagaagtttgtgaaaacagataaccattcaacgcaacttttcgactgaatttgacatcctgatagaccttatataaaatctgtgataaactatctacatttccttgctcgtagagtaatccattttctttatctcgaataatctcaatcgttccaccagtattgcttcctataaccaataatccattgcgcattccctctactgtaactcgaccaaatgtttcacgtattgcgcacatcaactctatgtccatattttttcttacagctttcatatcattaacttcaccgagaaaaatcacatcttcatttagtcccttttccgccacatactgcttaatttcattctcatactttctatctgtttctggtgcacttcctgccagatataatttagcttcacttactcccatttttttgagttttactaaagccttaacagcgtctatttgccctttgtcgggaacaatccgtccagtaagaatcatattgaatcgtttatccggaaacaattgatgcgtttctattcccaaatctccgctaattccattgtgaatcataattaacttctcagacggcgtttttgatgccatcgtgttgtaaagagccttcgagataagaacaactttatcactacaattataaatagtttttggagtccacggtccttgaaaacactcatcagagccaaattcccgaatatgtgtaatatgaggtattgctaattttttggcaatgctcgctcctacaacaggaaaacgagtatttgtatagacaaagtcatatttttcattttttagcttgcttgccatcttttttccaagaatccactctcgccaaaatctgaaataaacatttatcttccttaataggtcaaatttatctcccttacttacgctaaaaggattcttataatcacttataatgcacttaaatttgtttctttttagttcttcttccatggttccttttcccggaagaataacatcgcattctataccgtatttttctcttaatccttttatcaccataagcaaggatcggttggctccacccacaaaatttttatcgtgagctatgattagtgctttcatgtcaaaatctctctttcgttattttatcaaactattataatactctaccaaatcattttttgttgcctcatgtgtataaccagcatcgataaattcttgtgctctgctatgtctttttagttttgtttcagaaattttcttcatttcaattgcccattgttctgcacttttccccaagtctaatcgatacatcaaatctgtaacttccgtttcaaccggcacattggttgatcctaagcacggaagccctgtgcactgagcttctaaaaagactattcctagaccttcaaacttagagggcaaaaagaataaatccattgcagcataccaattttccacatcagacttctttcctaacaaaatgcactcattctgcagtcccatagaatcaattgaaacttccagctccggcttcatctccccgtcaccaatccaaatgagtttagcattctcttgcaattttttaaactttgcaaaacactcaagaataaactctggatttttttgagcagatattcgtgcaacaacaccaaccacaaaattatcgttcatccgaagagcttccctattttcttttcttgaagcctcgttaaatctaaactttacaggatctatgacgttttttataaccttaaattctcgctctccaaatctcgaaactccagttgaatttgagcatgctacaaagtgcgtcgctttcggaaagcataagtgatcataaatatatgttgacacactcgttttaatcgttaaaatattcttaggattatgacaatggaaaattctgattttaacgttatttctttgagcggctataagtgtcattaatgcaacatgacccggaatatttacatgtacaatactgtaatctccttttcttataatagtttctatagttctttttattacaggattatacttattaacattcggtaatctataaatctttcctctgccactgatttgttgattccatgcattttctccttcttcgactagcataaaatcaacaatccatccgctttcaataagcgacatatagtaattcattatagcacatgcaatcccatcattatatcgcaaggatggaatcaaaaaaagaatcttcttattcataaattcacttccgttcttttaacgaattctatagactttctgtatcatttcatctacaaataatatttccaacagctaagagtagtcccgtcttttgatttattatcatccacagtagcactttttcatagcttgtataaaaactccattcgcttttccttaaatttttccttatgcatgttatttcttcatcgcttaatagctctctcaataagaaatatctctgttttatgtcgtatcccacttccttattgcacaagcactttttcatgcagtttattacacagctcatagcttctcttgcatagcacatccaaaatatactgtcatgcacatcaaaaatctgtttgtacttttttagtaaagcgagtcttacttcgataatatcctgacgtgcctgatgattagccgaatcagataatattctataatggttataatatttattaagaaatagcactgaatcaatgcatctcacatattcaacattaaagcatgcatcttccccaatcaacagctgtttatcaaaatagattttattcttttttactacttctgtaacgtacaattttccccatacgcctctaatcgcacccaagttcgtgccatacttgcgtatatcatattctggagttataaaatcgtactgcaatctctcaattattgcttttttatcatagataaattgttcttctggcattgaggttcttgggatattatcatcaaattctggttctttattataatagtgattccacgatataagtccataagatttttcttctgcgatatcaacaacagaacggtacgtatctttttcaatccaatcatcaccatctaaaaaagacagatattttcctgttgccaaattgataccttcatttcttgctgaacaaacgccttcattttttttgtgtagtactcgaatcctttcgtcttgttttgcatactcatcacaaactttaccacactgatcaggtgagccatcgtccaccaaaataatttcaattttttccagagtttgagaagtcaaactatctatgcattgtcttagatactgctccggtactttatacactggaacaataatacttactactggctccgtcattttatctccctcgcacccgatttaaatatttcttcattgttccatagattccagtcactagaagcatcttccgaatagctgtttttacttttaccttgttagtgacaggatagtatttttcaaacaactctttaccagacagattcgctgcatcagtcataaatactgtcctctttggattcattggaacagattcaaacatttcctttacacctgcaaccaacttatccgacgaaacttcttcgcactttgcgtactctttcacctcttgtataagatctgccccttttggggaatggcaaagaactctggtcgtacctttgtcatcatctaatttcttatcgaaatcatatacagaaaagcaatcccaaatcgtgaagtcgcttacacggtatctctttttgaaagggcacatataacaagaaggtcgatcgcaggtatccgagaagaatgctctcaacattggatcgagctgcgatcctgcatggtatacattctttccatcttggctaatactcattgtagagtatttatatccataaaatttatctcggaatcgaatgttatctggatttggaaaagacttttcttggtattccagatacttgttccacaccagcggtgatgggataccatgacacaccacatcaactaaaatcaacttttcatatggttttctcaaaaactttgataatccctcaatttggcacggtgttccactaaagcagacccatctatcttttttaagaaagtcttttaccaaacagaaagaatctcccaatttactttgcacatatttgctgttccggaatcgttttaattcattaaccgtttctacgtatgtatgctgtacatgaaaattctcatcgtaggctgcaccaaagaccactccacctttttgaagaacaaccgttgctatagctgtaaacgcaccgcctgctgaactatccaatctcaccttttcatcactatgctgaaccaaataagctttttgtggcttttcttcctcagtaacgggactttgaattggacaaaccatgtagcaggcattacactctacgcatctacttttatcgacagtcggataaaggaatccctcattatcttctttcataacaattgcatctttggggcaaattgcttcacaggcagtacagccacagcaatcttgttttttattgatttcaatcacaaatctgtactcccttcatcttttaatgcagccagaagatactcatacgacttctgccggattccttccaactttttatgaacactttcaaaatccgtctctatctttaagcaatcaactatattttcttctcccgtcagcaatctcccagtaattcccgccatgttgaacaacgtgtccaaacggctattcgttgactgtttcgtatttctgttataacgacggaatgtaaagaactgccgcttataaagaattgagaacacggaacaatggaaagagtctgtacacacatattccgcatttcgaattagattcaggaaatctgccggatcaatatcataaggcgtttcatcagcataaccttcatcgctctttacaaattcatccaaatgtgtcagtgctataatcttgcaacctgtagcttcttttaagcgttttgcaaattctctatgaggtggattgttgccaaggaaatagcacagaatgtattttccttctacaattggctctttcttttggatgctcatccattcatcgcctgtaaacagcaatgtcggatcacaaactacaggaacattgcggtcagcaatttctttcaccagtttttgacccgattcttctcttacgccaatgtgctttattttctttaaaaatttctctgcctttttttcagagcccttcggcaaacttgactggccaaaactcgttgcgtaggcaatcgaatttactgattccggcacaaaattgagtgtgtaatagtctgctgcaatatttcccggaagccataactgatcacttccaacaagtacacttgaatagttgtctttacatttagttcccaactctgctttcgagttgtatttgggagagagcctgaattgtttacggctaaatgcataaaatttttctgcgcgaacttttgacaattctgagtaccgattttttgaaaatttttttatcaatacattctttgccataccgagtttagacaacaaaatatctgatgttaaacttgccttagcaaaatacagcaattttgcctttttaatttctccgttaaaaccggaaatatctatggtttcattttcatatcccagtttatccaatgccatctgcgtggcatacgcctgaagcatacttccatagttatgctggaaatagcatgacacaattgctgttttcttcattcctctactctccaaactattcttgattactttactatctgttcaaacagtttcccatgttcttctgaaactctctgagcattaaacctgttatgtacatcttccatgccctgtgccaccaatctatctttcaatccatcttcctgatagactcgcaacaccgctttacttgctccaacatagtcatcaacttcaacaagcaagccattttctccatctcagactatattagggattgcatctactctgcttgctacaataggcttgcctaccatcatatactctggcaaagctaaaccaaagccttcccaacggctcagcaagcacgcaacatcaagcagctccacataactcatcgggttttcaacccagcctgtaatatgtagactgtctgagaaaccgttgtcttccgcatactttcttatctcgacctcttggtttccgtttcaaacaataatgaagtgtgcatttggaaccgcatctttcaccagttttgccatcttgataaaaacatctggtgccttctgtggactcattcggccaaccataccaacgacaaatgcatcttccggtatgttcagatcttttcgtttaaccgcactatgcacaccattctcgtatgcttcgatgtctacgccattaaaaatgacttgtaatttttaatctctgcaaatcttattatccagtgctgactgcttctcggcatccgaaatgcagataattttgtcacagaacggtgctgcaattttttctatcactgtgtatattgcttttttctttgccgagcatcgcatattaaatgcccaaccgtgtggattatatacactgtgattcttcagaccaatatctgcaacacgagcaatcgctccagctttgctggaatgagcatagacaatatcagggttatattttttatcagtgctctaacttctttaatcgcctttaagtcattaccaccaatggctctggtcatttcgacctgttcaaaagaatctaccagacctctgtaatcttcttcatggaaatcctgtgagcaaacccatatattctcgaacttttctttgtccaaatacttgagaagcattcggatgtagcgatctacaccacctgcggcctgcgccacatgtaaaatacgaacctttttcatcatgccaccgcctttgcgacgacataattctcattggttaaggcatacagcgttactttaagctgtacccccccccagtttatttgtagccatctcgtattttctactgtactgttcagccatcacttttgtgttatacatcttcagaatatcctgatatgcccgctccaccagttttccatcttcactctggcattctttaatagccttcacaaagtcttccactttcgtacacacaaagccattctcctcattgtgaataacatctcgatttccgattacattgcttaccacgcatactttcttcatatacatagattccagtaacgatatcggaaggccttcccatctactaggaagcagaaaaacatctgcattaaccgcatatctaatcgcagtgctccgatcagcccatcctgtaatttcaatattcttacttgtaagttgttctcgaagctcaccatcaccaatccagacaaatttcacatctggaagtgattcggctatctgattaaacagtgtgggatttttctgataacagattcttcccagtgtgtaaactgtaaatgggtgctctactttttctgttttatcaataatctcttggagttctgccatgttgatgccgttatttacatacgtggcacgtttggtaagtttcaaagattcttgatgctcacccacgctgcaactgatggtcgtacaatttcgctttgcacacactgattcaatcagcttaaacattctgcgcttcatcggtttataattttccattagaaagctgtagccatgtggggtatagaacatgggaatttttccattgaatgccacccgaccaatcacaccagctttactactatgtaaatggatcacatcaggcttgatttctgccactatcttttttacttcaaaaaatgcagcgatatctttggccggatcaatcgctcgtccaaaattcttgacctcaatcaaatgaattcgcttgtcgaagtaatccttataattttccggtgtctgctttctcactgcataagcaatatacatgtcatacgaattgacaagctcattggcgaggtcaactatataagtaaaaacgcctccacccatagcttcgactatgtacagtattttctttttctccgccataggttcctcctacttttaatctcgctggaaaatatctctggtgtaaaccttatccttcacatcatccagacacttgtcatagcggtttgcgatgatggcgtggctcatttccttgaacttatccagatcattaaccactactgatccgaagaatgtctctccatctttcagagtcggctcataaatcacaaccgttgcgccctttgccttgatgcgcttcatgaccccctggatagaactctgacggaagttatcgctgttgctcttcatggtcaggcggtacacaccgatggtcacagatttttcctgttccttatcgtactcgttatcctcgtcataaccataataaccagccagctttaggacgcggtcagcgatgaaatctttacgagttctgttactctcgacaatagcctcgatcaggttctccggcacatctgcatagttagccagcaactgcttagtatctttcggcaggcagtatccgccgtaaccaaatgacgggttattgtagtggctgccaatacgagggtcaaggcatacaccgtcgataatctgctgggtgttcaagcccttgctctctgcataggtgtccagttcgttaaagtaagccacgcgcagggccagatatgtattggcaaacaatttgactgcctctgcctcggtgaagcccatgaacagagtgtcgatgttctccttgatagcgccttcttgcagcagaccagcaaactcgtgcgctgcttctaccaaccgcttgtcactcagatcagtgccgacgatgatacgagaaggatacaggttgtcatagagagccttggattcgcgcaggaactccgggctgaagatgatgttcttactgttgaatttttcacgtacgcttgcagtgtagcccacaggaatcgtggacttgatgaccatgatggcgttcgggttatattccatgaccagcttgatcacagcctcgactgcagatgtgtcaaagtgctgggtgtggctatcgtagttggtaggggccgcaatgacaacaaaatcagcatcggcgtatgcggtcttagcgtccagcgttgcggtcaaattcagttctttctctgcgagatacttctcaatatagtcatcttgaattggagacttgcgattgttgatcatctcaaccttctccggaacaatatcaactgcggtcacctgatggtgctgagaaagcaatgtggcaattgacaaacctacatagcctgttccagcaactgcaattcttacatttttcattttaaaaattctctcctagttcttacgttttaacatgcctatctaatgcaactcttccctatactgctccctcattcttcatcactcttataatagtttgaaaaataattcttatatcattcttcacactccactccccaatatactgggtatccaatctcacaacttcttcaaagtccgtgatattgctcctgccactcacctgccacagcccggttaatcccggtctgaatgacattctggctctgtggtgtggttcatacttctcccactcatcaagtgttggtggtcgtgttcccaccaggctcatatctcctttgaggatattccaaaactgtggcagctcatctattgatgtcttcctgataaactgtcctatgccggttttctttgttccatccggcagtatcttattgcctatgattcttgggtcgaagtccatcttgaacatcattccgtcgctcaccttgttttgtgccatgagctccttctttcgctcctcagcatccatgtacatgcttctgaatttgtacatcttgaactttcttccgtttctgccgattcgctcctgtgcgaagaaaatcggtcccggtgatgctatatagattgccggtcccacaaatatcgtcactatcaaggtgatgatgcatccgaccagccctccgagtatgtccatgcatcttttggcaagaagctgtgtggttctcgcatagttcatgctggctgtgatgactgtgtagtcacctattttttctatctgattaaaactacctgccatgaccttgtttttggtgatgcctctgtgaacagctattcccatctccaggaatatatctgccatttcgtagggatattcgctctccgcacacggtgggataagcacctcgtccacccattcctcacaagcgtagtccactatcccgtcatggtttgcaactattggtatttcacatattgttttgccattcaggtcggcatctgttgccgctgccactatctgtgtatatccaaaaccattttccttaagtccctgaagtgtctccctaaggagcttttccggtgctatgacaaagagtgattcttttgatgaagcaaagcctctttttttaattattttcttaaacaccattctgcctaagtacgacacgagaatatatattggaatcatgatgtagtaagacatacgcgaatatatctcacccatctgtgtggtaaacaggaagaaggttgttattatttccacaaataccacatgcttacatgtaactatgaactcatcgagatagcctcgcttcaatacatttttgaaggcatcggatactatttccacgaagaaatctatgaacagaaatgctactgccagtatcctatagtcttcatctatgtatggattgccaagtccaaagcgccatatgtatgagaatatgaatgctatctgcatacacaggacatctaagagcatgaaatctatatgctttgtccagcctcttcctttttttctgtacattttttgtgtctccctgtatttcttgattaccctatttccagttcatccctatgctgtcaagccttgctatgcgctctgtgtcgagcaccatgccgctggccttcgggttttttcttttacatctgatatttgatatccagcgtcccagcttcactccgtctgtggagtatgataccggcacgtccagattgccgtttttctcgtaatatgttttcgcaagctcaaactttctgttccactgtatagcggtcttgctttctgacctgtagcctatgctctgcaagcgctttagctgctcgtctgtcattgagctgctattggtctggttggatagccaccgtccaagcggtatgccgtctgctgtgacatactttgcaggtacttcgaggtttccatgctccttgtagtaggccttggctgcgctgtagtactcttcccacttctgcttgttgtggtcccatatcatgccaagctcctcgagttcttttctctgctcatcggtgagtgcctgttctatgccgtacttttttaccttgaagcgcatgttgttgatccatgagccaagcctaaagcctgtaggcgatacatatttggccttgatgtccagattaccataggtattgcggtagcttttcagctcttccagtacctcctgccagcttgagtccgtgacatcccatatcatgcctatatcatttagcttttgtatcttttcccaggtgaggtttccggatatattgcctgacttcacacgcctctgggtgtttatccatgctcccagtgtgaggcctgacccagtgacatagctctttggtatcttgagatttccattttcctcataccactgctttgctgcctcatagtatgtatcccaggcacttcccagattttcctgcaggcgcatgaatatttccctgctgtccttggtctcgtctataatgcggaatctgtcttcaaagtgctctcttggcgaatgagtgtccggatacagcaaaaaggcttcctgcatttcgtttttcaggcagtctatgcagtatagactgtcgaaattgttgaccaggtcaaatatgaccggctgatttttgcttcctgctgacagtgctctgcctatctgttgcagatagatgattggtgacaccgtagggcgaagcagtattactccgtccacatcgtccacatgtatgccctcgttcagcatgtctatgcagtagaggagctttaagtggcttcctgtgtcctttttgaattcggcaaaggctttaccggtcgacgcatcgttgtagtacgctgtgtatatgtgtggctttttgtccaccttgctaaaccagtcggccgcctgcgccttcatctcatccatatgctctctgcctgagcagaatactatgtatttgccatcaggctttgtcatctgtctggcaaagacctctgtgagtccgtctgcctgctcgagtgcacgctttagctgctctagaagcttttcgttttccgatataagtcccgggtttgataagccctcgattcgttttttcagttgttcgagctctttcttgtatgaatacatggctatgacatatttaggctccggaagtatttctctcacgattgcttctccgagtgtcatctctgaggctatgttgccctcaaagagctcctctgccatattgcgctggttgtccagatagcgtatgtttgtcgctgagagtcccaggcgctttgccttcggatatgcttccagaagctttcttacactcttgccccactctgcggctccacagcggtggaactcatcgagtatgatatagtcagggtgcagggtgtctatgctgtcctcatgcttcatgagcctactgtatgacatgtattctatgtttgagaactgtgtgtctatgttttcaagctgtgtcttgtagatgtactcacttggcgatagccatagaaagtgcttgtgcggatgctgctccacgagcttgaaagctatcatcgacttgcccgtgcctgtcggatggatgacggctgccatctgcttttcctccagcatggtctcgactgctctgtatgcatcttcgttgtgcttgtaaagatgtatgctcatttgctgcctccgggtgaaacactacattaaaagggaggttggatttcgcagattattacaatctgcgaaatccaacctcccttatgtataaaataagcattttatataaatatgaccatttttctgaccatttatgggataactatagaattgattgcggagcgcttggtctccagatttggatgcacatagcgattcaatgtaatatttacattggaatgtccaagaatctcacttacactcttagcgtcggcgccgctgctgatacaatttgtggcaaaggtgtggcgcaatgcatgaaagtgagtattcccgatacctgcttctcttatatagatatgaaatctattctgataagtgcggggatccataggctgatttttctttagaaaataagagtcacctttcattgaagtgttatgataatctgacagcttgtcatatataaagtccgggataggaatctcacgaagtgaatttgaagtctttggtgaatctatatataaagaagtctttctcgtggctgtgtggttattttgtgatgaatcggatgtgtgtaccgtatctaccggaagtctctgcactgtgcgattgacatgcagagtgcgactaatcatatcgatatcttcccatttcagggcacaaatttctcctaaacgcagccccataaaaaggcacaataaaataccgagcttatagatatcaagctcggtaagaagatactcggttagcttttgctggtctgttgtattgattgtatttatgttgtttgaggatgtgacggatgaacgctttgacctgtacgacagatgaatttctccggtgccatatgttgcagctccatatgcaaggattgagttgaatatacaaagtatgctctttgtaacgctctcaccggctgtctcaggcaactccttgagtatttcattctgatttaactcatctatgacgctttctccccagttcggtttgatatatttattgtatatagtagaatacttttgaatggtagagcacttccggctggatgctatactttcaagccatttctcagcgactgcttttacggtgatagcggactgctttggggctgctgtttgattaagtgaagcagcttttgctgtaagcagcctttctgttacttccttatagctgtggccgtataccgatttgcactttttactgccggctgtgtctactatgtagtaacgcccctcccagcgtccgtcggttctctttctgatgttggttcctcttcttgacataatgtatgcctccttgtgattatttatttcaatagaagaggaatgaaatacttaatatttatctgttttccatatgtctttaccattttggaatgctctcagctttgtgagtttcttttcatataatgcttgtagccttgggatacgcatatgacgttcgattaaatcttttttatacaaactaaaatccatttctgctttatcaatatttacaatatttctatcctttacatatgatagaagccgtacttctttagaaataaaagaatgtgtctttatctcatcaatacgaattgaaccaagatgctcgtacggaatattatagaacatagaattaccggaatcatatataggtgcaaatccaagtatttctaatgtgtcaggatttctaactatagaaatattattcatgtgtctgtcggtatttgaaatgagatagtcagtcattatttcataatccataaaataatcaaactcttcttcttttattcccaaaccaagacagacctttttcaatggataataatatgattcattttgcttaagcttgactgattgcaataattcccatgcactgatacattccagattttctgagcaaaaatcgtatgaaagacatccaagtccttcaattccaccttctactgttaacaatgtgggagtgtatactgtgaaattttcaaatttttgttttctatgaagttctgttgcaaatagttcgtttatactttgctggtatgattctccataattacctttaatcatatatctgcggcctgaagtgtcaatacaccattttttctgaagttctccctgtgaagcagcgcagttaaattttgttttcttccttaaatcaagtaaattgtccttgtttagtgttatttcaccaaatgtatctacgaaatcatttgtaaacagatttacatctttccattcgatatcttcaccacgaggtttaatccaataacaatccgacaaacttaaggccaaattatctaccaaagcactgtttgttgaagaatatccaagtctttgcagggcagtcttagctccgtgcctcgtcttaggaatagctctgtccttccaccaatcatgaaatttcatatcattcatctgtccacctataggaaagtgggcaagagctgcttcattttttctgtaatttccgagagttcccccttctgtcagctccatcaggcaaacaggtatatctttatgcattaaatagtattctttagctattttcttcgccatatattaactccatataatatcttctgttttatcaagtctacagtcacgattaaatttatcaactatttcataataggattcaaacaaatcagccacatataatgaaagatttttttcctttacaccatcaagatcttcacctatcttgatttttgtacctattgaatcaattaaatacccagcgtctctgttataataataaatcttaccgttattatcttcaattttatacatattatcattttctatcggtaactggttggcaattaattttataatataaggagtaggcgagctttctccctgctcccatttctgcaatgtacttattggtatattgaacatctttgaaaaactacgttgcgaaaggccggtagtatttcgtatttccttaatgttcataataacaaacctcccataaaaatatatccaatttggttactttttttgttattatacccaaatcggatatataatgtcaatataatttaatttatttctgaccacaattttgaccatctaaaactaaaaaatatataaaattcaacctgatattttattaaaattgtaaaaagacacaaaaaaagatacaatagttgacataaaacgactcaagttttattatgtatctagtgttttttaacagaggtgattttcgcagattgtaataatctgcgaattttttttatattctttctgattaggcaatagcaaaatatcatgaaaaaagagagcgggccggcgaatgggaagttcgccggcccagatttacactaggagcaaagtttatactttgcggagataaaatatgtttttcgtggcctttcatgttgtcgcggccacgctatagttctgatttgcttataccgctgccagcttctttccaagctcctcgcaggctgtctttgcatcatcgtccggtgcatcctggcagataacaccctcgccgcctaccactgtagctccggctgcagtcattcgctctacccagtcgcgcatccactcaccatcgccccatccgtatgaaccgaacagaccgattgtcttgcctgccacgcagccctcaagctctgtgacaaacggctccatctcgccctcctcaagtacctctgcacccattgcagggcatccaagtgcgaatgctgtctctgatttaagctcatctattgaagcactgcttacgaatacgatttctgcttcctttccggcatctgtgacgccctttgcaactgcctctgccattgctgctgtattgcctgactgtgaccaataaactacactgattttgctcattttaattcctcctataccgcaatctgctgcggttcttctttatatatttccagtatcagcctcatatctatatcctcggccaatagctgtatgacactttccttcgccttttcaaaatcctcaaacatcttctttttgagtggtacgttgcggtacaccttccagtatcctgaatacaggcagccgcatccgttatgctctataaagcctctcacatcctctatcggatacccaagcaaaagccccatctcatgcggaaactgcttgtgttcatcattcagatacgcttcgtagtgttttttgaatctaagtaatatcttgccgaatgaaaaatcctcatatcccgctttctttagtatatccaaagcctctgaattattcagatatgcttctaaaaggctcctgcggaataagaggaaggcggttttctcattccttgctgcgagcctaaaatgcgatatcccggaagctctcagaatcactctcatagcactctcatcagcgctgtctatcatgagcatatttgaaattctcgctcctgtaattagtggggcacactggagggcaagctgcatttccacactctttaaatccatgctcatagcaatctgaaatacttcctggcacattttggctcctttcgtgttagttatctctaacctgagttaaatatatcttacttatacctatatgtcaagtatttttttgccatttttacactttttattctcaattaattgcaacaaaaaacacactaagaatctttaattctcagtgtgctatccttattgccgttcttctttttatacaattcattaattcacttattataaaaattgtacctattgatatatcacagcctctcccccaatgctttgcaacgctttctgctaaaagcaatgccatacgctataatatcacatctgccttcattacgaagagcctcatcatatctcttttccttaatctgtgccatggcaatctcacaggccgtatcaagctcctttatattccttgcatacttcacctcgattacaattcctgcatccggattttccggcataatcattatgtcactaaaaccgtctcccgactcacgatttgacttaattagccagtccggattacttcctcgcagcaagccaagaagcagtccatggtagaagttctccttcatatcatcaggtgcctttgtatcaagtatgcttatcatacgtcccatcacaatattgagctgctttgcaatctttgtctcatccttatcaataattgcctttgataaaagcttcatagtatcattatcatttgccaccacactcttgaacc

SEQ ID NO: 633 - DNA, 12016 bp, unidentified
  source 1..12016: mol_type = unassigned DNA
tcatactatctcacctgccgtttcccgatagatttcaaagaacttatcctcaagtggcatttccgccgtcacatgggaaagcgtgtcacacaaaaccatttttccgttgatgataatgccgacacggtcgcagatcttttcgatcagtgaaaaaatatgtgttgatacaatgatcgtttttccttctgctttcaattcctgcagaaaatcggtcacaactttcgccgtgataacatcaagtccgtttgtcggctcatcaaaaataatgatctgcggatcatgcaccagtgaaatgatcagggatactttctgtttcataccggtggagagatttgcaaccttcacttccgcaaactcatccacaccaaatttctgaaacaggatacgttttctctcatcccgctctgcctgatcgacaccgtataattctgagaaaaaatcaaacagatagttcggagtaaaaaattcttccagttttaattcactcgtcagaaatccgatctttttccgaacaccgttcggatctgtcacaatactgcttccgtcaatcagagcatcacctttatccggtttgatcagcgttgctaacatgcgaagcgttgttgtctttcccgctccattgggccctaataatccaaaaacttcccccctgtaagtacaaaaggaaagatcatccaccgcaaccttaactttttccgttgtcttttctaatttctgctgtttttttgacaagtgaaatgtcttggataatccactgactgtcaataactcttccataaccctctccattaaaaatttctatatcatgatcgtgatctacactcgcttcgctcggcagtcttattatatcgttccgtcatccatactgtcttcaatatcatcatagatatcatcgtaaatatgatcatagatgtcattatagctgctataagatccaagtcctgtaaaaaaaatcaggatatacagaataatcgatgctgcaaaaccgattccacctgtgatcaaaccaacgatcgccattccttttttgtttccttttaccagctgtaaaataccgaaaatgattgcaaggataccggtgatccagctgatacaagtgcagaacagcaaaacggtgatgattccaagtatcaacgacgcaataccaaatccttcactttctgacttgttattgccatttggctgtccataattataatctgtactgccgtttgactgtccatagttataacctgcactgtcatttgactgtccgtaattataatttgtattgccgtttccatatgacgtatttgtataatacggattgtctgtcatagtcttttctgaatttacacgctcttcatttccggtcacagtcttctctaaatttacacctgctgtaccatcagtcgtacttttctccaggctgacaggatttccctgatttacattcggctcatcatttccataattccagttattttcttcactcatactctcactacctcttaattaaatccgaccactttctgtgacagtcgatatgccgcaaccgaaatctttctgcctcccttgcccggcagattcattgcatttcccataattccggcgcgcagatgatggaataaacggatgtcgtgatccttaatatatttccacagttcacgttttttcagaagattttcctcagtgccggagcggatcaacataatcgtggaaatgaccgtgatgatttccagataattaaacatgtaatgacgcagttttcggtttggaatcttccagagatcaaattcatctaccataatcttatttacattgatctgctggtcgatacggctgatcatcactttctcattgaccgactgatcttccctgccaataaagtaacggtaaaaatctacatccatataatacagtgtttttacacttggtaatggtttgtacacataaatattatccacataaaatgtatgtttcggcagctctaatccacattcacgcagcagttttgtacgataaatcacagaatgcatcaaaatgtactgaccctttctgaaacgtgacacatcattccaggtaaaaatctgattttggggcaggttcgtgtagtgcatcacttttttatgatgcgcaccttctttttcatatacataattggcaataaacatatccagggtctgattgccgccggtcagctcacgaagtttatctaaaatcttcttataagcctcctcatctacccagtcatcgctgtctaccactttaaaataaagtcctgtcgcattgcggattccagcattgacagcctctccgtgtcctccatttacctgatggattgcacggatgattcccggatatttcttctcataggcatctgctatgtcaccggtgctatcttttgacccatcatcaatgatcaggatctcaacatcatcgccacccggcagcagggatttgatacagttttccatgtaatcctgtgaattgtaacacgggatcgcaaatgtcagtaatttcatatatgaatcctccgattatctttttgtattttctgccatgatcgcatcagcaagttccatcgcttttttcgtcatcgcatcgatattatagtatttgtattctgccagtcgtccgagcagataaaaatgcggcagtccacctgcaagcgcatgatatttttcatagagttcctggttcttcggctctaatatcgcatagtaaggaatttctccctccgctcctgtgtaggcaaacggatactctttcacgattgtggttccgtccgtgttcttttgtccggtcagatacttaaactctgtgattcttgtaaaatcctcactgaccgtgtaattgaccacgctgtgtccctgataagattctttctcataatgttcaaagtcaaatcttaaggaacgatatggaagccttccaaactgacagtcaaacaactcatccagtgcgcccgtatagataacctctccgtcaaacgttgttccatcaaaataaatctgattttcttcaaaacgcaatctctctttacagtcaacacctgtctcaaccgtgatgttctcatggtctaacatgcgctcaaacatcggtgtgaaaccttccttcggcactccctgatatttgtcctgaaaatagcggttgtcataagaaaccagcaccggcacacggcctgtcacttccgggctgatatcctccggtttttgtccccactgcttcatggtatattttaaaaatacattttcgtacacaaactgtgcgatctcgcggatgtccggatcttcattttcccgcagtttcatgatcggcacgcggcttccctctccgtatgcagcaatcagtttctgctctaatgcatctgctttttccttttcatataccatatgaagcgtatttaaattaaacggaaccgggatcagacgatccccgacctttgctaccacctcatgtccgaatacataccagtccgtaaatcttgagagatactgatatacttcttctattcctgtatgaaaaatatgtggtccataattatgtattaatattccatgttcatccggctcatcatagcagttacctccgatatgactgcgtctctctaaaaccagtactttctttcctgcttcctctgcaagctttctcgcactgacagcacccgcaattcctgcgccgatcacgatactatcgtacatgtaatcctccttgttttccactttgttttaccatagccattctattatacacattttcctaccgcaaaccaatcaaatttttctttagatattcttaatttctgccaaagtatgtagttgttcatattttatttacataattctcacaaacagggcatacggcggtcacaattccccgatatactaaattcaaagttaaggcaacaagttaaaatttttcatagaactttttttcatacctgatgtaagtcaggtagccttgcttatccgataagcaaggttcctcccagcaaatagtgaattacttcacttttcatacacactctttttcataatgaatagccggtgctgttgcaccggctccctctttttataaatattttcttttaagctttcttttcatttccaagaagaatgttcatatatttcgcatacgcagcaaaagcggacggaatagcatatttttcttttgcatcttctgcttccacaaataataatccatctgcacgatttttttcacacttcacctgtggatgcatttccggctcctctacacggactgcataacctgtcatgtgccattcgatatgggaaaaaatatgtttcgcctcacctaacggctgaatacggatcggtgcataccccatctcttttaccatggaaagtacttcctcctgtcccatatttccttccacattcggaagctcatacagtcctgccaaaagtccctttgccggtcttttccggattgcaaccttctcatcatcccttaaaatcagaaccgtttttttctcgatctttcgcggttttgccttgctcttgactggtatctgtccgatcagttcctgtttttttgcctcacaaaaatccttccatggacattcggtacaaagcggtgcaccgtttggcacacagatcgttgctccaagttccatgagtgcctggttaaacgcaccggcaagattctgatgatatacctttgccctcagatcatctgcatcctccatccatggaaatacatttttttcatttctgccgtctgccccatgcatcagtttttctaataatttttccatctcattacggaatgactgtttcatgatatccgtatcatccgcagaaacgcgcgttaaaacacggagcacatttccatcgaccgccggaaccgggattccgtatgcgatagatgcgaccgctcccgctgtataatggccgatcccctttagtttcaacagtttctcataatctgccggaagttgtccaccataattttccacaacttccacagccgctttttgcatgttcctgacacggttataataacctaacccctcccaaagctttaaaagttcatcctccggacacactgcaagtgcctttgcatccggcagtgccgtggtaaaccgctcaaaatacggctttaccgcctccactctcgtctgctggagcatgatctccgaaacccacacccggtatggagtcggttcctctcgccatggcaatacacgggcatgatttaaaaaccattgcaataatggggatacaagttgctttaagtcgtaatcttttaacatgtatgtctcaaactttctttgttatatagcagccttcatgtctgcgcttatttttttcaaaccagtaccttatttgaggtcaaactggctgacaaatactgcgatcttctctaaacatttcttaataatgtctttggaataagcataagagcagcggatgtaaccctctgcacaacttccaaatgcgtctcccggaatgactgccaccttctgttcctgcagcagacggttacaaaattccatgctggtaagtcctgtttttttgatcgacgggaatacataaaatgcaccttccggttctgtcacatccagtcccatattccggaacccgtccaccatgatctttcgtctctcatcgtattctttacgcatcacatcgatctcttcgtcacgaaccggactcgtcagtgcttcaagcgccgccacctgtgacgttgttcctgcagacatggtcgtaaactgatggatcttattcatatgaaaaataacttccgcaggacccgctgcaatacccatacgccatccggtcattgcaaatgcttttgaaaaaccatttaataccacacaacgctcatacatatccggcagcgccgcaatagatgcatgctttttgccataggtcagctctgcataaatctcatctgtaatcacaaaaatatcatgtgcggtcacaacctcacggattgcttctaaatcctctttttccatgatcgctccggtagggttgttggggaatgagatcagcagtacttttgttttatctgtaattttttcttcaagttcttccttcgtcaggcggaatttattctctgcctttaacgggatggaaaccggaatgccgccacacaattccacacacggaatataggaaacatagcaaggttctacaactaacacctcatcccccggatccaccagtgcacgaagcgccagatcaataccctcacttgctcccatcgtgatcaggatctcattttccctgtcataatgaagtccaaacttctctaaatactctgcagctgccgcacggagttcgaccgtaccgcgattatcggtatactttgtctcacctcttttgattgaagcaatcgctgcctccctgacatgttccggtgtcggaaaatccggctcgccgacaccaagtgacaatgctccctccatcgtatttgcaatatcaaaaaagtccttgatccctgaatccggcatctcctttactaccttagataagtatgatttgcttgtgtccatggtttttcctcttttctgtgtctttgtcaaaatatcataccacctatcatagcactttttctaccaaatttatagtgaatttttcccataatctattgacaaattcagggaaaagctgtacgctattaataacgtatattgttaattttttatcaaactattcaggagggttccaaacgatgagcgattttaacaatttaaaactggaagttgctgaggagattgctgttcttacaatttcaagaccagcagcattaaacgcattaaacagcgagacattagacgagttaaacacagcattaactgagatcgaagcaagagacgacatcaaagtcgtaatcttaaccggcggtcctgacaagaaaggcaacgaattcaaatctttcgtagcaggcgctgatatttctgagatggtaaactttaccgcagctgaagcaagagctttcggtatgagagcttccgtaccattcttcaaattaatgaacatgcgtcaggtaacgatcgcagctgttaatggttttgcacttggcggtggatgtgaaatttccatggcatgtgatatccgtatcgcatctgacaacgctactttcgcacagccagagacaggtcttggaatcattcctggattcggcggtacacaaagacttgcccgtttagtaggcatgggacgcgcaaaagagatgatctttacctgcgattccgttgatgcagcagaagcttaccgcatcggtcttgttaataaagtagttgctccggaagagttaatgaacacagcaaaagctatggctaagaaaatcatctccaaaggaagctacgctgtttccgttgcaaaagcagcaatcaacaacggttatgatatggacatcaagaacgctgttgagatggaagcaaacttattcggcgtaacctgctctactcatgacaaaacagaaggtatgactgctttcttagagagaagagctgctgatttaacagatttctaaaaaaacatatcaaaaaaacgggctgataattcagtccgttttttttgatatactcatattccaaatttaatgtgcaggtaatctctgattacctctacgcatttttcacgcccccatcaaaaccgacaccaccggcatcgtcaccacagcaagaattgccgtaagcgcaactcctcttgccgccagatcataatttccatcatactgctgctgataacctttttccgctgtgagctcactaaggcatcttttttgcagatcaggctctttgcctcctgataacttttgccataatcctgtggattctgatatggtctgccaagaatacaggtgcttttcatccggtgacaaaactgtggattgtcatccagttcatttaataatctttccagactgtggatcagtctgtcatcttcatagtccggaaataaaatgacacctttattcaaaaaattcataaacagggctgcatctccaagatccgaaatcatttttgccatacagctcatataataatggtatgtatgttcatcattttcaagattttccccatagacactgtctaccacaataatccccacacggtgtggaaccgaaaaatccatatgaaacagtcccgcgattttttcaatataccgcgtgttgatatcatacccaaacaataaattatacaaaaattctcctttgcggtttgtcttattattttcctcaatcacataatttccaatgctctgcgcaatatccacaaaagacgctttttcccaccggatttgaaacaaaggtaaagttaatttttccgcgagatcaataatatccactggcacctcttccctctcatccttaatggaaattgcaaaacctgatatcttaagttcatcaagttcgcgcatggcactctttacttccgcccatccaaaacgctcaaaatctacactgcagagtgcaaaatccccggcattcatatggtcggcaaacggtctcgtcataaccacataactccatgacactacacgatccagaccgccttctccggctaacagccacattccatccagattcatctgtaagatatccctgcattttaccatacaaacaccttcttttctattgaatcaaaaaaagcgtcagaaccctcttagttccaacgcctttgtcaataatttttatcatttgtatgtaatatagtcgatagctatatttttgtcaatatcccgctgtttctatatttcagtggagaaatgccatatgtttttttgaaacttctgataaaatagcttacattctggtatccgctctgcatagctgtctccgtcactgaaagatcggtgtcctgtaacaactgttttgcattctccaaacgtaaatatgttatatattgcgacaatgtaatatggaaatgttccttaaaataccgcgatatatatttttccgaaagatgaaactgttccccaaattcctttagcgatatctttcctgtaaaattctgctgtatatatgaaaccatctctttttctacaatatttctgccgcttgtatcattttctattacaaatcctttcttccacatttcaagaataaattgtaaaagaattatttttgtctttatctgcgcagttatttttgactcagtttcatcattttctgccatatatatatcaatcagctgctcacacagttcttttgccgagtcttttactcttgggtttatcatcaaatgaccgctatttaatggttcaagcaatttatcatctaacatgtcatcggtccgaaaagatatatattttaacggaaacaaaaatgtaaaataatccacggtgccggtctgtgagcccataagatgcagattgcccggcgatacaacgaacgcatcccctgcttttccaatataactctctcctgatatacttaccgtcagcaaaccactttttacatatataatctcaaattcatcatgccaatgtaccggtatctgaaatgaccgccccgcattctctatgtgatatatactaaatggattgtcctttgtaccatgtggtttattttcctttaattcaaagtacatactctctcctacaattctacaaggctcttgcttttccattttccgctcttccatctaagcaccattccaacagctctcgcgcactcatcacctgccatggcaatatatgctcctactgcctgaagtcccatatgtattccaagaaaatatgttccaccaactgcaaacagatacataaatatcgcacccattataaccggaaaaaccgcatctccactggtttttaatgcctgaccatatacaagatttgtcacccttccaaattcaaggaatatatctactattaacagccttaccacaagatttatcatttgcgcatcatccgtaaatatatgaactataaaatgtccggacatcgcaaatgtcacagagaagcacgtcgctgttataagaccatataccacagctttccgcgtacccctgtcacattcttcaaactcctttgatccaattctccagccagtcataatagcattagcctgtgcaagtgcagctcctatacaatacgaaaaatttgctatctgcatagcatatgaacgggctgtaacattcattccgactgcatccatctgattcatgaatcttactataagtgtcattgcaacattataaagtgctgtttcaaatgcagaaggaaaacctatcttaacaatctgcgcaagtatcttccgtggcggaatgcgctccggactctgctttgcctttatcagtacagcacccatgcctgctacaatgataaggttcacaacttttgaaataactgtggcaatagcaacgcccattactccccaatgaaatacaaacaggaacactgaattaaatattatattaatggcatttcctgcaatcgttcctatcaaggaatgctttgtatatccaaacactctgagatagctggaaaaaatgggaataagcgcatttaaaacacatgcacctccaacaattttaaggtatgtttctgccggctcaagcaaagccggagaaatacttacgattctaagtatttctccagaaaaaaaggcaataataaccgacataaggatacctgtcagtgcgttaaacataagtccaagctgtctggcctgatatgcaattccaggtctccccgctccgatattttgtgacataactgctaccataccggatgatattaccccgaacatgatgataaaaacacttatatacgtatttgctgttccgacagctcccacagcctggtcgcttacagacgataacataagtgtatcgaccatgcctgaaagcatataaaataaagtctctaagcatattggcacagccagctgtgtcaatgtttttctttcagttgccatgtttttctcctatgaaaactaatataacatacattatcaataatatggtatttttctgcatatttcttgtataatattatgcaaaaattgcattatttctacttatttacgaagtgaatcagcaagtctgttaattttgccctgatctgcattatcataggaaaatattttatgattccacattctcatctctgcataaaatgttgacgtttccccccaaatagactaggatagaatttgaatgataaatacgcaaaacaaggaggaaaatcctctgctcctgcaatggcagtcgcattttgctccgcaaaacaaggaggattttatgttagataaaatgattggttttatcggtgccggcaatatgggaagcgccatgatcggcggtattctggatgcatctttagtgactaccagccagatcatcgcaagtgcacactctcctgagacacttgataagatccggacaaaattttccatagagacaacccagtcaaacgaggtcgttgcagaacgaagcgatattttgtttctcgctgtaaaaccaaataaattttccgaagtacttccgcagatcaaaggtcatttaaaaccggactgtatcgtagtttcgattgcagccggacagccgatcgcaaatatcgaggcgctgctcggtgaggtcagactgatccgcgccatgccaaacaccccggcgcttgtaggcgctgcgatgagtgcactctgtccgaatgacaaggtaacaccagaggaagtaaagctcgttgagtccttattcaacagcttcggccgtgcagaagttgtaccggaaagcatgatggatgccgttgtcggcgtttccggttcttcccctgcctatgtctatatgtttattgaggcaatggcagacgccgccgttgcagacggcatgccgcgcgcacaggcttataaatttgctgcccagtctgttttgggcgccgcaaaaatggtattagagaccggaaagcatccgggcgaattaaaagatgctgtctgctctccgggcggtacgaccattgaggcagttgcagctttagaacatggcggtttccgtgatactgtgatcagtgcacagcgcgcatgttctaaaaaatcatatgatatgagtcaaaaataa

SEQ ID NO: 634 - DNA, 48276 bp, unidentified
  source 1..48276: mol_type = unassigned DNA
atccggtttccaaccgggcgctgttccgggacacggaggaatacggctgcatcctcagcgagttcgcgccggggacgccgccggccaaatggacgtttcccaagcgaaaccgcatcatcagcggcctgagctgcggtgtgctggtggtggaagcgccagagaaaagcggcgcgctgatcaccgcccgtttggccgccgagcaggggcgggacgtgtttgcggtgccgggaaacatcgaccagccgtcctttgtggggagcaaccggcttctgcgggacggggcgatcatggtttcctccggctgggacgttctgagcgaatacgaagccctctttccggataagattcggaaggaagacgcgcccgcccaccagacggcctatccggacgaggtccgcaaggccgcagaagcggaaaaaccgctgctgaaagtggcgcagaaactgcgtcttccccggaaaaatgagaatcttaaaaaagatttagcccctcagggcattgacaagacgccttccgcgtcttatagtgacgtaggctcggtcaggccgaagctgttgccggaggagcagaccattgtggacgccctgagcggcggcgagcggctggtggacgatgtgatcgccgaaaccggcctgtccaccggaaagctgctgtccagcctgaccatgctggaactgaagggcataatcaagcgcctgccgggcaagcgcattgttctgagcgggaaataaattctgcccgcccgaatttgaagtaacgaaacggagaattttcattcatgggtaaacctgaaaatctggtaatcgtggagtccccctccaaggcaaagaccattggcaagtacctgggagacgactatgtcgtcaaggccagcatggggcatctccgggatctgccgaaaagcacgatgggtgtggatttggagcatgatttcacccctcactatatccctgtccggggcaaggaagccctgatcaaggaactgaaaaccgacgcggaaaaggcgaaaaccgtttacctcgcaaccgaccctgaccgggagggcgaggccatttcctggcacttaaaagagctgctgaaccttcccgacgggaaggcgcagcgggtgacctttaacgaaatcacccagaaggtggtcaaggagtccatccgccacccccgggatatcgactatgatctggttgacgcccagcaggcgcggcggattctggacagaatcgtgggctatgagctttccccgctgctgtggaaaaagatacggcggggtctgtccgcaggccgtgtccagtctgtcgccacccggctggtggttgatcgggaaaatgaaatccgcgcgttccagcccaaggaatactggacgctggacgtgaccctgaaccgcatgggcaagcccggctccttcgtcgcccgctactggggcgaggataagaagcgggagctggaaaatgaggctgatacccttgcggtgatcggcgacatcgacgggaaggaatttgacgttaccaatgtcaaaaaggcggagaagaagcgctattccgccccgccctttaccacctccaccttgcagcaggaggcgtcccggaagctgggcttcacgccgaaaaagaccatgatgatcgcccagcagctgtatgaaggcgtggacgtggcaggggaaggcaccaccggtctgatcacctatatgcgtaccgactccctgcggctttccgacgaggctatggacgccgccgccggatttatccgcagccgctacggaagtgagtattattacggccagcaccacgtattcaagaccaaggcgggcgctcaggacgcccacgaggccatccggccgtcccatgtggagctggagccggagcgggtgcgtaccagcctgacccccgatcagtataagctctacaagctcatctggagccgctttcttgcgacgcagatggcctgcgccgtttatgacaccgtgtccattgacgccatgtgcgccgggcatgtgttccgcgccagccatcagagcctgcgctttgccggctttatcgccgtttacgaagagggacgggacgatgagcaggaggccgtcggctcaccgctgccggacctcgcagtgggggagaagacgcttccctccaatatccagaaggagcagcatttcacccagccccccgcccggtataccgaggcgacgctggtcaaggccatggaggaaaagggcgttggccgtccttccacctacgccgccaccgtgtccaccattgaagaccgggagtatgtggtcaagcaggacaagcgtcttgcccccacgcccctgggcgagatcgtcaccgggctgatggtggagcggttcaccgacatcatcgacgtggagtttaccgccaacatggagtcccgcttggacgatgtggaggcgggcaagcaaaactggaaggatttgctggcggatttttacagggatttcagcaaggagctgtccgacgcggagacggcgctggagggggttcgcctgaaggtaccggaggaggagaccgacgaggtctgcgagctgtgcggacggaaaatggtggtgaaaaccggccggttcggtaaattcctggcctgcccgggctatccggagtgcaaaaacaccaagcctctggtggagcggatgcccggacgctgccccaagtgcggcagcggaatcctcaagcgcaagtccaagaagggctacgcctactatgcctgcgagcggggggcggaatgcggctttatgacctgggacgttcccaccgcagaggactgcccggagtgcggacagaccctgttcaagaaatccggcaaggggcgcatgaagcccttctgcatcaacgaaaaatgcccccgtttcctcccggaggatcagcggggctactataaaaagaagaccgccgaggacggagagcccgccccggaggaaaagcccgctgccaagaaagcggcggcaaaggccccggcaaagaagacggctgcaaagaagactgcggcgaaaaagaccgcggtgaagaagaccgccgccaagaccacggcgaaaaggacggcgaaaacatcctctaagaaggagagcaaggcatgaaggtaaaagtcatcggcgcggggctggccggaagcgaagcggcctggcagctggcaaaccggggcatcgaggtagagctttccgaaatgaagccccaaaagatgacccccgcccaccacagcgcggattttgccgagcttgtctgctccaattccctgcggggcgaccggctggaaaacgccgtggggcttctgaaagaggagctgcgccgctgcggcagcctgattcttgcctgcgccgatgccacgagagtggaggcaggcggctgcctggcagttgaccggggcggcttttcccggatggtcacggagaaaatccggaatcaccccaatatcacggtgatttccgaagaaatcacccaggttcccgaagggccggtgatcgtggccacggggccgctgacctccgatgcgctcagcgaggccatcgggcattacttcggggagaccgggtatctgcacttttttgacgcggccgctccgctggtttcggcggaatccatcgacatgaatcttgcctggtggcagtcccggtacgaccggggaacgcccgattacatcaactgcgccatgaatcgagagcagtacgaagccttcatccgggagttggtaaacgccgaggaagccccggtgcatggctttgaggacaaaaacgtctttgaaggctgtatgcctgtggaggtcatggcgcggcggggggtggataccctgcgctacggccccatgaagcccgtgggactgagaaatcccgccaccggtcatgagccttacgccgtggtgcagttgcggcaggacaacgcggccaagagcgtgtacaatctggtgggcttccagacccatctgaaattcggcgagcagaagcgggtattttccatgatacccggtcttgaaaacgcggaatttgtccgctacggcgtgatgcaccagaacaccttcctgcaaagccccaggctgctggacaaatattacgcagaccgccgcaacccgctggtggcctttgccgggcagatgaccggcgtggaggggtacgtggaatccacggcctccgggtatctggcggcggtggccatggcggcgaaggtacagggacgggaagtccccgacttccccaaggagaccgccatcggcgcgctggggcagtacgtcagcgacgaaagcattgaaaatttccagcccatgaatatcaatttcagcatcatcgcaccgctggaaaagcgcatccgtaagaaagcagaaaaaaatctcgccattgccgcgcggtcgctggacgtgatcgacgcgctggtggcgaagggcatctaagagaaagaggtggaacggttgaagatcattcttgacgcgatgggcggcgacaacgccccggaagctcccgttttaggcgctgtggaagcggccaaggcctacggcatcgagatcgtgctggtaggccggggagaggacatccttgcggttctcaagaagcacggcattgacaatctgcccgagggcatggagatttccaatgccgacgatgtggtggacatgcacgacgatcccgcatccgtcatccacaaacggaaaaattcttccatggtgatcggcctgaaaatgctggcggacggtcagggcgacgccttcgtttccgccggttctaccggcgcgctgctcaccggcgcgacgctgctggtcaagcgggtcaagggcatccgccgcgccgccatggggcctgccatgcccaacaaggcggggggaaagaccgtgatcgtggactgcggcgccaacgccgagtgtacgccggaatttttgctgcaattcggcctggtcggctccgtttacgcaaaaaagcagctgggcattgagaacccaaaggtcggtcttctgaacatcggcaccgaggacagcaagggtaccgccctgcaaaaggaagcctatgcgctgctgaaagacgcgggggagaaggggcttgtcaatttcgtcggcaacgtagaagcccgggatgtgccgctgggcgcggtggacgttgtggtctgcgacggcttcaacggcaacgtgcttctcaaaaccatcgaggggactgccatgttcatgggcagcctgatgaagaaaatgttcaagaaaagtctgctcagcaagctgggctatcttctgtgcgcctccggagtcaaggatctgatgaagatgctggactaccgggagatcggcggcacgccgttccttggcatccgcaagccggtcatcaaggcccacggcgcttccgatgtgcttgctttccgcaacgcggtgaagcaggcggcggacgtggccgcgtcggacatcaccggggagctggaagaaaatttgcagcggctggcagcccaaaaagagaaggtgacggagcatgattaaggatctggaggccgtcatcggctaccgattccggaatatttcccttttgcagaacgcgctgacccattcctcctacgcaaacgagcgctggcacaacagtctgctcagcaacgagcggctggaatttctgggggacagcgtgctgggaatgctggtggcggagtatctctaccgcaatttccccaaccgcccggagggcgagctgacccggatgcgggcggacatggtctgcgagactacgctggcgagcgctgccaaccgcatcggcctcgggaatcatctgctccttggccacggcgaggagcaggggggcggacggagccgggactccattctggcggacgccatggagtcggtgatcgccgcgtgcttcctggacggcggcctggaggcggcgctgcaggtggtcaggacgttcattctggtggaggtgccggtgaccaagctgcacaacgcggactacaaaaccgagctgcaggagctggtgcagcagaagaaaaaccaggtgctggcctacgagctggtagggcagtccggccccgaccacgacaagcagttttccgtggaggtctccctcaacggcacgatcgtgggcaagggcatcggcagcagcaaaaaaagggcagagcaggacgccgcccgctgtgccatcgaaagcctgttcccggacaaagcgtaaaacgtcaaaacgacgcggcctttcatgggcggtcgtaaaacagtgaatggagcgtatcggtgcagatacgctccatttcttgtgcaaacatgctattaacgaggtacggccccttggctctccctctgggagagctgtcaccgcaggtgactgagagggtcttgcagacttgcttaccctatccgtcttcgcttcgctcagccacctctcccaaagggagaggcaagagatgcagttcatgatcccactgcgcctgctaattgtttgatgcgccctgcctattatggttgcgccatttttctatgcatgcaaaaatggttctctggagatgttgtaacggcaaaactttcccttgctgtattcgacatattgtgttataataaaatgaactatgcagacaaaacaaagtacccgcagacggccgcctgcggtaaaatacaggatgtgaacaaaatgggttcccgaaagccgatgaaactgaatctgggcatggcgccgaaggtcattttgattatgctgctggacgtgcttgccactgccgtctccttctttttgggactgtggttccggtatgatttttccttcgccgaaattcgccccgtccatctggacggttttctgtccgccataggcccctggtgcgtgatcacgcttctggtattctggcttttccggctgtataactccatctgggccttcgtcagtacgccggaggtgttccgtattaccggcgcgtatgcggtgctgggcgtgatcggcgtgctggtgttccactttgacggcaatctgatgccccgctccagcatggtggtgggcttcctgttcagcttcgtcagcaccgttaccattcggttttcctaccggctgctccggacggcgcagcggcgcatcagccacttcacccacgccaacggcgtgaaaaacgtcatgctgattggcgcgggggatgccggacgagcgctggccgtggagtttaccaacagcgaccatatcaaggatcacctgtcctgcgtcattgacgacaacccggtgaaatggaacaagcagctgtgcggcgttcccattgtgggcggtcgtcaggacattgccacggctgtgaaaaagtacaagatcagcaagatcatcttcgccatccccaactgcaccgcaaggtcccggaaggagatcctggacatctgcgccaccaccggctgcgaggtgcagatgcttcccggcattttccagatggtcaacggggaggtcagcgtcagcaagctgcgcaaggtcgatccccaggatctgctggggcgggagccgatcaaggtcaacttagacgaaatcgtgggctatatttccggcaaggtggtgctggtcaccggcggcggcggcagcatcggcagcgagctgtgccgtcagatcgcccacgcgaagccgaagcagctcattattctggatatttacgaaaataatgcttatgatattcaaatggagctgcaccgcacccatccggaactgaacctggaggtcatcatcggctccgtccgtgacgcgacccggcttaaccatgtgatgtcagtctaccggccggagctggtgttccatgctgcggcgcacaagcacgtcccgctgatggaggaaagccccaacgaggccatcaaaaataacgtcatcggcacctacaagctggcgaaagccgccgcgaagtacggtgtcaagcggttcgtgcagatttccacagacaaggccgtgaaccccaccaacatcatgggtgcgtccaagcgcctgtgcgagatggtggtgcagatgatgaaccgggagtccaggacggaattcgtggcggtgcgcttcggcaacgtcctgggcagcaatggcagcgtcattccgctctttaagaagcagatcgaggccggcggccccgtgaccgtcacccatcccgacatcatccggtatttcatgaccatccccgaggcggtgagcctggtgcttcaggcgggatactatgccaagggcggcgaaattttcatcctggacatgggcgagccggtgaagatcgacaccatggcgcggaacatgatccgcctgtccggctacgagccggatgtggacatcagaatcgagtataccggtctcagaccgggggagaagctctatgaggagctgctgatgaaggaagaggggatgcaggagactgccaacaagctcattcacatcggcaagcccatcgaaatggacgacgcgctgctggagcagcagctacggcggctggacgaagccagccgggaagaaagggaagacatcaaggacatcgtcgcggagattgtgcctacttacaaacgcgagtgtaaggtctgaccaaacgaaataagagaaaatgaggaaagcggaatgtaccgaacgtttttcaaacgcctgctggatattattttgtccggctgcgccatcgtgatattgtcgccgctgctgctgatcattgccgtcgccatcaagatcgacgatcccggcccggtgctgttccgccagaagcgggtgggcattcacaagacccatttttccatcatgaaattccgcaccatgaaaatggacacgcccaaggatacgcccacccatctgctggaaaacccggagcagtatatcacgaaggtgggaaaattcctgcggaagtcatccttggacgagctgccccagatttttcagattttcacgggggaaatgtccattatcggcccccggcctgccctgtggaaccagtttgacctgattgccgagcgggacaaatacggtgccaacgacgtgcgccccggcctgacgggctgggcgcagatcaacgggcgggacgagctgcccattgacgtaaaagcccggctcgacggggaatatgtggaaaagctgagctttttctttgattgcaaatgcttcttcggcaccattgtttccgtgctgaagcacgacggcgtggtggaaggcggcaccggccggctggaaaaggagaaaaagggatgaagagcattctcatcaccggcgccggaagctatatcggggtttccctggaaaactatttgaagcagtggccggaaagctaccgggtggattccctggatatgcggggaagcgactgggagagtcattccttccgcggctacgacgcggtgttccacgtggcggggctggtgcatcagccggacagcaaaaatgacccggcacgctctgacctgtacgatcaggtcaaccacatcctcgcggtgcggacggcggaaaaggccaaggccgacggcgtggggcaatttctgtttatgagctcggagagcgtgtacggcctgaccgcgcccatcggcaagacggtggtcatcacgaaggacacgccgctgcaccccacggacaactacggcgtcagcaaagccaaggcggaagcggacttgcaggcgttggcggacgatgcttttaaggttgcgattctccgcccgcccatgatctacggcaagggctgcaagggcaattacgtgaccctggcgaagctggcgaaaaagctgccggtttttccctatgtcgcaaaccagcgctccatgctgtatatcgagaatctgacggagttcgtccggctgctcattgacgacgaggccgcgggcattttctgcccccagaacaacgaatacaccaacaccagcgacatggtcaactggattgcccacgcaaacggaaagggcatcctgatggtgaagggctttacctgggcgctgaagctgctgcggttttgttcgcccgcggtggacaaggcttttggcagcctgtgctacgattatacgctgagcgcatacagccgggactactgcgtgaaaactttggagcagtctattctggaaacggaaaaacctgatttttaggaagcgaaagagggcggatggtttgaaaaagaaacgggatatcctgtttttgtgccagtttttttatcccgaatatatttcctccgcccagctgccctatgatacggtgctggcgcttcgggacgccgggttctccgtgggcgcgctgtgcggctacccacgggaatacgccgagggcgggaaggttcccacgaaggaagatgcgaacggcatccgcattcaccgcctgaagtacatccagacaggccggtcgggcttcctcggccggatcgtcaactatttttcctttacctttcatgtgctgctgcatctgccggagatcgcaaaataccgggcggtggtggtgtattccaacccgccgattctgccctggattgcctcctgggcaaaatcgctgtttggcacgaagctggtgtttgtgtcctacgacctctatccggaggtggccacggtgacgaacaccctcagggaaggcagcgtgatctgcaggctgatgaaccacatcaacaagtgcgtgttccgccgggcagaccgggtggtggcgctgtcgtcggagcagcgagactgcattctccgaacccgagacgccgccgacgagcttgtgacggtgattcccaactggtaccgggacgagggcggtctgcgtgaccgggaggaaaaccggttccgggagttggcggcgggacggttcgtggcgtcctatttcgggaacatgggtaccatgcaggatatggacaccatcctgggcgccatccgggcgctgggggaggagaaggatattttctttctctttgccgggcacggcaataaaatggagaagctgcgggagatcattgccagcgagggcattgaaaatgtccggattttcagctttcttcacggtcaggattttcaggacgcgctggcggtgagcgactgcgcgctggtttctctggaaaagggcgccacggggctttgcgttcccagcaagacctacagctacatgatgcagggcatccccctgcttgctattatggacgagtgcgacatcgtccgggatattcagtccggcgcggggctttgggtgcgcaacggcgaaagccagcgcctggccggggcggtccgcttcctgcgggacaacccggagaaagcccgggacatgcgcagaaaatgccgggagctgtatctgcaaaagtataccaccgaaatttgcacggggaaatatgtatctcttttccgggaacttctacacccggaaacaggggaggagaatagaatatgagtatttttgccaacaaaacgctgatgatcacaggcggcaccggttccttcggaaacgcggtgctgaaccgctttctggatacggacatccaggaaatccggattttctcgcgggacgagaaaaagcaggacgacatgcgccatgaattccaggcgaaaatgccggaggcggcggggaagatcaagttcttcatcggcgacgtccgtgaccttgcttccgtgaagaacgccatgcatggcgtcgattacatcttccatgctgccgccctcaagcaggtgccgtcctgcgagtttttccccatggaggcggtgaaaaccaacgtcttcggaaccgacaatgtgctgaccgccgccattgacgcgggggtcaaggccgtcatctgcctgtccacggacaaggccgcctaccccgtcaacgccatgggtacctccaaggccatgatggagaaggtcattgttgccaaatcccggacggtttctccggaaaagaccaaaatctgctgcacccgctacggaaacgtcatgtgctcccggggcagtgtcatcccgctgtggattgaccagatcaaggcgggcaaccccatcaccatcaccgagccgaacatgacccggttcatcatgtctctggaagaagcggtggacttggtgctgtttgctttccggaacggcatcagcggggacattctggtgcagaaggccccggcgtgtaccattgagaccctggcaaaagccgtcaccggcctgtttgcccccggccacgagatcaaggtcatcggcatccgtcacggcgaaaaaatgtacgagacgctgctgaccaacgaggaatgcgcccacgccattgacctgggcaatttctaccgcgtcccctgcgacaagcgggacctgaactacgacaaatacttcaaggacggcgacacccagcgcaacgtcctaacggagttcaacagcaacaacacggagctgctgaacgtagagcaggtgcagcagaagcttttgagcctgagatacatccgggaagagctggaagccatgaagaacaagtaacggaaaggtgagctggcatgaacattctgattaccggcgcggccggatttgtgggcaaaaacctgacggcggcgctggagtgcatccgggacggccgggacaagacccatccggggcttggggtgggggagctgtacctctacgacatcgactctgacccggcgcttctggaaacggcctgccaaaaggcggactttgtgttcaacctcgccggcgtcaaccgccccaagaatcaggaagagttcatgcagggaaatttcggcttcgcctccacgctgctggacacgctgaaaaagcaccgtaacacctgccccgtgatgctgtcgtcctccattcaggcgaccatggtggggcgctatgcgggcagcgagtacggcaagagcaagaaggcgggggaggagctgtttttctcctacgccgccgagaccggggcgaaggtgctggtgtaccgcttcccaaacctgttcggaaaatggtgccgccccaactacaattctgccgtggccaccttctgccacaactatgcccacgacctgcccatcacggtgaacgaccccggcgtagagctggagctgctgtacatcgacgatctggtggacgagatgatcgcagcgctggagggcagagagcatcactgcgaatttgagggcgtggacacggttctgacggcgtccgggcgctactgcgccgcgcccgtcacccaccgggcgaccctggggcagattgtcgcgctgctggacagcttcaaggcgcagccccagacccttctgatgccggaaatcccggcgggcagcttcgggaaaaagctgtattccacgtatctatcctacctgcccagggaaaaggcggcgttccccctgaaaatgaacgttgacgcccggggcagcttcacggagctgctgaaaacggcgaactgcggccagttcagcgtgaacatcagccgtcccggcgtgaccaagggacagcactggcacaacaccaagtgggaatttttcatcgtggtgtccggccacggcctgattcagcagcggagggtcggcaccgaggaagtgctgaatttcgaggttttcggggaaaaaatcgaggccgtgcacatgctgccgggttatacccacaacattatcaacctgagtgaaacggaagacttggtgacgctcatgtgggcaaacgagtgctttgacccgaaaaagccggatacattctttgaggtggtttgacatggaaatgaagctggactattccgacgtggcgttccgcaatgacggaaaattgaagctgctgatcattgtaggcacccgcccggagatcatccgtctggcggcggtcatcaacaagtgccgcaaatattttgactgtattctcgctcacacggggcagaattacgattataacctgaacgggattttcttccgggatttgggacttgccgacccggatgtgtatatgaacgcggtaggcgacgacctgggcgccaccgttggcaacatcatcaactgcgcctacaagctgatgacggccattcagccggacgccatgctgattctgggggacaccaattcctgcctgtccgccattgcggccaagcggctgcacattcccattttccacatggaggcgggaaaccgctgcaaggacgagtgcctgccggaggagaccaaccgccggatcgtggacatcatctccgacgtgaatctggcttactccgagcacgcgagaagatacctccacgagtgcggtctgcccaaggagcgcacctacgttaccggctcgcccatggcggaggtgctccacgccaacttaaacgccatcgagacctccgacatccaccggcggctgggtctgaccaagggggagtacattctgctctccgcccaccgggaggagaatatcgacacggaaaagaacttcctgtccctgttttgcgccgtcaacgccatggcggaaaagtatgatatgcccattctgtattcctgccatccccgctccaagaagcggctggaggccacgggatttattctggacagccgggtgattcagcacgagccgctgggcttccacgattacaactgcctgcaaatgaacgccttcgcggtggtgtccgattccgggacgctgccggaggaagccagcttcttcacctccgtggggcatcccttcccggcggtgtgtatccgcacgtccacggagcgccccgaggcgctggacaagggctgcttcattctggcgggcattgacgaaaagaatcttctgcaagcggtggacactgccgttcagatgaaccgggacggcgacctggggattcccgtgccggactatgtggaggaaaacgtgtccaccaaggtggtcaagatcatccagtcctacaccggcgtggtggataagatggtctggcggaaatcgtaaggagccaggtgtcgacaaattgtgctgttttcttcagatatgataaaacagccaaataatttcacaacatcgggaggcgagacgcatgaaatacctgttcatcaactccgttgccggttttggcagcacggggcgcatcgcggcggagcaatgccgggggcggatggcgcaggggcatgagtgcgtgctcgcctttggccgtgaagaggcaaattgcggcgacattcccacggtgcgcatcggaacgcccctggattttcggctccacggggccaaaagccgtctgctggacgattccggcttcggttcccgggcggcgacccggcggtttcttgcctgggtcagggagtacgacccggatgtgatctggctgcataatgttcatggctattacattcacttaggagagctgtttgcttacctgcgcggctgcgggaagcccattttctggacgcttcacgactgctggagcttcacggggcactgcgcctattttgactatgtaggctgcgaccggtggaaaaccggctgccacgactgcccacagaagcacgcctaccccgcaagcatcctgctggacaacagccggaaaaattatgaaaaaaagcgggcgctgtttaccggcatccccaatgtgacattgatcgttccctcccactggctggaaagccgggtgaaggagagctttctgaaggactacccggtgaaggtggtatacaacacggtgaaccgggagattttcaagccaacccccggcaacttccgggaaaaatacggtttggaaaacaaaatcatccttctgggcgtggccagcgtctgggacgagcgcaagggactgcgggactttctggcgcttcacgaccttttggacgagcgatacgccatcgtgctgatcggcctgagcgcaaagcagattcagtccctcccggcggggattctggggctgccccgcaccaacagcgtccaggagctggcgcaggcctacaccgccgccgacgtgtttctcaaccccagcacggaggagaccttcggcatgaccgtgctggaagcccggtgctgcggcacggaagcggtggtttatcaggggactgcctgcgaggaggtcgtcagccggttcgggggcgtcgccgtaccaaggggcgcggcgcatctgctggaagccgtggaacagatcacaaaggagaatcgcaaatgacccattatcccttcccggacagccgtgggacaaaaattgccttcgccgcgtttttcacggctatgcttttcttggcccgggacagtatgttcaccacggcggtgatcggctttgaaaaggcgcagttcctcatgctgggcgtgatctgcctgctgggcgcggcctttctgatcgtcaaccggagaaatctgccccaaatcctgaaagaccgacggatgatcgtcgccggaatcgcggcggcggtgcttctgctgcccatgctggtgaagcgggactggcagctgatgtatttcagcgtcctgctgtgcctgctcacggcggtgcttttgtcctattgcctcacggtacgggaagcggccaagtattacgtggcgattttgtccctgctgggggcatattccgtgctggcggcgtacattctgcgcatcggcgtggacaagggcgcttacgcggtgccggtgttccaaaattccatgggttttgaatttcacaatttctttttgtccattgtcccggatacgtacgtgaaaaaccggaatttcggcattttccgggagccgggggtttatcagtttttcctgatcacggcgctgtatctgaacaattacgaggtggagtggaaaaagccgtggcagctttgggttgtcaacggcattctggctgtgacgatggtgtccaccttcgccaccggcggtgtcgcggagatggggctgctggcggtcgtgctgtttttcgacaaaaaatggtatcgggacaagcggatatgcgccgtggcggtgggactggttctgtgcgccgccgtggtaacgggggtttccattgcccggaaaaacgccctttattgggaaatctacgacatggccatcggcaaatttgccaacgggcgggattcctcggtggagcggatggatgccatcatgacggatatttccattttcctgcaccatcccattttcggcgcgaagatagcgcaggtgctgtatgccaccgccaacaataccacctccacgctgattcttttctccgccttcgggcttccggcggcgctgctgcacattgtctgctgggtcgcgctggtgtggcggaaggagcggaagatatgggtgaatctggcgctggtcgtcatcctgtttctgtcttttaacacacagaatcttattgcggacgtgtttttatggctgttcccggtcatggcactggtggaacggggattgccgcttatctggaaggagtgatcacatggagcgggaactgctgagaaaggttcagctgacccagctggaaattgcgaaggaaattcgccgggtgtgcgaggaaaacgacatcccctattttctcacctgcggcacccttctgggcgcggtgcgtcatcaggggttcatcccctgggacgacgatatggacgtgggaatgctgcgggagaattatgagaagttctgccgcatcgccccggaaaagctgaaaccggaatactgctggcagacctggtacaccgaccccaactacgccctgcccttcggcaaggtgcgcaagcgcggcacgctgtatctggaagctaaatctcacagattagcggaaaacggcttctatgtggacattttcccctacgacgtcgtgtccccggaggcggaaaaacggcaggaaacggcaagccgtctgctgaagatttaccggacaaagctgatgaaatcccattatcagccctggcgggagaatgagaaaatcctctggaaaaagcggattggctacctatactatcaggcgctggcgctgttttctgaccaggaaagccttgcaaaggcgtatgacacgctggcgacggcattgccggaaaacggctatgtctgcgagcagagcgccatgacgaagccggacgcctacgagaaagcgtggtgtcaggcattgacggatgtcgtttttgaaggggaaaccttcaaagccccggcggaatacgacaaattcctgaccacgctgtacggcgactatatgcagctcccgccggaaaatgagcgggaaaaccgccatcagatcatgcggatcgatttcggcgattgacattgagaggttacaacggtatgaaacgagtgctgttcctgacgaactacgcttccccctaccgggttcatttttacgatgagctggcaaagagcatggacgtgacggtgctgttcaccgaccgggtggaagaccagaaaaaccgcagtgccgattggttcgtttccggtggcggcgcttaccgcccggtgcagctgaagcggtgtgttgcccatcttctggacgaaaatctgtgcctggacgtgaccgggtggctgaaaaagccctacgacgccatcgtaatctgcggctattcctcgcccacggcgattctcgcgatgcggtggctgcgcagaaggaaaattcccttctacatggaagtggacggcggactgattcgccaggagcggaggataaagtatctgttcaagaagtcgctggtgcgcaaggcggaccagtggctcagctcggggcggtacaccacggaatttctcgtccactacggggcagagaaaagccgcatccatgtttaccccttctcctccgtgtttgaaaaggatattctccccgccgtcccatctgccgccgaaaagcaggcgctgaaggatgaactgggcgtcccggagaaacggatggtgctggccatcggtcagtttatccggagaaagggcttcgacatcctgatgcacgccgcctgttcgcttaacaaggacgtggggatttatattgtcggcggcgaaccgacggaagagtatttgcagatgcgcgcctctctggggctggacaatgtccattttgtggggttccagaaaaaggaagccctcagccggtattatcgagccgcggacttgtttgtcctgcccacccgggaggacatctgggggctggtcatcaacgaggcgatggcctacggcctgccggttatcaccaccgaccggtgcgtcgccggtctggagctggtggaggagggcgtcaacggaagtatcgtgcctgtggaggacgctgccgcccttgccggaaagatgaaggagcttctgtcctcggatttggagaaaatggggacggcttccttgaaaaaaatccgcgcctacaccattgagaacatggcgaaagcccacgttgcaatttttgaaaaagatgggggttaacccatgcacatcatttacgctgtgacgacctgttccgaccgggtgtaccgtcagctgtttgcggacgccccccggaagcccgcctttcagtctcagaaataccaccgcctgctcattgaaggacttgccgccggggcaaaggtggatgtggtggcgaacccgccggtgaaccgggaggttctgaaaaaagccttcgtccgtctgccccgggagaccgagggcggcgcgtgctaccgctacattcccgccgtccggaatcccgttgtcaaggccgtatttgtgggcgtgggaacctttttccgcacagcgtgccttgcggggaaggattctgcggtggtggtggactgcttgaacaggacaacggcgctggccggtctgctggcggcgaagctgcggggaagacggtgtgtgggcattgtgacggatttgccggatatgctggggggcagcgccttttccaaaaagctttccaattttgttatccgtcactgcacggactatgtgctgctgacccaggccatgaacgactatctgaacccggagggcaagccccatgtgattctggaggggcacagcgacatcgccatggcgcggcaaaagccctccctggcgcgaaaggccagtccccgggtgtgcatgtacgccgggggcgtcagcaaacagtatggcctggaaaatctggtgaagggcttccggaaggcagatttgccggacgcccggctggaaatttacggccccggggattacgtgcaggagctttcccgaatcgccgcggaggattcccggattttctacggcgggatgctgctgaacgcggaaattgtggagcgggagatggcggcgacgctgctggtcaaccccaggccgacgggggaagaatacgtgaaatactccttcccctccaagaccatggaatacatgtccacgggaaccccggtgctgaccacggttctgccgggaatgccgaaggaatatcacccctacgtgtacctgttggaggaagaaaccgccgacgccattgcggagaagctggggggaatttttgcccagcccgccgatgtcctgtttgaaaagggcatggcagcccgggaatttatcctgaaagaaaaaaacaatgtttcgcaggccgggaaaattctggccatgcttaaaaaggacgggatgcaatgaagctgctgtggctgtgcaatatggtgcccggaaaggtgaaggaggctgtcagcggcggctccaccggcggcgggctgtgggttgacagcgtgctggaagggctgctggaacgggaagacctgaacatccgcattctctgccccggcgacggcggcgaggggcgcgtgagtgaacgatgctcctacgccttctattctgagggacttccctatgtgtacctgacggagctggaagcacagttccggggagagctggatagcttccagccggacgtgattcacgtctgggggacggagtatggccacacccttgccatggtcaacgccgcgggaatggcggggcggctggataagctggtggtcagcattcaggggctttgctcggtttatgcaggacactacgccgagggcgtgccggagaggattcagcggggcagcaccttccgcgaccttatccggtgggacaatatcgtgaagcagcgggaaaagtttgtgcttcggggggttctggaggtggaagccctgcaaaaggcgcgtcacatcatcggaaggaccgactgggatttggcctgtgtccggcagattaaccccaaagcggaataccatttctgcaacgagaccctgcgtcagcccttttatcagggggcttggcgctatgacggctgtcggaagcaccggatttttgcttccagctgcgcttaccccgtgaaaggctttcactatctgctggaagccttcggccagatcgtcaaaacctatccggacgccacgctggccgtgccggggaagagcttcctgacggcgagcaagctccgcagaaccaactaccagaaatatctggcggcgctggcggggcggtacggtgtggaggataagatcgaatttctgggcagtctcagcgccgaggaaatgaagcaggcgtttctggacgcgaacgtgttcgtgctgccctccaccatcgaaaattcccccaattccctgggggaggccatgctgctgggggtaccctgcgtggcggcggacgtgggcggcgtgacgaccatgctgcgccacgggctggaaggggaggtctacccctccgccgcgccctatatgctggcgttctacgtggaaaccatttttgcccggggagaagcggccgaagccatgggcgcggcggcccgcacccacgccggtgtgacccacgacccggaaaagaatctggcggatttgctggaaatttataaaagccttgctacagaagggtgagaaagggaggaatgcggcatgaatcagagcccgcgaatcagcgtcattgttccggtgtacaatgtggagcagtaccttccccggtgcgtggaatccattctggcgcagacctatgagaatctggaaatccttctggtggatgacggcaccaaggacaattgcggcgccatctgcgacgcctacgcctggcaggacgaaagagtcaaggcgattcacaagaaaaacggcggcctgagcagcgcccggaacgccggaattgacgcatcgacgggggaatacctttccttcgtggacagcgacgactggattgagccggatatgtatgaaaaaatgatggcgctgacggaaaaatacggcgtccgtctggtctgcgcagggcgctgggacgtcagcagcgagaccggggagaagacgttggggctgtgtccgcccagtgaggaggtcatctccggggaagaactggtgcgccggatcttccactgggaaaacatcgactctgccgcctgggacaagctgtaccatagaagtcttttcgcgtccatccgctatcccctgggggtgatctgcgaggacgtccccactacctaccgcgttgcgctggacgccgggcaggcggccatgctgccctgccccgtttacaattattatcaccggccggggagcatcacctcatcctcggtttcggagaaaaccttccatttttccaaacatactgaggaaatctacccgtttataagggacaattatccggaaattgcggacacggcgcggtatctgcgggtgcgttccctcgcctacaatctgctgacgctggacttggcggacaaggacgcccgacagaaattcgcagaggaataccgcctgtcccggaaggcgcttcgcaggcatgtttcctttttactgaccagtccgctgtttggcaggcaggagcgggcgacggatttgctgctggcagccggactgtaccgtccactgcggaggctttaccacggagtgcgccctgggaaaacggatacaaaaagcgcggagtgagctatgaatcgacgaaaccgggttgctttttttaatattctgagcaccgttctgctcaggggcatttccatattcacagcgcccctgtttacccgcctgctgggaaccggcggctacggcgttacccagatctacaacacctgggtggcggtgatcgccatcgtgttcacgctgcaaacccagggtacgctggtcaacgcccgggtggagtacccggagggcgaccagctgcgctaccagtcctcggccatgagcctgtccacgctggtgtatctgattttcagcgctttggtgctgtgctttatcggccccatttccggggcgctgaagctgagctggttcttgatcgtgctgatgctcattcagggcttcggcaccttctgcgtcaacttcctgaacaccaaattcgtctacgaattcaaggcagggcggaatatggtcatgtccctggtggtgacgctgaccactttgatcctctccgtcgtgctgatcctgctgctgcccaagcagattaactacttaggccgcatttccgccattgccgtgacctacggcgtgctgggcattccggtgtgcgtctggattctggcgaaggggaagaccttttacaacaaggaatattggaaattctgtattgttcttgccattccggtggtattttacaacctttccgacctgattctggggcagagcgacaaggtgatgctccagcagatgatggacgcgtccacggtgggctgctacggcgcggcgctgaatttcggcggcatcatgttcaccctgttcaccgccctgaacaatgcctggtgtcccttcttcttcgaggacatgaagcagggcaaccgggagaacctgcgggacaaggcggggaatttcctggagctgttcacggtgctttccgtgggcttcgtgctgctggccagcgaagtgtaccgctatgtctatgtttccagggatttctggggaagcaccatgctcattcccattttcgtgtccagctactacaccaatttcctgtgtaccttcccggtgaatttcgagtattaccacaaaaagaccaaggtcgtctccatcattaccattgtgtcgtcactggtgaatgtggggctgaactatctgctgattctgcgcatcggcatggccggggcggcggtggcgacgctgatttcccacagcttgcagctgacgctgcactacctgtacgtccgtttcgtcctgggcggaaaagaataccccttcccgctgaaaatgtggggaggctacgcggtggtgttcgccgctgtggccgtggcatccgtggcggcggatggactgtggccggcgcgctgggggttgggcgcggccatcggagcgtgggagcttctgcggatcagaaagcggaaagtgctcatttgagagtgaaatatggaaaggccgggcttgctgtccggccttttttcgcgcttgcggttgcaataaagcggtggatggtgtataatactctcaccattatgtccgaaaagaggaattggaatgaaaaaggtgctgttcgtggcaacggtggtcaaaacccacattatggaattccatattccctatctgaaaatgtttcaggacatgggctgggagactgccgtggcggcgcggaacgactatgaagaccccgccgactgccacattccccattgcgatcgatactatgatatcgcctttgagcgtctcccctggaagaaagccaatatcaaagcttaccgggagctgaaggccatcatcgaccgggagcatttcgacatcattcactgccatacccccatgggcgccatgatcgcccgtctggcggcgcggaacgcccggaagcggggaaccaaggtgatctacaccgcccacggcttccactttttcaagggcgcacccctgatgaactggctgatgttctacccggcggaatggctgctggcaccgctgacggacgtcctcgtgaccattaacaaagaggactatgccttcgcgaagaagaaaatccgtgcgaagcgtattgaatacgtccccggcgtgggggtggacacggcaaaattccacgtcggcaccgtagatcggggagaaaagcgccgggagctggggctgaccgaggaggattttctgatcctcaccgtggcggaaatgacaaaaaacaagaaccactccacggtgctgaaagcactggcactgctgaaaaacgaaccgggatatgagagcatgcactatcttatctgcggccggggagagcagcgggacgcgctggaagaagaagcgcggcagctgggcatctgggagcatgtccactttcttggctatcgccacgacgtgccggagctgtgccggtgcagcgacatattcgcgtttatgtccttccgggagggaatgccggtggcgctgatggaggccatgagcagcggtctgcctgcggtctgctccagaatccggggcaacaccgacctgattgaggatggcgtggacggcctgtttgcggaaaacacgccggaaggtgtggcggcggccatcctaaggctgtaccatgacccggcgctgcggggaaaattgggacgcgccgcggcgcagacggtttcccggtttgacgcgaaagcggtacagcagaaaatgaaggaaatttacttaagcgtatgaacggaagggggcggcggcatggccggaacgctgatcgtatcgctggattttgagctgttttggggaatgctggacgtatgcccgctggaaaaataccaggatcacgttctgggcggcagaaaggcgattcccgagctgctggcgctgtttcagaaatacggcatccacgctacgtgggcgacggtgggatatctgttcgccgggagcgcacaggaagcggcctcgtttttcccggaggaagccctgcggccgacctacgacgacccggcgctgaattcctatgccgaattctccaaaatcggagaaacggatgcgccctgcttttttgccccgtccctggtggatttggtcgccaaaacgccgggacaggagatcggcagccacaccttttcccattactactgcaaggaaaaggggcagacggcggcgcaattcgcggcggatatgaccgcggcgaaggccattgccgcgaaacacggccataccctgacctctgcggtgctgccccggaaccagtgcgacccggcgtacatccgggtgctgcgggatttgggcttcaccgcctaccggggcatggaaaacaactgggtggaaaataaggttcacgtccgtttccccctgcgcattctgcggctgacggacacctatttccccatcaccgggtacggaagctgcacgccggaacaggaggacggcatctggaacctgcgggggacccagatgttccggccgatttttaagccgctgaaattcatggagggcttaaaggttcacaggatcaagcgccggatgctctacgcggcgaaaaacggcctgaccttccatctgtggtggcatccccacaacatcggtgtccgcacggcggagcatatggcgcagctggaggaaatcttccgctattacgccgagctgaaggaaaaatacggcatggaaagccggaatatgcgggaagcaacggaaaaataagagagatgggggcggagacatgaaggtactgcacgttctgtattccaaaatttacaccggcgcggaaaaggttgccgcccagatcatcaaagcttttgagggtaaggtggacatggcctattgcagtctggaatgcgaagaggtctgggatatcttagacggtatgggcatccggcattacggcgtggaggagttgacccctgcgactctcagccgggtaattcgggagtaccggccggacgtgattcacgcccacgacatgcgcaccagcttcgtcgcggcgctgtgctgcggcaaaatccccctgatctcccacatccacaacaacgcctatgacgcaagagggctgtctgcgaagtccatcgcttatctgctggcaggcttccgggcgaagcatattttctgggtctccaacagcgcctacgagggatatgtgtttcacaagctgttcgccaaaaagagcagcgtgctgtacaacatcatcgacgccaagcggattttcgctatgcgggacggcgacgaaaatacctacgattttgacatgatctacctgggacggctaacctaccagaaagacccccagcgcctgatgcgcctgagcgccgcactgaaagcgcgcaagccggacattcaggtggcggtggtcggcgcgggggagctggaaggggagacaaaagcactgtgcgaggaactgggattgcaggacaacgtgcatttcctgggctttcagagtaaccccatcaaaatggtggcggacagcaaggcgatgatcctgacctcccgctgggagggaacgcccatgtgcgcattggaagccatggcgctgggaacgccggtggtcagcaccccgtccgacgggatgaaggatctgatcgaaaacggcgtggacgggtaccttagcgacgaggacgccgtgctggcggaggacattctgaaaatcgtggaagatcctgaccatagacggcttctctccgaaaacgcggcgaagaaattcgccaaaatcaacgacgaagaaaaatacaacgacaccattctcgcctgttaccgccaatggggaggaacgctatgaaactattgcaggtcatcccctatttctgctttggcggggcggaaactatgtgtgaaaatctgacttacgccctgagggagctggggcacgacgtggtcgtggtgagcctgtttgatgagcggacggagatttcctaccgcatggaggcggcgggcgtccgtatccggtacctgggcaaaaagccggggctggatatgtccgtggtgccgaagcttacgaaaattttccgggaggaacgcccggatgtggttcacacccacctgaacgtgattctgtacgcggtaatggcggcaagattggcggggggcattccctgcgtccacacggtgcacaacgtagccaaggtggaagcggaggggactgctcaggccattctcaaccggttttactaccaccggggctggtccgtgccggtggcgctcagcccggaggttcagcggacggtgacggagttttacggccttggccgcgttcccgtgattttcaacggcgtgaatctccgccggtgcattcccaagagggcgtatgggctgggggatactgtttccctgctgcacatcggccggtttgacgagcagaaaaatcacgcagggctgctgcaagcctttgcaaagctcctgaaaacccaccccaactgctgcctgaaccttttgggggacgggcatttgcggacggaaatggaaaattacgcccgggaactgggcatcggccatgccgtccgtttcctgggaaatcagccggacgtttaccccttcctccatgacgcggacatattcttgctcccgtctaagtatgagggaatgcccatgaccatcatcgaggccatggggacgggactgcccatcgtggcgtccaaagtcggcggtgtgccggatatgctccgagatggggaaagcggactgctgacgggctgcgaccccgacgaggtgtgcgcggcctgtgaaaggctgaccgacagcgaggacttgcgcagaacccttgggcagaacgcactggcggacagcgcccggttttccgcggagaccatggcgaaacgatactgcgaagaatatgagcgcttaacagcgaaaaaataaggaggaagcaaaatggagggcgaaaccatctcggtcatcataccggcgtataatgtcgctccatggcttccccgatgcctagacagcattctggcgcagacctatccgaagctggaaatcattgtggtggacgacggctccgctgacagtacccggcaggtgatggaaagctacgctgcccgggacgggcgcatcaaaccgattttcaaggaaaacggcggcgtgacctctgcccgccttgcaggcgtggcggcggccacgggggaatgggtcggcttcgccgacggcgacgacgccatagacccggatatgtactgccatcttctggaaaacgcccacacttatgacgcggacatttcccactgcggacaccgggtggagtttcccgacggccgggtggcctatgtccacaataccggcgggctgcggcagcaggacaatctgaccggcctgcgggatttgctggacggcggacagattgagtccagcctgtgtaccaagctgtaccgccgggagctgttcgccggactggcggaacggatgaatcccgccatcaagaacaacgaagactacctcatgaattactttctgttctcccgggcaaaacggtcggtatatgaggatttctgcccctaccgctatattttgcgggaaaattccgcctccttccggcagctgaacgagcacagcctgttcgaccccatccgggttcgggagctgatcgtggaggacagcggcagtgaaatccgggaggacgcccgccgggcgctgatgcggaatctcctgtttgcctacgcccagctctccgtgcatccggagaagcggtatgacgaatggcgccggcgggttcgcgccgagatggaggagcaggaagggtatttccatttgctgtcaaagcgaaaccggctgctggcaaaaatggtttgcaggacgccggggctgtttgggttgacttacagactgtacgagaagctcttccgacgggaagaggaacactgagaggatacactatgacgcagctgccattgatcagcgtgattgttcctgtctataaagtggaaaactatctggactgctgtgtccaatccatcgtgaatcagacctattccaacctggaaattcttctgatcgacgacggttccccggatgccagcggcgccatgtgcgacacctgggcagaaaaagacagccgcatccgggtgattcatcaggaaaacgccggaggcggcgcagccagaaatgccggactggatgcggcgcggggagaacgaattgcgttcgtggacagcgacgactatatcgcccctgactgttaccaatatctgcacacgcttctggaagaaggggcggatatcgccgaatgtgatttcgtggagacggagcgtaacgacgctgttttcggcacggatgccggagagatttccttctatacacccctggaagccatgcgctgccacattcgggatacggcgtttcgccagctgatctggaacaagctgtaccgccgggaaaccgtcggggatatccggttcccgattgggacgaaaatcgatgatgaatttttcacctatcgggtgctgggaaacgcgaagcggctggttcgctccaccagaaagctctatgcctaccgtcagcagccggacagcgttatgcacggcggcttttcgctgcgcagactggagggcgttcaggcacaggagcagcggctggcgtatctgaaaacgcatatgccgtcgctggaatatgagggcagggcaaatctgttcctatattgccagtatgcaatgcaaatgagtattcagtacctgtccggagaggagctgcgtcaggcaaaggaaagcctgcggaagacggtttccgggctgacgccgcttttgcccagcagaaagctgtcgcctgccgggaatgtgtggctggttctgggacagctgtcctttgaaggcagctgccgcctgatgaattgcttggagcgcagaaacgggaaaggaagcgaatgaaatggcgttttctcataaaataacggtcttcaccccaacttacaaccgggcgtacatattggaaaacctctaccgctccctacagcgtcagagcttcacggactttgaatggctggtggtggacgacggctcttccgacgggacaaaggcgctgtttgaacggtggcagaaggaagacaatccctttcctatccgctactgctataaggaaaacggcggcaagtgccgtgccatcaactacggtctgaagctggcgcagggagaactgtttttcacagtggattccgacgactacctgacggacgatgccctggaaaaggtcaaccgctgggaagcggcgcttccgaaagatcagaaattctgcggcatcgtggcaaacagaggacacagtcccaccgaaacgcccaacacccgatttgaggaagcgtatctggacggcaacgcctttgatatgtacggcagaatcgacggagagcgggcgctgatcttctatacggaaatccacagaaactacctgtatccggaatttcccggagaaaaattcatgaccgaagcggtgacctggaaccggatggcctacgacggctaccgtattcgctactacgacgacattatctggatctgggagtacaaggacgacggcctgaccaaggcggggtacaaggtttttctggacaacccccggggaacggcgctgttcttccgggagaaggcggtgttcttccactatcccctgaaaaccaagctgggcatgtggtacggcttcacctgcgacgctatggatcgctgtaccgacgcccagattgcggaatatatcgatatgccccgctggctggttgcgccaatgaagacattccacaacctgctgcaatttatccgaaaaaagaggtaatcctatggcagagaattccatgtatcacacccatatctcggcaaagcaccgctggctggatctgaacctgaaagaggtctggcagtaccgggacttaatctacctgttcaccaaacggaatttcgtggtgagctacaagcagaccatccttggtcccgcgtggatattcctgacgcccctgtttaccagtatcgtccaggcctttgtcttcggcggcattgccggcatcggcaccgacgggattcccacgttcctgttttacctgtgcagcaacgccgtctgggcgtattttgccaactgcctgaccagcaacgccaacacctttacggccaacgcctatatgtttggcaaggtctatttcccacggctgaccacacccatctccaatgtcatctccacggtcatccgcttcggcattcagatggtgctggtgctgctgtttatggtgtactatctctttcaggggacgctccatccccactggctgtggtggctgatgattcccgtggagctggtgcatctgggcattctgggcatgggcttcggcatcatcgtttccagcatgaccacgaaataccgggatctgacggtgctggtggatttcggcgtgtcactgtggatgtatgccacaccggttgtgtaccccctgtccatgctgggggagggctggatgcgcacgctgctgcaaatcaaccccgtcaccgagtccgtggagctgatgcgctacgcaatcctgggtcagggaacggtgaactggggcttctatttcctgtcctgggggatgacgctggtgatcgccgtgctggggattatggttttcaacaaggtggaacgcacctttatggatacggtgtaaggagggcggactatgaacgaacaggatattgccatccgcctgaccggcgtaaaaaagcgctacaagctggggcagatcggcggcggcacgctgaccgcggatttgcagagctggtgggcgcgcttaaggggaaaagaggaccccaatctgcccgtgaatatggatcagcgtctggtggggaaaacctttatggcgctgaacggcgttgacctgacggtacacaagggtgaggcgctggggatcatcggctgcaacggcgcgggaaaaagcacgctattaaagcttctgtgccgcgtcactgcccccaccgagggcgaaattgacatctacggccgtatcgcctccatgctggaggtgggaaccgggttcaacggggaaatgaccggccgggaaaatatctacatgaacggcgcaatcctgggcatgaccaaggcggagatcgacgccaaaatagaggatatcattgaattttccgaggtgcgggatttcatcgacaccccggtgaagcggtattcctccggcatgttcgtcaagctggccttctccgttgccgcgcacctggacagcgagatcatgatcatggacgaggttctggcggtgggcgacatggcgttccagaagaagtgtctggacaaaatgcgtcaggccgccaagcaggagggcaggacggttctgtacgtcagccacaacatgaacaccatccgccgcctgtgcgaccggtgcgttgtgttggataagggaaggattatctttgacggggatgtggaggaagccattgagctgtatatgcgcaaggaaaacgtgcgcaatgagtggacggagggacagatagagtgtgattacatggatacctctgcccgatcgccctacggccgtggcggtgcaagaatccattatctccgactcccggataaggaagcggcactgtacgacacaggggagacaattcgtttccaagttttggtgcatacgcgtcaggcattttccaatttgcggttgcgtattgaggtgctgtgcggagatgatgttcctgtgggagcaattcccaacatgtcattgggagaactggaagccaatcgggactatgagtttgacgtggcattcgatcccattggtttgacggcgggacattaccgaattgacctggtattgtttgatatggatgaatttggcacggtttatgaccaggatctgattcttccggctttccgcatagaagtgatggaaaccgccgatattaactggaatgccaccaactggggacacatccgcttcccagatgcccgggtggacatagtgtaacgggggaagtaactgtgaaaaagatcaaagtagtctttgtaacccaccgactggtgtgcggcggcgcggaacaggcgttatttgacttgatctgtctgctagacaaggaaaaatttgacgtagtcctatttgaacagcgggatgacggcccctgggatcagaaattccgggatgccggtatcaacttggtatatgactatttttgccgaaaaccgaccataaaccctatcactaaggcagggaatgttgttaaaaagctgcggatggacaatgcttaccgcaatggcggtgaaggcctgctggatgtttgtgtcccgggagcagatattgttgtgtcctattccgtttgggaaaatgaaagactgatttttgctaagggggctaagacggtcaagtatattcacggggatgtggcgaccaaccgcatttaccgggaagagtccctatgcacgaaggatatgctggcacattatgatcgtattgtctgtgtgtccgaagcagcgcgacggtcgttctgtgcgcttacaggactgaaagataatgtagagatgcacctgaatccgttgaatagtgataatgttcgcgctatggcggagaaaaaggtggatttgcccacagacctccccgtgatctgcgccgttgggcgcttgtccgcagagaaggggtttgaacgcttggtctatatccaccgcagacttctggatcagggtatccggcacaggctggtgattgtgggcgacggcatggacagaggatatatcgagcgcaccattcaggccacggacacccaggataccgttattcttgccggttatcaggcaaacccctacccctatatgaagcagagcaaattcctggtgaattcttccttcacggaagggctgccggtgattgccatggaggcgttgtgcctgggagttcccattgtagcgcccgttccctctgttggagaagtcttcggcggtgaaacctgcggcctgatcacggaaaatgacaatgccagcctggaggcgggcatccggaaaatgctgacggacgaggaattttaccgtcaggccaaggccggggcagagagacgaagtgcgtttttcgacggaaaacgcatggtgaaggaggttgaggacatgtttctcgaccttgtcggaaaagagtaagaaaaaccggagggaatgccaatgccgcaaatcagtgtgattgtcccggtctaccgggcggaaaagtttttacaccgctgcgtggacagcgtccttgggcagacattccgggattttgagttgattctgctggatgacggaagcccggatggcagcggtgccatttgcgacgcatacgcagcccgggacagccgggtgcgggcaattcaccagggaaatgccggagtctgcgcggcgagaaatacctgcctggactgggtgctttctaacagtgacagccagtggattttcttcatcgacaacgacgactggatgcaccccgagacgttggagagcctgcatcgggcggcgctggaacaggggacgaagattgccgtttgcggctatgcgcagacggagggagaaaacccggcggtttccccggaacagcttacgctggagcggtggcttcccaaggatttttacatgcagcgctttgtcaacgccacggtctgctggggaaagctgtaccacaggagctgctttgacggggaacggtaccccgtgggcaagcatatggaggacgaatttctgacataccggctgctgtttgcccaggaagcactgacggtcattccggcaccgttgtatgcctattattttaaccccacgggcatcaccaagagcgcttggacacccaaacgcctggacgcctgggaagcctacgagcagcagatcgcgttttttgagcagcggggcgagtgggatttggtcaggttccggtatcgggggtatctggaaaacgcggtggtcaacgaggcggatgcccggcaggcgcaggacagcccggaggttctggaggcgcggaaacggattcatgcgaccatcaagaatttgctgaaacggatgagccggctgcactatctggaattctggccggattttgaacttttgctgcggtatttccccgtcagggcgagaatttaccggctgtatctggaaacgcgggcgcgattggagaggaagaaaaatgcctgagatcagcgtgattgtgccggtttataaggcggaagattatcttcatgcctgcgttgacagcatcctttcccagacggtttccgattttgagctgattctggtggacgacggcagcccggacggctgcggcgccatttgtgacgattatgcggcgcgggacagccgggtgcgggtcatccatcaggaaaatcaggggcaggccgcggcaagaaatcacgctttttctattgccaagggagaatgggtctgctttgtggacagcgacgatgccgtgcatccgcagatgctggagcgtctggggcaggccgccgcagagagcggcgcggccatgagcatgtgccggatgctggaagcgccggaaatgccggaggacttttccgcgccggtggaggtcagctgggagctgctttccatggaggaagcgccgctgacggcgctgtttgacgcgggagattatcccggatgggtggcctgcgccaagctgattcgccgggagctggttcggtcccatccgttctgccccggacgggtgtacgaggacaacgaggccgtgtgtcactggatttacggggcgaaaaccgttgcaagcattccctacagcctgtatttttaccgaaccaatcccggcagcaccacccagagccggttctccatgaagaaactggactatctgtgggcgctggaagggatcatccgcttttattcctcggtagggtacacgacccttagggagcgcttcggcaccctgtatgccgaagaagcggcgggggattaccaccgggtcaagtacgagctgaacgaccccaaggccgcccgggacattgaaaaggccgcccggcggctcaggcgggagatcccgtttacgaaagcgcagtttgagatcatgttcagcgccatgcacccaaagctaacgcggctttactggccgctggagggggcggcgcggacactgcgggaggacggcgtgtccggcctgatcaggaaggtcgggaagcacctgcggaaaggagaaaatggatgagcgttccgaaaatcattcattactgctggtttggcggaaatcccaagccaaagctggcggaaaggtgtatcaaaagttggaagaaattctgtccggactacaagatcatcgagtggaacgaggagaattttgacgtttccgccgcgccggagtatgtgcgtcaggcctacggggtcaagcgctgggcgttcgtcacggactatgtccggctgaaagcgctgacggaaatgggcggcatttacatggacacggacgtggagctggtgaagcccctgacgcccttcctcgcccacgacgcctttgccggatttgagtcagacgtcagcgtgcagacggggctgcttgcctgctgtccgggctttccgctgtttcaggaatttttgcagcattatgacagcgcgagctttataagacccgacggcacccacgacgtgaccaccaatgtctccgtcctgacgtccctgtgccgggcgcatgggctggtgccgaacggaaaatttcaggtggtggacggcttcgcggtctacccaaaggacgtgttctgcccggtggattttgacacggagcagctccacagaacgaaaaaaaccgccgccattcactggtttgccagcagctggaagacggaggaggagcgaagagagctggaagcggagcgggcgcgtctgcactatgaaaaggtgtccgccgcccggtatgcgttcttcacgaagctgctgggagagaagacctatcgcaatctgaaagcgcgtttctggaagcgctgaggggggaactgtatggccgcgatcagcgtaattgtcccgatctacaaggtggaggcgttcctgcaccggtgcgtggacagcattcttgcccagacattttcggattttgacctggtgctggtggacgacggaagcccggacagctgcggcgatatctgcgaggaatacgcccggaaagacggtcgaatccatgtcattcatcagaaaaacggcggcctttccgccgcccggaatacgggcatcgactgggcgcaggccaacagcggcagccagtggctggccttcgtggacagcgacgactgggtgcatccggatttcctgcggcggctgtacacgatggttcaggaaacggggtgcctgctcagtgcctgcggctatttccgcaccgggggcggggatttcccggatatgggtgcgactgaataccgcgttttgtcggcggacgactattactgtcccgacgaggccgaagaggatgtcccggcgatcgcgtgggacaagctgtaccataagagcctgtttgacgccctgcgctaccccgtgggaaagctgcacgaggatgagttcaccacctatcttgccgtgtaccgggcggaaaaggtggttgtgacacgggaagcgctgtatgcctactaccagaatcccgtgggcattatgctgtccaagtggacaccgagaaagctgcacattctggaagcaacggaaaatcagatcgccttcgcacgggaaaccgacaacctgcggctgctgaaaaaggcggtcaggcagtatatttacagcacatacgagcaaatcggctttgcaaagcagtgggacgacccgggcaggggacggctcctgaaaatcctgcggagaaagctccgggagggactcaggcagggaaagggctttgacctgtttccgctctgccgggagcgttcctggatgtatgaggaagcctacccggtcaagccgttctggtggctgtacggcaagcttcacaggggaggggagcgtcaggaatgaaggacgtgatttcggtcattgtgccggtatataacgtagcggcctatctgccggagtgtctggacagcattctgtcccaggactacgacaagctggaggtcattctaattgacgacggctccaccgacgattccggcgccatctgcgatgactatgcccggcgggacagccgcattcgggtcattcaccagaagaacggcggcgcggcggcggcgaaaaacgcgggactgcgggcagctacgggggaatacctgagcttcgcggacagcgacgattttctggagccgggggcatacgcctatatgctggcgcttctgaaggaaaacgacgcggatatcgtccggtgcgcgtttcagaaccggttccgcacccgcacggagcagtggctcgcaggcgaagaccggtgcgtgatggagggaaagacctttctggtacgcttcaccacggactggacctgcgggctcctgtggaacaagctgtataaacgggcgctttttgacggcattttctttgaagagggacacaagatcgacgacgaatatttcacctatcagggcgtcatgaacgccgccaaggtcgtctgcgacccgcgcgttgtgtataattaccgccagcgcgcgtccagcgtgatgcagtccccggcggccagggcgcagatcgccgttgaccggatcgacttcatggcgaagcgccgggaaaaggtgttgaaacgcttcccggagctgcggcgggagtttgacatcagctttgtggacgccctttcttatctggcaaagtacccggacaacacggagcagagcatccgcctgctgaaatattacgccagacgctatttcctgcaaaggggaaataccttcccgccgaggtatcttctgaaagcggtgtttctcatgtatgctaccggcacggaaaagctgctgaaacggtcgcaggcgaaaaagccgtcaccggaagattactatgcataacaggaatggaggaatgtgccttgaaaacggtaaaaatcaattatgcgtgcgagagcgatgacttcgatagggagcagaatctgatttacgacctactgaaaatcaatgggtatgacgtgcagatttccgacgacccggactatattatttgcgatgtagggggagcggaacggtacggatattgcaaatatccccagataaggatcatgtattccggcgaaaactacatcccggattttaatctgatcgactactccatttgcccgtacccgattcaatttggagaccggaatttccagcttccgccctgcgtatggccgcgagatcgatggctgagcatagtgaacaagcatcgggggggggtacacgaaagaatttgtacaaaataaacaactctttgcaaactttatatccagccatgagtcggaattcaacatccgcggcgatttcttcaagaagctgaatgaatacaggcgcgtggaatcggcagggacttacctgaacaacatgcccaacggtgaggtcgtaaattggctggacggcagcaaaacggcgctgcagagaaagtgcaaatttacactgtgctttgaaagcaccaaccactacggctttgttaccgagaaaatcatggatgccttctattcggacaccattcctgtgtattatggcagcccgacggtagccgaaatttttaataaaaatgcctttatcaacgtggcggactacccgtcctttgacgcggccattgaaaagatcaaggaacttgaccgggacgatgagaagtatctggaaatgctgagccagcccgtgctggttgacccgacgtatcctgagcggctggagcaggaactgggacagttcatttgccacatttttgaccagccgattgaacaggcttaccgccgcagccgggtgtacctgccccaacgggcaaatgattaccttgcccgagccgtggacgaagagacgctgacaatgaaaaatcttctaacgcgaatggcgaaaaagatcaggaaaaaagtgatcaggtaatgccattttctccccggaaatcgaaacatccccggtttgtacggacggtacaaaccggggatgttttacttgcgctgtcaggacagcctgacgaccaggcagtcgccgattttttgaatggagccgtggtagggatagacgggcatcgacgcgaattggggggaagaccggatctctgcggcttcctcatctgatgcgaaggtcagggaaaagcccagatagtattcgaggaacctttgccgggaatagctgtcggggcggataccggcgacgccggttagctcttgcaggaaggaaaacttttcgtagaattccgggtcgcggtaagtgccgatgacggcaagacaggtatcttcgtcaaatcccggcgtctgctgtaggtcagccaccagggcggtgtaaaaggcgcgggtattttcctgccggagatacaggtgcagacttgcggcgttggcaacgtagatgttggatacgaccacacatgccagactgacggctacagcattcaggccaaatctccgaagcaaatcccaagccttgccggggacggaaaggcagatgtccgcggcaagaatcatcagcacgtagacggacacgaagccgtacagcaccagcgtgtgaatggactcggggacggtgaacaggtacatgcagttcacggccagggggagcattgcgaccagagcggccagcagcaggagccgtcccggctgacgatgcgttgtcccccaaaggacaagcagcaccacggtagcgacgatgccgatgccgtgcatccaccgggagaagaccgtgggcatcagcccggcctttccctgggtgaaaaaagcgaaaaatgtaccgtaagcctgagcaattccggcgggaacggaggataagcgggagttgacgcggctgccggcgtagtcccccagacggacgtctttcagccggaggacaacttgcgtggcaacgtagtagagggcgagggagacgacgagaaacagcagaaaacacacgccctgccggataaccggttttacatcgtcttcctccagcagccgccggatgagtaccagcacgagaagaccggccgcgacggagatgtaggactggtagatgctcagcgacgcgaccatgcatacgacagccggaagcccccacagtgcggagggacgctgaagaaggtacactgcggtcactgccagcagaaaggaaaacgcgaaggaattggaggtaaacatataggcaagggtgccggtcagagagggaaacaccagaatgcaccctgccagcagcgcctgaaacagtttgctgcggattcggaaaatccggacgatgatgcagacggaaattgccatgaaagaagtggtgagaacgccgtaaatccacggcatggagaaattggggaaaatcaaatcgattccgcccagtccccaccgcccggattccaccgtggcgcccttcatgaacagggagtaagcctcgtcgtggttcagaagcttgttggtaaaggaaaacatgtacgccagaaacccggcgatcagcgacgcggccagggggacggcgttttcccggatccgggacaggagccatgccgctgcccgctcgaccagcagagatttgtttgtctccttcatggtgaagacctctcttccgtaactcagtccaaccattataccgattttctccggtttcgtcaatgaaaaacggggatttaccacgacaattgcatgagttacaaattcatgaacatcttgtgaaaatggtgccgttttgatgccctatggctgaaagtatttgcgggaatacgaactaaccacacgccgcatggccaacggaacggtgcgtagaccgttttctacggttgcttttacctttctgttcacaaattatttactcatgcaattgtcatgaatttcggtaagaaagtgttgatttttgtcacggattctgataaaatagataagatttttgaatatactcgctgaagggaagatatatctatgtccggacattccaaatggcataacatccagaaaaccaagggcgcgcaggacgccaagcgcgcggcagccttcaccaagatcgccaaggagctgatcgtcgcggtgaaggagggcggcagtgcggatcccgcctataactcccgcctggccaccgtcatcaccaaggccaaggccgccaacatgcccaacgacaacatcaagcgctgcctggaaaaggcggcaggcgcgggcggcgacaactacgagaccatcacctacgagggctacggtcccggcggcgtggcggtaatcgtggaaaccatgaccgacaaccgcaaccgcaccgccggttccatgcgtcaccacttcgacaagttcggcggcaatctgggcgcgacgggctgcgtcagctggtccttcgacaagaagggcgtgctggtgatcgacaacgaggacggcgactacgaggaagaccaggtcatgatggacgccatggactgcggcgcggatgatttcgaggccgaggacgacgtgttcaccgtgtacaccgaccccgacgatttcaacgccgtggccgacgccatgacgcagaagggctacagcttcgtatccgcccagatcgaaatggtaccccagaactaccagaagctcaccgacccggagcagatctccctgatggagaagctgctggacatcatggacgacgacgacgacgtccaaaacgtctggcacaactgggacgaggattgaggaagaatgaaatgaccgcaggttcaggcgatggcttgaacctgcggttatttgatatttggacgagacttgaacgtttagaaatagagaaagacttgtgaccggcttaggaaaacgcttttccccacatttcatccatcaccacaaaaccgtcaggcaccctttcataactgcattttgccgtgtcattcaggtatggtacagtccagaatatagcaatttcctgcacagtatcattttcattggctaatgtagcggcaaggtcatcggaatacatcttcagcatttcttttgacagtttaccgctgttctttgtattccaagtcagataaacgagcgcaatatagtcattttcatcttccgtaccgaggtcatcattgatcgttatcctatcaattacagcgttgtggtattcttcaattcgctctgtcagaattttttctatctgttccttttccgtcaaaacctccggttcagtaattgtctcgcttgacccggtatcagaagttgcggtggatgcaagtccgcttcctgtaccgcaggcacaaagggataggcacatcacaagtgtcaagagtagagagaatgtctttttcattaacgttccttctttcttagagtatgacaataaccgatattggttaatatgattatacaccatattcggttatcatgtcaagtaagaaggggggctgcgtcccgtgatttcttacgataatctatggaatgtcatgaaagagaagggtatcacacaatacatgctcatcaaacggtataatatcagccccggacagatcacgcggttaaaacggaacgagagcgtcagtacccataccattgagatgttttgcagaattctgtcctgcgaagtcggggacatcatgaagtatattccggatgattagagcggagaaatctgctctttttcttttgggaagcacatcctcattttctttatcaaaaacacccctaaaatagcaaaaacaggaagcacatcttgccggatttcttcggcaggacgtgcttccttgcttcatttttgcgaaaagtggggtttgaacttttgaggttcaaaagcaggggtttacccttacttcttcagcgcttcctcaacagcaacagccacggaaacggtagcgccgaccatggggttgttgcccatgcccaggaagcccatcatttctacgtgggcaggcacggaggaggaaccggcaaactgggcgtcggagtgcatacgacccatggtgtcggtcatgccgtaggaagcggggccggctgccatgttgtcgggatgcagggtacggcccgtgccgccgccggaggccacggagaagtacttcttgccctgctcgatgcactctttcttgtaggtgccggcaacgggatgctggaaacgggtggggttggtggagttgccggtgatggaaacgtccacgccctcgtggtgcatgatggccacgccctcgcggacgtcgtcagcgccgaagcagcggacagccgcgcgctcgccgtcggagtacttgtactccttgacgatcttcagctcgccggtgtagtagtcaaacttggtctgcacataggtaaagccgttgatccgggagatgatctgggcggcgtccttgcccaggccgttcaggatgacccgcaggggttccttacgcgccttgttggcagagcgggcaatgccgatagcgccttcggcagcggcgaaggactcgtgaccggccaggaaggcgaagcacttggtctcgtcccgcagcagcatggcgcccagattgccgtgacccagaccgaccttgcggtcctcggcgacggaaccgtcgatgcagaaagcctgcaggccgatgccgatggcctcggcggcctcggcggcggtcttgacgcccttcttcagcgcgatggcagcgcccacggtgtaagcccagcaggcgttctcaaagcagatgggctgaatgcccttgacgatctcgtaggggtcgaagcccttcgccttgcagatctcccggcactcttccacggaggagatgccgtactgcgcgaggacgccgttgatcttgtcaattcttctttcgtaactttcaaacaaagccattgtttcgtcctcctcttattcctgacgggggtcgatgtacttgggcgcgttgtcaaaacggccgtagtgacccttcgccttggcgtaggcggtgttggcgtcgtcgcccttcttgataaagtccatcatcttgcccaggtttacaaactcatagccgatgatcaggttctcgtcgtccagagcaacgcgggtgacatagccctcggccatttccaggtaacgggggcccttggacttggtggcgaacatggtgccgacctggctgcgcagacccttgcccaggtcttccagagaagcgccgaccaccaggccgccctcggagaacgcagactggctgcggccgtagacgatttgcaggaacagctcccgcatggcggtgttgatggcgtcgcacaccaggtcggtgttcagcgcctcgagaatggtcttgccgatgagaatttcggcggccatggcggcggaatgggtcatgccggagcagccgatggtctccaccagagcttcctcaatgacgccctccttgatgttcagggtcagcttgcaggcgccctgctggggagcgcaccagccgataccatgggtaaagccgctgatgtccttgatctccttggcctgaacccacttgccctcttcgggaatgggagcggggccgtggtaggcgcccttagccacggagcacatattctgtacttctgcactgtaaatcatggcaattttcctttctttcaaaagacgtttccgcctttgggtttacttttccggacaaccggagttttgcctgtatattatacatgccgccgggaaaaatgtcaattccccggcggcaaaatcgttgtaaatttcggacggatacgacgttatatccgcttgagcggatgggagctgtcctgggcgatgagcaggtcggtgatgatgtcgttgctgaccagatacccctgaggggtcagcacccagcggccggagtcgttctgggtcgcctgatagtagcggcggcgcttttccagcacctcctccagcggggcgaagggcagcaggaacagcttttcgtattccgcggcgctgatgccctgactggtgcgcagacgaagcatcagatactcgcccgcccgttcccgcatgggaatctcctgcaaatcctccataatgtcgccgccgtcccggataccggcgatgtattcctgcaaatcccgtttcagggtgaagcgctttccggcaaagtccgagctggcgctggggccgaagcccagatattcgccgcccgtccagtatttcatattgtgccgggagtacagacccttccgggcaaaattggaaatttcgtactgccggaagccgcggctgcggagggcctccacggcggcgaggtacatgtccgcctgggtttcgtcgtcgggaaggttcagcatttccttgtagtcatagaagggggtgccttcctcgattttcagggcgtagcagctgacgtgctccgggttcaggcgcaggacgttgtccagggtttcctgccagtcatgcaagtcctgtcccggcaggccgtacatcagatcgacggacacgttgcgaaaacccgccttgcggatgcgctggtaggcggtggcggcctgggcgtaggtgtggggacggccgagctttttcagaatttcgtcgtcgtcggactgaacgcccagactgacccggttgaagccctcggcgtaaagccggtggagcagccggtcggaaacggaatccgggttgcactccacggaaatttcagcgtccggcaccacgtcgaagttccggcggatggtggtgaggatcacggccagaccgtcggcgccgaagaaggagggggtgccgccgccgaagtagacggagtccaccttatagccgggagccagctcgccggcttccttgatatggtcgcacaccgcgtccagatagccgtccatcagcttgtcgtccttggtggccatggagtagaagtcgcagtactggcacttgctgcggcagaaggggacatggacgtaaagtccgaggggcgttttgtttgcgcgtttattgagaatgggcatgggatacctccgggtgttgagaatgtgagaaaactgtcagtcttcgtccagcttgaggacggccatgaaggcttcggaaggaaccgcgacggtgccaaaggtgcgcatccgctttttgccttccttctgcttttccagcagcttcttctttcgggtgatgtcgccgccgtagcacttggcgagaacgtccttgcgcagtgccttgatggtttcccgggcgatgaccttgccgccgatggcggcctggacgggaatttcaaactgggcgcgggggatgttctccttcagcttttcgcagattttccgggcgcggggataggcgttgtccgcgaagaggatgaagctcagggcgtccacaacgtcgccgttgagcaggatatccagcttcaccagacggctgggacggtagccgatcagctcgtagtccagactgccgtagccccgggtgcgggatttcagggcgtcgaagaagtcgtagatgatctcgttcaggggcatttcatagtgcagctccacccggctggcgtccagatacaccatgtccttgaactcgccccggcggttctggcacagctccatgatgttgcccacgtattcctggggggagatcaggctgaccttggcataaggctcctcggccagctggatgtccgccgggtcggggtagtccagaggcgtgtagacgtacatggattcgccgttggttttcgtcacccggtagaccacgttgggggcggtggtgatgaggtcgaggttgtattcccgttccagacgctcctgaatgatctccatgtgcagcagaccgaggaagccgcagcggaagccgaagcccagggcaatggagctttccggctcgtagctcatggaggcgtcgttgagcttcagcttttccagcgcgtcccgcaagtcctgatatttggcgccgtcggcggggtagatgccggagaacaccatgggctgggcgggacggtagccgggcaggggctgggcggcgggattctccacgccggtgatggtgtcgcccacccgggtgtccgccacggttttgatggaagcggtgatgtagcccacttccccggcgccaagagcatccgaggggttcagcccgccggggatcatggtgcccacttccaccacttt

SEQ ID NO: 635 - DNA, 24793 bp, unidentified
  source 1..24793: mol_type = unassigned DNA
tgccacgccctttgccatgacaaggccgatatcgcggcccagcgtcaagcgcatggcacacagtgcaaggaagcctgcaatggtggtcaggctggaagcggagatggaggtcatggtcttgcagatagcgctgaccatggcttcttcattggtggagcgcagctccttttcttcctcatagcggtgcagcaggaagatggagaagtccatcgtaacgcccagctgcagcacagtggcaagcgcctcggtgatgtagctgatctgccccaaaaagatgttggtgccgaagttgtacgcgatggggaacagcagacccagcatgaacagcaggggggtgagggtgctttccagcgagaggaacagcaccagcaggctggcgcccacggcgatcagaatgtacaggggcatttcctgattgaccagcgccttggtgtcctgcagaatgacgctcatgccgccgaagaagcagtccttgcgcagcagtttttcaatctgcttgacggcttccatggtctcgtcgctggcgctgggggcgtcaaagcggacgatcagcatggtggaatcgtttttgccgaacatgaactgctgcacatcggcaggcagcatggcggtggggatgctggggtcgatcacatcgctgagccagaaggtctgggtgacgccgggcacggcttcaatctcctttttcatagcgatgagttcattggttggcaggccctctaccgtgatcataccggtggaggccagatggaaatcgtcctcaagggctacctcgccgatcatggagtccagatcctgcggcaggtaggtgaggatgtcataattgatgcgggtggcaatggcgccgatcgcggaagggatcaacagcagcactgccactgttaagatcagcttgcgcagacgcacgatgccttgtgcgatctttttcatgagaaccctccagaatagaaagttgattgggaatgtccgcaaaactgactgtcggtcatcttccgggcaaacactattatatccaccccgggcagtgtgtcaagcagaaaaagtgaccgaaagtcagtttttttatcacctgcaaaaaattgtatagcaaaccgggcttgcacaaacggacaaggactgctaaactaaggtacacaggccggacgcagcacatacctgcgtctgaattcagagaaaagaggaatctacccagagcatgagcaccgtggaagggaagaaacaggaaaagcggcgcgccctgctggatgcagcctacgagctgtttctggagcggggcaccgccaagaccagcgtggaggatatcaccagccgggcaaaggtgggcaaaggcacgttttatctgtattttcaggataagggcgcggtgatgcaggcgctgctggggcgggtgagctaccagctgctgaacgatgcctgccttgcggtcgagcagcaccccgagctgcccgactttaccgcgcaggtagtgttcgtcatcgaccatatcatcgaggctttgcggcaggatgtgctggtgctgcggtttctggagcgcaacttcgtctggcccgggttggaccaaatcgaagccagcagggaagccgagcccctgatgcgcaagctgctggccatcgtgctttccagcccggagatggccggacgtagtgagcgggaggtctaccagcgcatcaccgcccttggcagtatgtgtatgtcagtgtgctattccagcattctggagggcaagccggacaacatcgacgccatgaagccggtgctgtacgatatcatccgccgggcactttcgccggaaaagtaaaaaagaacgcataaaaagcacaaaaggtcttgctttttgcaaaaagctgtggtaaactatccaagtcgatatgacatggacggttagctcagctggtagagcatctgcttgacgtgcaggaggtcacaggttcgagtcctgtaccgtccaccacatccccagaccatttggtctggggattttttgttgtgacaggacgagaacagaaacaagcaaaggcagggtatcaccatgcgggtggtatcctgccttttgctatttttaacagtgtatggtatactcggcttagcccagtaaattggaagttatggaggtaacaatacttatgaaaaaatttctttctttgtttttgtgtcttacctgtatactgactttagctgcatgtggaaaaaaagcagcgcccattacgctgcctcgagccgatgagatcacatctattgatataacctttgaagaaaacacagtaagtcattcagataaaacttggataagtgaaataatcgccgatatttccagttctgaaccgactaagaaggaaagcgttcaagactttccgcaagcgaaaagttatatcaggattgacttccggcatgagacaggaactgagacagaaataattactatctttgcgtatgaggacagggggaagtactatcttgaacaaccttatcgaggaatttataaaactgatcgcaaactgttcgaaaggctaaatgaaacggattgatttcaggttaccgcactcgttccctgcagggcttggggctccgcacgccccaacaagagcatctgtcttgcgcccgtagtcattttgtgatacaataattctgacaggaggtgtctcgtatgatgcagacattcgttcgcccttcccgggatctgcgcaaccattacgccgaaatttcggagatgctcaaagaccacgaccatgtgatcatcacgaatcatggccgtggagaatccgtactcatcaacattgaggactacgccaagtacgaagagtttttgcaccagcggtatgttgccgaggcacttgccaaggcaacacagcaggcggctgaccccgacacgcagtgggaagaccacgaaagcgtatgggagacgctgagcaagcagtatgacgtataaaattaaatatctgccccttgctgtgcaggacttgaacgatatcgcccggtatctgtctggcttttaccctaaaacagccagccgtgtactgaaagaacttcgggagaagatcacaaaattaggcgataccccgaaaatgtgcgaggtctaccgccttgacccggcttatcgtaggttggtcgttgaccagtatctggtgttctatcgcgtcaacgatggaaacaagattgtggagattcaccgtgtgctgcgaggtgcttggaatctgccgcagtatctggaataaattcaacttcgactgctgtgaacggtacagaaaacccccggcgggcaatcaccattacggtggcagcctgccgggggtattataatgttatgctgtcagcgattttcctgccttacacctcgtgttcggcccagtcctgactgcggcccacggccttgtgccagtccctgaccagcttttcccgctgggcagcgtccattttgggctcgaacagctggttgcagctccacaggtggctgatctcctcccggctcttccacacgccggtggcaaggccggccagatacgccgcgccaagggcggtagtctcccggatggccgggcgcagcacctccttgttcaggatgtcggactggaactgcatcaggaagtggtcgcggctggcgccgccgtccaccttcagggtgctgatggtgatgtcggtgtccttctccatggcccacatcaggtcggcgctctggtaggcgatggattcctcggctgcgcggatgatgtggttctgggtggtgccgcgggtgatgcccagaatggcaccccgggcgtacatatcccagtaaggtgcgcccagaccggtaaaggcaggcacgatgtacacgccgccgttgtccggcaccttctgggcgtagtactcggaatcgcagctgtcctggatcaggtgcatcccgtcccggatccactggatgaccgcgccgcccacaaagacggagccttccagcgcatattccacctcgccgtcaaggctgatggcgatggtggtgaccaaaccgtttttgctctgatagatcttgtggccggtgttcatcaacaggaaacagccggtgccgtaggtgtttttcacatcgccgggcttaaagcagccctgcccgaacagtgcagcctgctggtcgcccgcaataccggccaccggcacgtccacgccctgaatgttggtgtagccgtacacctcgctggagtccttcacgctgggcaggatgcagcgggggatgtccagcgccttgagcagggtgtcgtcccagtccagcgtgcggatgttgtacagcatggtgcggctggcgttggtgcggtcggtaacgtgcaccttgccgccggtcagcttccagaccagccatgtgtccaccgtgccgaacaaaagctctccggcctcggccttttcccgcgcaccgggaacgttctccaagatccacttgattttggtggcagagaaataggcgtccggcacaaggccggtgttttcccggatatagtccgccatgccgggggtcctgagcagctcgtccacaaggggcgcggtgcggcggcactgccagacgatggcgttatacaccgggcgtccggtgtttttatcccacaggatggtggtctcgcgctggttggtgatgccaatgcccgcaatgtctctggggtccacgccgctctgggcgatcacctcgttcatcacgccgtactggctggaccagatctccatggggttgtgctccacccagccctgatgggggtagatctgctcaaattcccgctgctgcacgcagacgatgttctgctcgttgtcaaacaggatcgcccggctgctggtagtgccctgatccagtgagaggatatatttggtctggctcatgatcttctctccttgctctgaagcttgagcgcaaaacaaaaaagagcgcaccaaacaaagctatctgctctgtctgtcgctctcctgctctgcgcaaacatattctgtgcttattgtacacgctccgcaggcaaaatacaagcttctgcgcgatttttggaggttctgcacaagggggccgcgctgccgttgaacactctgccgaaagggtgcgcggtgcagccgctgcggctgtgaaaatgggacaccggagcgtccgcagacgctccggtgtcccgagtaccattcaaaatcgttctattacagctgctgttttgccagcacgtcagaggtaggggtctggaacaccgggatgtcggcataggggtcagcagtggtgtcggcgggcagggtcttcatatactcgtccatggcgacggcaaccttcttggcaacagccacagcctccaccacggtgcgtgcgcccatgacggcgtcgccgccggcaaatacgccctcgcgggtggtgcggccgtcctcgctgacgctcagcagacccttctggttagtctcgatgccggtcgtggtcttgacgaggttgctctcagaaccctgactgaccgacacgatgacgccggtgtgggggtaaaaagtctcgctgccctctacctgcgtaaacttgccgtcctcgcccttgacagtgtcgcggcagatcaggccgttttcccggatctccaccggtgccttgcagaagcggaagcccacgccctccagcttagcgtagctcacctcgtactcggaagcgctgatgcagctttcgtcccggcgggcgtagcaggtaacgtggcgggcaccgttgcggatggcggtgcgggcgcagtccatggcagagttgcccacgccgatgacagccacatcatcgcccagacggaaagccttggagttggccagatagtcgatgccgaaagccacgttgccaaggctctcgcccttgatgtgcatggcgttggccttccacagaccggcaccgatgaacacgctcttgtagccgtcgcggaacaaatcgtcgatggtaatggtcttgccgatggtagtattggggcgcaccttgatgcccttcagctccagatgacggtactggaaatcgtccagcacactgtccggcaggcggtagttggggataccgtagcgcatcacgccgccgatcttatcccgggcgtcaaagatggtcacatcgtagccccagcgtgccagcagcactgcgatggtcaggcctgccgggccggagcccaccacagcagccttcatgccgtttttcggggcagggcctgcggtcatcttgttggcgtaggtggtggagatatagtcctcgatgatggaaaagtgcaccgggtcgtggctgggcatccggttgcggatgcagtgaccctcgcactgcttttcgtggttgcacaccagactgcacacggtggtcagagggttgttttcaaacagcatccggcctgcatcgtccatctggtttgccttgagcagacggatgacctccgggatattggtgtggatggggcagccctcctgacacatcggctttttgcagccgaggcagcggttggcttcgtccagaacatgaagtgccatgggttcctccttgtgtttcccctgcggggacggtcgttttttacaggtttgttgtatccaacattgcattgctttaatcatacacccgaactgcgccggatacaagagggcacaatataaaatttttggcgttattttttgtcaattcgtcaaaaagataattttttgacgatatatcccgcccatcggctccggtttaacccggcacagtgcaccaaggtcgctggccctgctctgggcggcagccatttgggtgcaggtctcgttttcccgcgccagccgcgccagcgagtgggacagcggcagcgccgtttctccgagcaggggcagcgcctccttgcgagcgcccagcaggtgcaggtagggtggcagtgccggggtctgggcggtgtagcccagcgccgcatccattgccagccgccgcatccgcgcccgggggtagcgcacggtggtcagggcatccagcagggcgggcagacttgcggtctcccgcacagcattttccagccggtgctccaagccttcggataccccgcgcaccgcggcaaagggggcttgctctgtgcaggctgcccgcagcagtgccagctcgcagtgccccatgactgcaaaatctgtatactttccgtcatattctgcctgtttatacaatttcagcgccttttccggcacataaggtgccagtgccgccgcgccgccctccgcccagagtgcccgcagggcgctggcgctggcaaaggctgcatgagcactttcggtcagcgcctgcccgtggtctgctccctgccgtggcagggcgatgggctgcatttctacaccctgttctataatggccttacaatactctacggcaagattgttgttgggcttgtccagcagtgcggcaacgtctgaccccgggcacagcgcctgcaccgccgcctgccgggcggcggcaaagctgcgtgccccggcggcaagctgctgcctgagcgcggtgcggtatgcttcgctgcacagcacccgggcagctttttgcagcagggcggtgtccggggtctctgccccaaagaccagcgtatcgcacccggcagcagccagaatgcgcacccccgcccgggcaaaggcctcggcaccggcgcaggcgcagggcgcgggcagggcaaatacaaggtctgccccgcaggccagcgctgtctgcacccgcaccgcctccggcagcagcggcagcgccccccgctgggtaagcccgcagctcatggctacggccacccgctgtgcccccagcgcccgcgcctgtgccagctgccaagcgtggccgttgtggaaggggtcgtactccgcaatgatgcctgcaaacttcatggaactgctccttttcgccaaaagattgttaaaattatatcggatatacagaaaaatcctgccgtttccgggatttgtgggcaggatatacaaaaaccttgtacacaagttttaccgctttgcccgggttgcgccttgaaaagccgtcacgcctattatataataaacataggaatctgtaaaattctgtccgcaggtttttaggctgcggacggtacaaaaattttcaggaggcaacacagatgaagattctggttattaactgcggttcttcttccctgaagtatcagctgatcgatatggacggcgaaaaggtgctgtgcaaaggcctgtgcgagcgcattggcatggagagcagcatgatcactcacgaggccaacggcaccaaggccaccaccccggcgatcttccccacccacaccgaggcttttgccgaggtcgtgaagaagatgaccaccggtgcaggcaagtgcatcaatgacgtgagcgagatcgacgccatcggccaccgcgtcgtgcacggcggcgagaagttcaagagcagctgcctgatcaccgatgaggtcatcaacacgctgcgtgagctgagcccgctggctcccctgcacaaccccgccggtattctgggtatcgaggccgcccgcaaggtgttcggcaacattcccatggtggctgtgttcgacaccgccttccacagcaccatgccgccgaaggcttatatgtacgccatcccctacgagtactacgagaagtacggcgtgcgccgctacggtttccacggcaccagccacaagtacgttgcccacaaggcagccgagtatctggaagagcccattgagcgcctgaagctgatcacctgccatctgggcaacggctcctccattgccgcagtcgatcagggcaaggtggtggatacctccatgggcatgaccccgctggccggcctgatgatgggcacccgctgcggcgatctggacccctctgtggtcaactacctgaagtacaccctgaacatcaccggccacgagctggacgagatcctgaacaagaagtccggtctgctgggcatctccggtgtttccagcgataagcgcgatgtggaagaggctgccgcggccggtaacaagcgcgcacagctggcttccgatatgctgaactaccagatcaaaaagaccatcggcagctacattgcagctatgggcggcgtggatgccatcgtctttaccggcggcatcggcgagcacgatgccattgcccgtgcaaagatctgccaccacatggattggctgggcatccgcatcgacaccgagaagaacaagcaccctgttggcgatgtgtgcgagatcaccgcttggggcgcaaaggtgcgcacgctggtcattgctaccgacgaggagctgatgatcgcccgcgacaccaaggaagtcatcgagaagtaagcttttcccaaagggctttgcaggggctgctgcacagaatgtgcggcagcccctttttgcttgtgtgaaaaagtggttcagaaacacccgcaggtgtttctgaaccgcaaatcataaattatctgccgctgcgcataacctgtgcggcgcgccgcttttccatcttaaggcggtgattttacccaaatatatgctgtcggcttgtgccatgtgtacaaataaaagggcgaacggttgttttttggttgacaaatctcaaaaataacggtacaataggaaagtcctcaatccgagggcgtttatctattcaagcccctggtaagcttactgatcagcgcgatggtcccaaaaccaaaggtatggttacaatccttccgtgggcaagaactaactaaagaggagatactactatgtttgaagacaagactctggtctgcaaggactgcggtaaggaatttgtttggactgccggtgagcaggagttctacgcttctcgcggcttcgagaaccagccccagcgctgcaagccctgccgtgacgcccgcaagaacggcggcgcacgcagcaacagcggcgagcgtcagatgttcgacgctgtctgcgcagcttgcggcaaggcctgcaaggttcccttccagccccgtgaggaccgtccggtctactgctctgactgcttcgctcgcatgaagcagaactaagcgctgattttcatttaaatcggtaacaaatccccccgctgccagtcggcagcggggggatttttgcgtttctcttcaggtattcttacgctgatttgcgcccgagagcagcagcaccgcgcggcatagccgcagcttgagcagcaacagctttacctggtcgttccggctctgcatggcgtgcagtggggtgctgcgcaccgccgtgcgcacccggggcttttgcagggtactgcgcagccaagcagtctgctcggaaagggaaagcgggctgcatccaagattcttgattcccatcatcaggtcgcggatcgtgcagtagctcgcctttgcgcggtgcatggggctgtcctgtaagccccatgcggcaacggtgtcccacactgcatcgctgagataaaagttatcctccagacgctccgggtggtagctgttggacaggctgccccgccgggcagcggtgtagtggtacagcggcttttccagcaccaccagacagccgggattttgacgataaaaggctacaaagaacagcccgtcctcccccagctgatggcaggagaaacgcagccgatgctgctccagaaacgcccggcggaacagcttattggtgaccagatacgaggaagccgtctcgtcgaaatgttccttgaagggcgcgccccggtacacgccggagagggtgctgccgctggtctgcgtgtgcagcagccggtcgttttcatcatagctgtccagatacagcccaaactccacgcagtccgcatcagcattccgggcggcatgatacagcacttctgccgcatccggctctacccagtcgtccgggtccagaaagaagatatactctccccgggcagcattcagacccgcgttgcgggcagcggctacgccgccgttgggctggtcgatgaagcgaaagcgcgcatcctcggcaacagcctgtgcacacagcgcggcgctgccgtccttagagccatcgttgatgagaatggcctcgaagtcggtcaaagtctgcgcccgcagtgagcgcagcgcccggggcagcaggcgctccatattataaacaggcactataaacgagatacagggcattgttttcactccttgccgtcacacttccttcatcagaatatggatgcggtcccgcatctcctgccgactgtccggcatccacaccttgggttccgggggctttttgcgctccatggcgtaggcaagcgtcaccagacgcagcgccatcgtgctccagaaataaaaggcggtattatcggtcaggtaggtcaccgtcatatagcctagctcggacagatacagcaacgtggtctcttggtctgcatagcgctgccagaacagcggagtcagaacatactggatgctggaccagagcagaaaacccggaaagcctacctctacaaagaccttcaggatgtcgttgtggaaggggtaaggctggttgatgagtccgtcattataccactgggcgatgatggtgtccacatattcaaaaccgcggccgatataggtgatagaaaattcatagtagggattcgccatgctccacagatagtcccgtcccatcatgtcaatgccaaaactgttcagcaaccttgaaataacaccgtagcgcacacagtagaggaatgccagaaaaaacaggatgcagcagacgcccactgccgggtaaaaccagccggggactttgcgcttgcggagaagcagagcgatcaggacgaacagaaccaccgccgggatggcgatgcgcttcatgccgaccagaaaaaaccagcagcagagcagcagatacagccagcgcttgcgcttttcctgccgggtagtacgaggagcaaaaacggcgtagtacaagatcatctgcccgaacacaaaggtcaggtcgtgaatctccagctgcagcgcatagccatccgcatcaccgaaggtgatcagacaggtaacgagagactggatgctggctgcaaaaccgtagccaggaatgctcagcagcatgatggccgtgttggcaatgcagatgctgatggtaaacagctcgatggctttttcccggaacagatagaccagcgccacggcagtgaggatggcaatactctggaacacgatcttggagcagcttcggatcatggaagacactgcggcaaagctttcgatccagatgaccatcgaccagaaaaacagcgccgccatcagggacatataaagcagggtaggcttccataactcccggagacgcttttcgtccgggtaaaacagagtgtacagcattgccagcccgatcacccccagagagatggctttgggaaggccgcccactgcgctgttgattggtttccactctcccagcccggcaccggccaaaaagaccacgcaaccgatggtcagcagtttttgccacagcgggctgtccttataaaacaaagaggccggagttttccggctgtaatcctttttggtcaggatctgatccaatgtgcgcatgaaaagggctctccttttattgtgggtgttcccgcagccgccggggggttacgcctgccctcccagttgcaggtactgctgctgcaagcgggcggcggcgatgttgatatcgtagccagcctgtcggatcagttctgcaccagcagagcggtcgcagggctggtggagcatccgctgcaagcctgctgcccagtctgcattgctggcggaaagcgggatctggatggcatgggaagaaagcagcacctccgccggcactgcgtccgaaaatacgcaccccagcccggcggcttgcgcctcgatccccaccaccggcagaccctcaaagcgggagggcatgacgaagagatccatcatctggtaccagtcggccacattgttttgcaacccggcaaacagaatatggtctgtgatgcccagtgtctgcgcctgtgcacggacagcctgctccagcctgccggtaccaatgagcaccagcatcgcccggggctccagctgcaaaaaggcggcaaagatttccaatagacgctcgtggttcttgcggacatcaaagcggcctacatgacccagcaccacccggtcctccagcccgtagcgcgcccgcatttcggcgcggacggcgggggagaagcggaaggtctccggctcgatggcgttgggaatgatctgtccccggcgctcccagtccgctttgccaaagtagtagatgcccgcatcccggccgcaggcccacaggtgggtggcggcgccgggcagcagctgcttacagaacatcttcagcggccacttgtagtcccggacgatccagatattatgggcgtgggcaatgcgcacttgcagcccggccttctccgcacccttcagggcataaagccccatcgcctcgttgtgggcgtgcaggatgcggatgcgggggtctgcggccacggtctgctgcacaaagcgcagatacgccgggtagtgcagcgggtttaatcccggactctggtagatgtgcccgcccagacggcggatctcgtcgtcgtaatcgccgggcttttgcttgttgacgataaaatcaaactggaccttttcgcggtcgatatgccggtagtagttcatcagcatggtctcgatcccgccgcggtccatattgctgaccgaatgcagcactcgtatcatgggtactccttatattataacaactgaaatcttctgccgtagcggcaccacagcccaaagtcctgctgccgcagcgcccgggcaccccagcgggcacggcggggcagtgcgccctcttgcggcagcgcctttgcgtacaaagcacagcacagccggaaaacagcctgctgcgtttccggcggcaggccggatacggtggcatagcagaaagccgaaagctgcagcgtcagggtgcagcggtacagcgcatcgtggggcaggcccagcgcagcatcctgcactgccagctgctccatgatccagtagctctgcacggcggcagggtggtgctgacttgtggcggtaagccccttggggtttttgcgccacagatagaccatctccggcacagaggccacagtctttgccagccggaataccagaaaatggatgatggcatcctcaaagcaggtatagtaagccggaaagcgcacctgtgcaaacagttcccgccggtacaccttgccccatggcatcccgggcagctcgaaccgctccggcgcggcggcaccggcgtagactgccgccgggtagcgctgcaccgggccgtgggtgccgtcggtgtacaggtactgccagccgccctgcaccacatcggcgtcaaggcgctgtgcggcctccagcagggtgcggatggcaccgggcaataacagatcgtcgctgtccacgaacatcagccagcggcccacggcgtggcgcagtccctcgttgcgggcggcggcggcgctgcggggcgcactgcaattgcacagcaacaccccgggcagtgcccggtagcgttccagcacggcggctgtgccgtcggtggaatcgctgtccaccacgatcagctgcacggtgcagctggtctcctgctgcaaaatgctgtccagacaggggccgatggtagcttcgccgttgtacaccggcacaatgaccgaaagggtcaccgccgggtcctgcggcggcagtagcgggcaggtctcttctgctgtgggtttcgggcacagggctgccagcgcggcgcggtcggcctgtgtgctgtccggcagcggggcaccgccccggtgcagcagatggtacagcccaaggtctgcatggccgcaggctgcgccgcacacggcggcagcgcccgccagcagacggctgcgggtgcggcagtggatcagctggtaagcgcgtcggttctggatcatgcttcaccgcgctccgttccggcaaggacagcgccgccctcctctgcgatcagggacatctttttctgtgcgcagcgcacaaggtcgcgcacatggtagagctcctcctccgaggtggtggcccatgcggcggtaaacaggatggggtactccgggttgagcttattgtactcgtccacctgactttgcagaatgcggatcatgacctctgccttccgggtgctgcattcatcaaagaaggcaaggaacttgcccgcgccgttgtagcccaccgtgccgtcggtatcgcccatcagctgcaaaagaccggaaaaatccttcaggatgccgtcacccacatggtagccgaagcggcggctcatctcggtcaggttgtccagctgcaaagcaaagcaggtatagtcctccggcaggatgcggtcggccatgccggtgatatacacgttgagcttttcgcggttgggcagaccggtctttttgtccacatacagcagataatccaccgcatccgagatgcggcccagcagaattgcaccgcagcagccaatgacaaagaacagcaccagcgccagcatcagatacagcttgacattgatggcggcagccacctgcaccgagctgatcatcttcagataatccgcgctgatgtacaggttcagctccttgctgctggtattgatgatcttgtagtagcttttcagctgcgcctcgtagtcgttgatcatgctttccatcttggcgtgctgctcgcctgtaccgccaaaatccacgttgcggaagctttgcaggatctcctcctgaaactgccggtcgatctggctggatgcgacctgctgttccagcgataccagcttcagcaccagaccgtcgtaggtggtctgcgccttatcgccagaaccttccagctcgatgttattcaggatatagtccgaggacaccacctcgccccggtcagtaaagtagttttgcagcagatcggcgttcttgtacacatactggtcggtcaggctccacagactgtcccgctgctcggtggtgatctgttcgttctgctttgcagtttcgatggtgttggccagatattcctgcagcaccgtgccgtcccgcacctgcgggccgttgagcacataggcgtacagcgccgggatggtgtattttttgaagtcggaatagatatcgcacaggtctgcataggtgtagccggtgcgggaggagcgaaaattcgggtagtgctcccgcttgctcagcagatagtcctgcatctcgttggtatcgttttccagaatgcggatgcactcgtagtaatcgtagccattgtccagcagaccggacgaggggttgagcgagagtttctgctccacatatttttccgtataataggtgcagtagctctggatgatggcatccagcatattgcgggcataacccgcgccctgctctccatccaccacaaggctcaccttgtaggtatccgggaaataggtcacctcttcgcccttttgcagcagggcgtcgttgatggtctgctgatcttccgagatcaccggggtcaccgagatgttggaacgaatggtgctcagccgcccggaagcacccagtgcatccatggcctgcgagatgacggtggaggagtagatctcgttgacgtccagctcgctgccgtccggggtgtagccgtccgagatgccgtcgttggtatagcggataatgaccgatgcagtgtacttctgcctaccgtccgcatacaggtagatggcggccgcacctgccagcgacaccagaaagatcagcaggctgaaacgcttcagatagcgcaggatctcaaactttttcatctgcggtgccttgcctttctgcgtttacgttcgtggagcagccatgcgctgcccagcatcacggcaacggactccatcagggtctttttcaggctcaggcgctgcaggaaggaggccgagccgtaggtaaaggtaatatagttctgggatttgtacttgatatacgccttgtccagtacaaacagctgctccgagatctcgttgatggcggtctccagcttgttcaccatggcctgcgcctcggccagacgcggctggccggcatccagctcccggatcttctggatcacataattcgtgctcacaatctcggactggtagtcggtggcatcggccagagaagcgtctgccgcccgcgccagcgcatccatggcggtcttggtgcgggacatatagtactcgcttgcttcatccacggtggggatcatcatgatggaggtcatggatttttcgtagatggaaatgccctttttgtcggcgtcatagtaagcctgctgggtgcgcatgtcaatatcgtcgatcttgttcttgtattccagaatgctggtcagcatggccgggtcgcgggcaacgccgccctcgatgacaaaggccatggcgttgggcaggtcgtaatccaccagattgttgatcattttgcccagtgtggtaaagttgttggtggaagggtcgggatttgcctcgtccgtaaagcttttgttttcccccagacgggcgttcagatagcggttcagcgcggcggcgcgcacctccagctcgttcagccgcaggtaaggctcacacgcagaggttacgtccagcttttccttcagcaggctctggttgtcgcagtagttgctcagaaagatctcccggtaggattcgcacacgctctgcaaaagatccgtagccttgcggctgccaagctccagcttgcgggtgttgatggagagatagtagttggtgctgatatactcgctgccgttggcgctgccggtgccgtccgggctcaggtaaaggcactctgccagctgggaggcagtcaggctgtcctgcaagcctacccgccggatggcgcgctccatcacctcgtccgacacgatctcgtaggcgttgaagcgggtcttgttggggttcatgccaagcgccgcctcggagtaattgaaggagatgctggcagtggcgctgtccgcacttttgaaatagtgaaccagcccgaacagacagcacaaggtcagcaggcagagaaacaggcggtatttatttgtccagatatgacgcagcgcctgtttgattttttctttgatgtcatccatggcattctacccttttgcagcggcctgcacgcgcagcgcaggctgcttagtcgatgtcaatgaccgaaagctccggcacattgttgatgcggggcgcccggctggaatcgcccagtccccggcttacaatgagggtggcgttgttggcaagtgtataactgcccccggcatagtcgggcagaaagccctcctcggcggtataaagcggaccgatcttcggcagacgcacgatgccgccgtgggtgtgcccggcaagacccagctcaaaggaataattttccagatgctcgggaaagtaggtgggaacgtgtgccagacagatgcgcaggtcgtagtctgtctgcggctccacgctgtccataaaggtgctggcaccgtagttggaaaaatccgccgggctgccctccacgcccagaatgctgataacattgtcgtggatggtatagcgcgcctcctgattgcgcaggacggtcaccccggcggcggtgaacttttccaccagttcccggtcgttgtccagaaaatacagctcgtcctcgtggttgcccagcactccgcataccggggcaatctcgctcagctgacggaacagggaaagcatattatcatagtcggtgccttcgccgtaggtcacaaagtcgccgcccagcaggatcagatccggggcaaggctgcggacatcctgcaccagctcacagttatctgctccgtattcccgcagatgcaggtcggtcagaaaaacgacccggcagctctgggtcagcttgcgggaatggatctgatagaactctgccgtatagtgggtgcggttatagcagatattctgccacagcgccccgcccagcagggcgagcagggcaacaagaaccagcagcgtcagcagcacctgcttccagaggaacgctgccctctgtgcgccgccgctgtgtgtatgtctgctgttttgcgctgcgccttttccgtgttttgctttgataaaggccacatcctttctgccggggaacgttgcatagagaagggcgcagcacaaggccgcagcccatctctccaaaaacggatacaaaaactgatatataaataaattataacatatttagtaggaaaagcaaagagtgcatctctgccatgagcggatttcacattggggagttcccatcaaaaaagggatgccgcgcacgcagcatcccttttgcatatttgcagatcaatcgtcgtcgctgtccagcttgagcacggcggtaaaggcctcgctgggcagggaaacgctgcccagctgacgcatcttctttttgccttccttctgcttttccagcagcttctttttacgggagatatcgccgccgtagcacttggccagcacatccttgcgcatggccttgaccgtctcgcgggcaatgatcttgccgccgatggctgcctgcaccgggatctcgaacaggttgcgcgggatgttgtcccgcagcttttcgcagatgcggcgtcccttggcgtaggcgttgtcccggaacacgatcatggacaaggcgtccacggggtcgccgttgagcaaaaagtccagcttgaccagatcgctctcgcggtactccttgaattcgtagtcgtagctggcgtagccccggctgcggctcttgatggcgtcaaagaagtcgtacacgatctcgcccagcggcaacgcatagtgcaggtccacccgcacatcgtccagatacttcatatcgatcaggacgccgcgcttgctctggcacagatccatcaggccgcccacatagtcgttgggggtgtacagatgcacatccacaaagggctcctcctgcttgacgatgttgctggggtccgggtagctggaggggttgtcgatcatctccacagtgccgtcggtcaaggtcaggcggtagcgcacgctgggggtggtggtgatgatgtccagatcgaactcccgctccaagcgctcggtgatgatctccatgtgcagcagacccaagaaaccgcagcggaagccgaagcccagcgcggcgctggtctccagctcaaaggtcagggaggcatcgttcagctgcaatttttccagcgcgtccttcaggtcagggtacttggcaccatcggcggggtagatgccgcagaacaccatgggcttgacctgacggtagccgggcagtgcctctgcggtggggcgctctgccagtgtaacggtatcgcccacgcgggtgtcctgcaccgtcttgatgctggcggtcaggtagcctacctcaccggcctgcagctgggcacagggggtcagggaggtggcacccatgtgccccacctccaccagcgtgaactctgcgccggtagccatcatgcggatggtgtcgccgggcttcaccgagccctcgaacacgcggatgtagacgatgacgcccttgtagctgtcgtagatgctgtcgaagatcagcgcctttaagggggcatccgggtcgccggtgggggcggggatatcactgaccacacgctccagcacctgatcgacgttcaggccagtcttggcggagacgcggggcgcgtccatgcagggcaggccgatcacgtcctccacctcctgcgccacctcgtccgggtgggcgctgggcaggtcgatcttgttcaggatgggtaccagctccagatcgtgctccagtgccatataggtgttggccagcgtctgcgcttccacgccctgcgtggcgtccaccaccagaatggcgccctcgcaggcggccagactgcggctgacctcgtaggcaaagtccacatgacccggggtgtcgatcaggttgaactcgtaggtcttgccgtcctttgcggtgtagttcatggttacggcacgcgccttgatggtgatgccgcgctcgcgctcgatatccatgttgtccaagatctggtcttccatggtgcgctcgtccacgctcttggtcagttccagaatgcggtcggacagggtggatttgccgtggtcgatatgtgcaatgatgcagaagttgcggatgttgtctcttgccatgtagttcctccgggcagctttatgcttctaagatccagtcctccacggccacgatctgtccgtggtcgcggtagacgcggggcacgcggcgggaaacgccgcacagcacttcgtaggggatggtgtcggtcttgcgggcaatggtctctgcggtgtcgctcacggtgccgccccacaggatggcttcatcgtcctcgcgcacttccggtacatcggtcacgtccaccatcatctgatccatgcacacccggcccagtaccgggcaggctttgccgtggatctccaccacgcccttgccgcagctcaaaagccggggatagccgtcggcatagccggtgcaaagggtggctaccttggtgggcttttcggcggtaaagcggcggccgtagctggcgcactggccgggctgcatctccttgatcatgctcaccacggtcttaagggtcattaccggcttaaagcggccaaagcgcacctcgtcgctggggtcgtagccgtacaggatgatgccggggcgcgccatgcagcgctcccggggcagtccctccggccagtccgggtgcagcatgaccccggcagagttatcgcagtgcacaagggcaggctcccgcccggcggccttcagtgcgtggaaggctttcacgaacagtgcgtgctgctcggcggtgtaggccacattctccggggcggtatcatcggccacggaaaaatgctggaacaggccggtcatttccagcccgggcagcgcacaagcctccagcatctcccggatggcggcgtcaaaatcggtgcgcagggcaaagccgatgcgccccatgccggtgtcggccttgaggtggatgcgcaccctgccccctgccgccacggcggcttcgctcaaggcgcgtgcctgcgcaagggagtagcaggccacggtgatgtcgttctggatcagggcggcggcgtaggcgggctgtacatgccccagaatgaggatgggcaaagtctgccccgccttgcgcagctgcacagcctcggtcaggcagctgaccgccagccatgcggcgccctcctcggcaaacacccgggcgcactgtaccgcgccgtggccgtagctgtcggccttgaccactgcgcacaggggcagcgcccctgcccgggcttttacctcccggaaattataccgaagggcctcgaggtcgatctcggcccagacgtgtttttcaaacggttgtttctgcatgatctgtttccttttttggtacgataaagctgccccggcccgtgtggacgggacgccagccgtcaatgccgctctcctgcaaagcatggagcgtcttttggcggaaggcgtggtcggtgcggcagcgctcctgcacaaattccttggtctgttcccgcacggtaacgccgtcggcggggcagcggcttttcacgatgggcaagtccgcctcccgcacggcgcactgcacctcgtactcggttgccagcagcatggggcggatgagggtgagatcccgttgggagaggtaggtcaccggcgagaagcagccgatgcgtccctcccgccagagattcatataaaaggtctccacggcatcgtccagatgatgccccagcgccaccttattgcagcccagctcctgcgcggcggtgtgcagcgcgccccgccgcagcttggcacacagggcgcaggggttcttctccttgcggtactcgaacaccacagggccgatctcggtgcggcgcacctcgtagggaatgccgtgctgccggaacagctctgccagcgccgagtagtccatgggctgatggtcgaactgcgggtccagcgtgaccgccaccacctcgtaatcgaagccgatgtacttgcgcagcatggaaaggccgatggtcagcgccacgctgtccttgccgccggaaacgcccaccatcacccggtcgccgggggcaatcatttcatagtcctgtacggccttgcgcatcagaccgcagagccgctgcattgcacgaagatcactcatgacaggctcacgctttctaccagattgaccacatcgctgatggacgccagcttggtcagcgccgagacatagaccacatcgccgctgtcgtaggtgatggtggccagcacggcgtagtaggtgcggatatcgcagcgcaccgcctctaccgctgcaccctccacggtcaggttgaccttgcggggcttgatgacgccgtaggcctgcttgaggtcggcttccgaatcctcaatgaagttttcgtagctgtcggcggtgccccgctgcaacagcacggcctgatagtcctcgctgtctgccgtgtcggcggtggcaagctccagcacggtgccgagggttgcgtcctcggtcatgcggcacacgctccacacgctgctgtcgtagtagacagagacaccgttcgtgccggtatagtgggtgtcgggtgtcgcgggggtctgccggttcaccagcagggtgagcaccatgtaggctgcgatgcccagacagatgaaaatggccatcgccgtcagcagcttggagctgcggcgctgcgccgaagaagtgcggtcgatctcatttggcatggatgtgttctccttgtgttggcaaggcggcggtacaccgcccatatcctttatagtataccacaaccgcagcgggatttgtagcgggcaaatggcaaaaatatgccggggcgggcaaaaaacttttacaaaaatcggaattcagaaatcaagaggatttgagagaaaacaagcgattttgagagtttcaaaaatttccgccgaaaaaatccaaaaatcatgttgacaggcgcgtttttgtgttgtatactgacactcgcgccccaaaagggtgcctgaaacgtacaaaaagcttatcaggaggaaatagatatgagcactactctcgtaaagcccgctgaagtcgagcgtaagtggtacctgctcgacgctaccggcaagagcctgggccacgtcgctgctgaggccgctgttctgctgcgcggcaagcagaaggtcgattacacccccaacgtggactgcggcgatttcgtggttgtcatcaactgcgacaaggctgttctgaccggcaagaaggccgagcagaagttccacatcacccacagcaagtacatcggcggcctgaagaaggtccagtacagcaagctgatggctgagaacagcgatctggctatgacctacgctatcaagggcatgatcccttccaacaccatcggtgataaggctctgacccgcctgcactgctaccagggtgccgagcacgctcacgctgctcagaagcccgagaagatcgagttctaagaaggaggcaatcgaatatgtacgaaaccaaaccttatttctacggcactggtcgtcgtaaggattccgttgcccgcgttcgcgtttacaccggcaccggtaagatcaccatcaacgatcgtgatatcgataactacttcggtctggagaccctgaagctgatcgtccgttctccgctggtcctgctgggcctggagggcaagtatgacgtcgtcgtccgcgtttccggcggcggtgtttccggtcaggctggcgctatccgtcacggcctgagccgcgccctgctgcagcagagcgacgagaaccgtcctgtgctgaagaaggctggcttcctgacccgcgatcctcgtatgaaggagcgtaagaagtacggcctcaaagccgctcgtcgcgctccgcagttcagcaagcgataatctacagcttaataatgctaaaaaagcccggaaatacgccattttccgggctttttctatgcctgaaatcgcctgattccgatggtgaaatttgaggaaatttgacttcaaattaacccattttgatg

SEQ ID NO: 636 - DNA, 6174 bp, unidentified
  source 1..6174: mol_type = unassigned DNA
ttattttccaatctcttctctagtctctttaaaacatttgataatgaaatcaatatcttcttttgtatggctcgcgcatacctgtgtgcggattcttgcttttcctttcggtacaaccggataagagaatgcaaccacatatacccctttttccatcattttctttgcatattctccggcaagtctttcatcataaagcataaccggtacacatggatgagttccttcgatgatatcaaatccattttctaccagctgcttgcggtagtatgcggttacttcttccagatggtcacgaagctcggtgctttcttccagcatattgaacatctcaatacttgctcctgcgattgccggtgcaagagagttggagaacaggtacggacgacttctctgacgaagcagatcgatgatctcttttcttccggatgtatatccaccggaagccccaccgagtgcttttccgagtgttcctgtaatgatatccactcttccttctacgccacagtattcggaagttcctctgccgtgtgctcctacaaatccaactgcatggctgtcatccaccataaccagtgcgttgtatttatcagcaagatcacagacaccttttaagttacagatgattccatccattgaaaatacaccgtctgtagcgatcagtttgactcttgctcctgctgcatctgcagcctgaagctgtgcttccagatcttccatgttgttatttttatagcggtatctttttgccttacagagacgaactccgtcaatgatggaagcatggttcagttcatcactgatcactgcatcctccgcagtcaggattgtttcaaaaagtccaccatttgcatcaaagcaggaagaatataaaatcgtatcatctgttcccagaaatccggaaatcttcttttccagttttttgtggatgtcctgtgttccgcagataaatctgacagaagcaaccccatatcctttttcatcataagttctcttcgctgcatcgatcagtctctgattgtccccaagtccaagatagttattggcacacatattaagaagctctcttccgtcttccattacaacctttgcgccctgcggagatacgaacggtgcttcccctttgaaaagaccatctgctttgatctgttctacttcttttgtataaatacttaaaatatcattttttcttgccattttattctctccttcttctgcttttcctaatcgttaatatgtgcccagtcaaggatcacctttcctgactgtcctgagatcattgcctcaaatcctttttcataatcgcggatatcaaaatggtgtgtgatgatcggtgaaatatcaagtcccgcctggatcatcgtagacatcttgtaccaggtatcccatacttttcttccataaattccgcggatattcagcccattgaagatcactgtctcaagatctacggttgcatcctgtctctgcaatccgagaagtgcgatctttccaccatgtttcatgttatggatcatatcagaaagtcccggctggcttccggacatttcaagtccgatatcaaagccttctgtcattccgatctcatgcatcacatccgtcagtttttcctgtgtcagattaacgcatctggtcgcacccatttttgctgccagatccagacggtactggttcatatccgtgattaccacatgtcttgctcctgcaaattttgcgatcgccgctgccatgatcccaatcggccctgcacctgtgatcagcacatcttcaccaagcatgtcgtaagataatgcagtatgggttgcatttccaaatggatcaaagatcgcatataattcttcatcaattgccggattgcacggccatacatttgaagcgggaataaccagatattctgcaaacgcaccgttccggtttaccccaacacctttagcatctttgcagttctctttgtgcccttccagacagtttctgcattttccacaagtgatatgtccttcaccggataccagatcgcccaccttgaatccctgtacacctgcaccgacttctacaacttccccgacatattcatgtcctgcggtcagtccgatcggaatagtatgctgtgcccattcattccactggtaaatgtgtacatcggtaccacagattgcatttttatggatcttgatctttacgtcatttggtcctacttccggaatctgtactcttttcagccagagtccctgttccggtttttcctttactaacgcccacattttattatcattcatcttcattacctccgcatgacacatatgtccgtttaacgcggactttttattacttttgtttttctatacttaggataccctatttttcttctcttttcaatctattttccgtgatacacaaacattttacatgttcatgtttttgtagcagatacaagcacatgtgtctttctattgcaagcacatttattatatatatacaaaaacagacagataaatctgtctgtttttcacaatgccctactgtcgattttcacaatttcgttctgtttataacaatcttttttctttctgatgtaccctttttctcacaaaatagaagcacacgacctgaagtacaatggtaaggatccatgacaccggataggatacaaaaagtacggataaagatctgtggttcggaaaaattccaaatacccacacaattcttgttcccaccgttccgatcactgaaagcaccatcgggactgctgaatatcccattccacgaagcgcacccggaaacaaatccatgatcccacacaggaaataagtgatcgatgtatacgccaggatttccattccgcagttgataacctttggatctgaagtataaattgtcagaatctgcggtccgaagcaataggcaagaccaccaagcactaccgcgatcgatatagacagaatcgcacagtcacgcagcaccttatccattcgtttcagcttaccgacaccataattctgactggtaaaactcatacatgcctgagttatcgaattcactgacatataaaggaacccaagcatattgttcgctgctgtatagcctgccatcgcaatcgatccaaatgaattaaccgaggactgcaacagtgcattggacaaattgatgaccgtactctggattcccgccggaactcccacctggaaaatctgttccatgtaggcaccattgatcttcagtttggagaaacgaagctgataacttccttccgaccggtacagacaggtcagtaccagcacacaggaaatcagctgtgaaataattgttccaattgcaaccccggcaactcccatatgaaaaagaataaccagtatcatgttcagcgcggcatttgcaattccggaaatgatcaggaagatcaatggcctttttgtatcaccaatcgcccttaaaatggccgccccatagttatataacataaaaaatggcattcccataaaatagatccgcatatataaggcagactgcccgatcacatcatccggcgttcccataatttcaagtgcccactttgcaagaagcaccccgataactgccatcataattccactgatcagcgcaagtgtgatcgaagtatgtactgtttccgacatctcccggtctttgcccgctgcataaaatctggctgcaagaacattggcaccaagtgaaattccgataaacaggttcgtaaacacattaatcagtgctgttgtggagccgactgcggcaagtgcctgactcccggagaatcttcctaccacgatgatatccactgcattaaacgcaagctgcagaattccggaaaccataagcggcagtgaaaaagagatcagcttgtccatgatggagccgttgcacatatcaatttcaaacttattttttttcacattattcacccagcccttcatcaaatgtaagtctcatctgattccagaccacgtttccatgtactgattctgagacaccttcatttttgaatccaaacctggcataataagatatcagccggtccttgcaggtaaggacaagtccctttcttccctgcttttttgcatctgtaatcgctcttttgatcaattctcctgcatatccatgtttccggtaagacggcagcgtatttacaccaaaaatcatctgccagtcacctttttcatcatgcatttccgctttttcatacatttcgtctgtcagatcttcctgattcgtcaccataccgtccacgaaggcgatcaacttctcttcttcaaacatcagccagaaatgatctttataaaaagtaagtctcttttcaaattcttcttctgttgccgcttctgctgccgggaaacacgctgcctccacacgggcaatttctttcagatcactcagatctgctgttcttattctcatctttactctccctctttttctaatattttcagcattttttctacattttcgctggtccatgccggaaattccagtaccgcatccgggatatcctgccttccagaatccgggttgtggaaccagatacatttcataccggctgctctggcagctcctccaccgttagtcgaatcctctactaccagacagtcctccggctccattcccagtttctctgccgttacaaggaaagtatccggtgccggttttggatgctctacataatctccactcatgaccactgtaaaatatttctccatatccagagactttaatgcatctttgatcgcataagccggagaggaagacgctactgcaagcagatatccttcgtcttttaactgcttcaatgcttctttaattcccggcatctccggaaatccttctgcctctgtaatctgcgcttttttctctttcatgagcgcattcatcttatccacatcatcaaaaaccggcccataattctcattgatcaaatccatgaagaatccacgggtagaaccgatacacggaaggtaaacctcatagtcaagatcgattccgttcttctcttttaaaatttctttccagcaacgatagtgtaatggttctgtgttgatcagaacaccgtccatatcaaaaataactgctttcatatctttttagcctcgattaaatgatttaaattctctttccgttcttattttgaatgacgtttttaaagatgtcaagacggagaagctaaaaagaatgtgccaaggcacattctcgcgccgagcgcagtcgcttgcgacattcttcatcttcgtgcgagtgcgcatctccggcacacagtgccttttatttcataggaaatttcttcggaatttcctatgaaataaaaagagagcgactgtacgattcaaaaaacgcacaggcactctctttggcttttatggatttttcttaaggtctctgtcccattccgccttctaaggtgatcgtctctccgttcatatatttgaaatccggtgatgcaagctgtacgcatgcacgtccgatttctttttctacatctccgtaatgtccagccggcggcatctttacatttgccttgaatgcttccggataagctttctggaaattctcaagctgtgctgtccatgcgagcgggcatacgatattgacattgattccatctggtccccactctgttgcagctactctggaaagtccacggattccttcttttgccgctgcatatgcgcactgtccgtaatttccgaaaagtccggcacctgaagcaaagttgataacagatccctttgtctctttcagatacggataacatgcctgcatataatagaataccgcatatacgccggaatacattgccagattgaactggtctgttgtatgatctgcgatcgtaacaccagatgcggatgcctgtgcattattgatcaggacatcaattcttccgaatgtatcaattgcctgctttactacgttctgtactgttgcttcattatcagcccccgcgctgacatcagcctgtacaggtaatactttgataccatagagtctctccagttcttctttggcatcttcgagtttctttacattacgcccggtaattaccagattcgctccttcttttgcgtaagctgttgcaattccatatccaatagatccgcagcttccatcacttaatacagctcttccgccgcctgtgataattgcagtctttcctgttaaaaatcccat

SEQ ID NO: 637 - DNA, 22825 bp, unidentified
  source 1..22825: mol_type = unassigned DNA
cctcacgggaacattgttagccggtgtcggttgtaaagactacgacgacgacatcgacaaacttaacgaccgcctcgacgagttgaccactggtaaaattgcgactctggagtcgcagctcggttcgttgcagacagccgtcgacaacctgaagagtgccgatgatgctctcggaaaacggatcgacgagctcaagagcgacgctgacgccaatgccaaggatatcgaagctttggagaaggcgcaggatcagctccagaaggacatcgacgccatcgaaaaagaccttgcggacaattatgtaactaagagctatctgaacacgacgctctcttcgtatgcaactaccaaatatgtgggtgacgccgtagcggctgttacgaacaatcttggtaaattcacgacggagaaggctattcaggatgccatcaacgcagcaaaggacgcagctatcgcggctgccggcgacgcttgcaaggatgcattccagacgtcgttcaatgctgccgtcgcttcggccaacctcgtcaatgagaccaagttgacccaggcgatcaacgactacgacaccaagatcaagcaatacctcgaggatgccattacgaaagaggacggtttcatcaacaaggccattgccgaggctgtcagcgatgctgtcgcagacctgcaggctatgatctccggtcgtctgaccagcgtgctgctgatccccgacctgtatgtcaacggcatcgaaaccatcgagctgaaatcgctttcttacgaggcatggaaagtaacctcgagcgcatcggccgagaccgtgacacaaggttcgacgacctcgacgactgctgcttcggctacttcggtacgctacaacgtaagcccctcggtcgttacgaaagaggatatcaaggatcccagtttcgtgttcgagaaggctgaagttcgcacgcgcgctgctgtcagcgagcaactgctgaacgtcgcttcgtgggatatcgcaggcggtgtgctgaccgtagacgtgaagaagacagcaggtaccgctcttacgctggatgcaaaacacatctacacggctgccctgaaagtgcccctcgcagacaaatacctcggcgaaggcgaagtaggcactgccgtatattcggactatgttgcgctgaccgaaacggctatcgagccgaaaatcgccgccctgatcgacctgaactcggccaagagcgaggacggtgaattcgagtgcgatgaagcagcggatcactatcacttctcggctgattatgaggctgcacaggctgccgatccttcgttcaccgaagcatacaacaagccgatcgacctgctgtcgatggttaccggttgctatatcgacgatgatgaagccaaagagatcaccaaggaagcgctcaaggctgccggcctcgagttccgcttcgtactgccgaccaagccttacaaggtaggtgacaacgataccgaccagcagaaattcgccagcgtagccaatacggacggcgcgtggacgctgacctcgaaactgcccgacggcacgactaacaaccaggctgctatcgacaagacgccgatcgtacgtgtcgagctggttgacgtgaacaacaagaacgccgtcgttgacgttcgttacttcaaggtacagtggctgaaggagaagatcgctccggttgacctgaaggttctcaagacgttcgactacacgttgacttgcgatgccttcaagggttcgttcacttgggaagagatggttaccaaggtactcggcaaactcggtgagaacggtctgtcgcaggctgagttcatcgcaacctatgctgctcccgaaatcgccgctaccgatcataccgtaggtaccgtggcccaggccgctgctgacggtgtcgagctgctttacaacttcgacgctactgctgccgagtccgctgccgccttcacctggacgctgacgcccgagcagatcggcaacgtgatcgccgacctgattgctggcaaggaagtgaagaaggttgtcaatgtgacgatccctgcacagaacgtataccagggcaaactgaccttctcgttcgttgtgaacatcaagaagccgaccctgccttcgatctacggttacgactcttcgttctggcactccgattacacgctggcttatgtttacccgatccagtacaatacgcccggtgcatatgcgacctgcgcataccgctatgaactcgaccgtctgttcgccgacagcaagcccgtcacgaacctgctgccctgcggcaaatgggatatccagttcgccaagaagcagcctgctacgggttacgctcccgcactgacgggtgccgaacctgccggtgaaaccgacgtgacgggttatacgctgaagaagggtgttatggatgccgtcaagctcaactacaacggtatgggtgacaactggtatgctcccgcaaccacgaacccgggtgccgtcaataccgccgccgctgccgacatcaccgtacaggtgctcaataacgaagccggtatcgggatcctgaagcagcaggcaacgctcaaggtatgggctgcgatcaacccctataaccacatcgagctgacggatttcaacgtatatttcgtcgagcctctgaagatcaacaccgagctgaccgacgcctacttcgtagaccagatcatcagcggttccgaggttgactgctcgaaggccttcaccatgaccgacttcaaggactacatcgtggctgaggtgacgaccggtacggacgagaaggagaaatatgcttccgacctctatgcttactatgcagtgaatgcccccgcttgggatctggccaatgccaagaccaacctgaagaaagatgccagcggcaactacgtagtggatgggacgatcacggcacagactgccacgatcaaggctgaagaccgtttcggtgtgaactgcatcaccaaggatggctcgaagcttgtcttcaagaacatcaacggagtgaaggtcgagaaaactgtgaagctcttcatcccggttaccgttagccacaagtggggcacgatgaccgccaacgtgacgatcgagctgcaccccgaagagcctgctaactaattctgatcctttccgcggaatccggcgctgcctcgcagcagcgccgggaacccgggaaatactccctaaggcaggggtcgcacatcccaaatttttttggtaacaacaactcccactttcaagtaaaactcctgcctgtggcagaccgaagaggcgcggtctgccgctttttttatgcccggaagtttccctgcgttctctcgatccgcattgtgggttcgttaccctggagcccgtttttttcggggattgaggcttttgtgcggctcccgtttctcgtgtggttcgcggttctcgcgcggattgcggctttcgggcgatcgcagggctgcgggcgcggagtgccctggtatttatgaaatatccgtcgttgcatcgggcagcggcggatattcctgtctatttcgggctgttggccggtcggggatgatggacgaaaagcagccgggatctgcggatcccggctgctttgctattcggttagtgtgtcgtaaatttttctttcgcccgttatttcgcctttgcggcctttgccgccacagccttgtccagttcgatgatgaaatccgagaggacattcatgtagttgatgaaagcgtcgtaggcggaatcgtaggggttgaaataggagtgtacgtcaccgtccgagagccatttggtagccatgtaatagaagtggtcggaggtctgcatgaaactccacacatagtcgaaatcggggtttttcagcgctgcgatcttctccttctgggcgtagagcttcgagaacgcttcgttctgcaactcgttgccgagccatgccgtcacgtcgcgctcctcatcggcccatgacatcacgtgcggacagtggagcaccgctacgggctggtatttcttggcggcttcggtgacggtcgcgaattccagtccgtttttcttggcgaggatcgccttcggcagcgcacgcatgaactcgaagattcccgtgtcggcggtctggtgttcgccgaaggtttcgtagtccatgaagaggttgatgacttcgcccggggtctcgtccgaagcgagccatttcacatatttgtctgccgtcagcggccattcgtcccagttgcggttcgagaagcggaaggcgatgtcgtccgagagcttgtagttgcgcagcagcaggcgcagcttctggttgacagcgttggcgtatacatagttgggcgatttccagcccagcacgtgtttggcgccttcagccagcatcgtacggaagcccatttcggccacggcggcgccgatgtcgtcggagtagatcagctccgtattgcggaaggcggtcggtttcaccccgaattccttttttatgagcgccgtgtggagctttacctgttcggtgaaatcctccttcgacgccagcgatgccaacgagtgggagtaggtttcggcaaggaattccacgcagcccgtggcggccagttccttgaacgattcgaggacttcgggtgcataggcacggaactgttcgatagcgatgcccgtgatcgagaacgagcagcggaacttacccttgttttcccggatgagcttcagcaacagggcgttcatcggcaggtagcattgccgggtgactttctgcatgatggagcggttcagcaggtcgtccagatagttgtgatccttgcccatgttgaagaagcggtacttcttcagtcgccagggctggtgtacctgaaaatataagcagacggttttcatagggtagctattttattgttttttattctcttcgatcaccgcttcgtatacggttttgattttggctgcggcatcgttccatttcaggtttgtgacctcttccaggcctttcgaggcgaacatccccgcaagcgccgggtactggatcagcccgtagatggcatcggccagggcatcgacatcccaatagtcgaccttcacggcatagtcgagcacttcggccacgccgctctgcttggagatgatcaccgggacgttcgaacgcattgcctcgaggggcgatatgccgaacggctccgagaccgacggcatgacgtatacatccgacagctggaacatcttgtgtacatcctcgccgcgcaggaatccggtgaagtggaacctgtcggcaatgcccagccgcgccacgcggcggatgacgtggttcatcatgtcgcccgagccggccattacgaaacgtacgttggggactttcttcagcaccttggccgcggcctcgacgaaatagtcggggcctttctggtaggtgatacgccccaggaacgtgacgatcttgtcgtccacgccccgttcgggcattttgcagtggcctccggcgaaccgcacggcattgtgtaccgtcacgaccttgtcggccgggacgccgtagcggttgatgacgatgttgcgcgtgaggttcgaaacggcgatcacccggtctgcggcgtgcatgcctgcgcgttcgatggcgtagacctgcgtattgacgttctcgccgctgcggtcgtattccgtggcgtgcatatgcacgaccagcggcttgcccgatacgcgcttggcggcgataccggcgtagtaggtgagccagtcgtgggcgtggatcacgtcgaactgcccttcgaggtctttggccacctgcgctgcgaccacggcatagcgggcgacctcctccataaggttggcgccgtacttgcccgagaaggtatagcgttgtttccaggcatcggtcgtcgaccagactttctgtccggatttgacgtagcgctcctggtactgttcatactcttcgggggagatataaggtaccatgttcgagtcgatatggatgaacgacatcttctcgagaatatcgtccgcgccgcttcccgtagatccgtaaagcgcctccacgtcactggcattcaggacgtgcgtgaatcgctgatcctcgtcgccgtaggcatggggtactacgaatgttacgtcgacatcgttgcgtgccagcccgcgggtcatcccgtaacatgccgttcccaaaccacccgcgatgtggggcgggaactcccaaccgaacattaaaactctcataactatatccttgttttgcaatttttacctttcctctcacaggaacgtcccggctcacggccacaagccgcggttgcaagtccggacgccccggaatcccgccttggcaggattttcctcccgtcacagcctgttatttcccagtctttgtcttttttgtcgcggcctttgttgcggccggctttttttccgtcggtttcttctccgcactctttttcgctgcggatttcttttctgcggcctcttttgcgatggccgtctttgccgcagttttctttggcatattgtccgttgcggttttctttaccgcagcttttttggcaatgcttttcgccacgggcttcaccgccttcgcggctttccccgcggttttgctttcccgggcctcctcctgcgtgcgctcgcggatcatgctgtggatattgagcacggccccgacgctccacgcctgcgagatagccccgcgcgatgcatagggcgggtcggcatcgtagagctcacaaatcgacccgatgccgtagctctggatgtcctcgtcgaaattggcgagtatctcccgggcctgcggcaggaatacgtccctgtcgatatcgaaacatgccttgacgtagaattgcagcagccagggccatgccgaaccgttcttgcccgcgaaatcgcgttctgcgggcgatcctccctccagcgaacctttgtagagcaggttgcggggcgagagtgtccgcagccccttgggggtgagcaggtgctggcgcacggtgcggatcacctccagttgcagctcttcgtcgagcatcttgtaatccagcccgcaggcgacgatcatgttggggcgcgtcgatttgtcgggcccgtccgtccctacgaaatcggccagataaccttccggcaggcggaacagttctacgaacgacgcctgcgtgcgtgccgggagcgactcccaggccttgacgaaggctttgtctgcgtgtttgccggccagttcgagcgcataacatacggcgttgtaccacaaggcgttcacctctacctggtaaccgttgcgcggagtgacggggcggccgtcgatcacggcattcatccacgtcatcgggatgtcgtccgcagcggcccacaccagtccgttgtcatgcagcgcgacgcggccgccgactccccggcggtagctctccagaatatctttcatggccgggccgtaggctttccatatctgcttgccgcccacttcccgttcgagttgctggagcgtccagaagaaccacagcggggcatctgccgcgacggccgccgaggcgttgcccgtgaacataccgtcgcgcatttcgcgcaccagcgtgtcgagggcgtcgatacagtcctccttatgcccctgttcgagcgtgatgcccgggagcgatacgaaggtctggcgccctgaaaccccgtgccacggatagcccgacaccacttcggtgcggtcgccgggacgccggatgacgaattgccgcgccgaatgctccaggcagctgatgaagtcgatcttgtgcgtgcgccgggcgatggatgcggcgaatacctcttcgatggtcttgaccgaacccatttcgtcgagcgaagccgagaagatgatgctttcgcccttcttgagttccgtttcgaaatagcccgtcgtgagcaggtcttcgtaaccgtcgtaaccgcgcgccagatcctgctggtattcgaatccgtagtaccagtcgggtgcgggcacgaactccgcgccgggcttgctggtttgcaggtatagccacgggaacgacccgtagaggcggcatttcacgccgttgaccgccgggtaggagtgcccgtcggcatccatgttggcatgcgtcagcgcatgtttgtcgcgaaaggcaaggaagggccgcagccgcaggtacgtttccgaatgcgcatcgacgagcgtatagcggatcatcagctgtgtgcgcttgtgtatccacagcatctccttccgcaggatcacgccgcccacgcggtaggtgatcgtgggggtcggcgtatatttgaaatcggtgatatacttgtgtccgcgcggctcgtatacccccttgaagcggtgcagggccaggttgaatgtctggtcgtgctggacgatggtttcgtcgagcgacgagagcaggacatacgtcctgtcgctgtcgtcgatgggcgctaccatcaggccgtggtagcggcgggtgttgcagcagacgatagtcgtgctcatatatccgccgatacggtctgtggagagcatttcgcgctggagcgaatactccaggttgcccaattcgcttttgtcgaaagtaagtgctgacatgtccttcaaaaaaatacggttcgttctataaagatagctgaattttcatgaaaagacaatcgcatttccgaaaattcatatcttttttacattattaggcccaaattcgctaagcccattttaccaatgcaaaatccatgcgatggggcaggtgcgggttctccgggaaaatacgcagcgccacgtcgaacgtgccggcttcgtcgggcgtataatccagtgcgtaggtaacgcggctgccttcggtcttggtgtgcttgagcccgatcgtgcgcatcacgttggcattctgcccgccgacgatctgctgtgcgatgaccatctccacgccgatgtcctcgggacgcaggctgacgatgtccacggtcacttcgaaatggtacttttcgcctacgaagatcgccttgttgtcgattttcacacgctgtacgtcgatcacacggatctgatcccataccgacgagaccttgcgtttccatgccgcgatctcgcgggccagcttgtagccgccttcgacgatccggtgcttgcgtgccgcgagcttgttgtagaaccgctcctcgtagtcgttgagcatgcggttggtcgtgaaattcgatgcgatgtcggcgacgcatttcttgaccgactccacccatgcgtggggtacgccgtccttgtcgcggtcgtagtatttcgggacgatctgctcctcgatggtgttgtagatcatttcggcgtcgagctcgtcctgatagtgctggtcggcgaaggtgcgctccatgggcagcatccatccggcgccctccttgtagccttcgacccaccatccgtcgagcaccgagaattgcagcacgccgttcatgacgcacttctcgcccgacgtccccgaagcttcgagcggacgggtcggggtgttgagccatacgtcgacgccctgcaccatgcggcgtgccagctccatgtcgtaattctgcaggaagaggatcttgcccacgaactgcggcatggcggccacctcgacgatgcgtttgatgaggtcttgccccggcttgtcgttggggtgggccttgccggcgaagatgaattgcacggggcgctccttgttgttcacgatggccgagagccggtcgaggttcgtgaagagcaggtaggcgcgcttataggttgcgaagcggcgtgcgaaaccgatggacagcacgtcgggcttgatgccctcgatgacctgcaacatctggcgcggcgagtcgagccgcacctggctggggtcgctgtaacgcttgcggatatgcttgatgagcttgttcttgaggtgcatgcgcccggcccacagctccccgtcggggatgttgtggactttctgccatgccgggatgtcgtaggcgtgcccctcgaagccgtcggcgaaatagcgggcgtagaggcggcgcaggttcgtcgcgatccatgtcgggaagtgtacgccgttcgtgacatagccgatgtggagttcgttcttgaaataacccggccacatgttgcccaggatctccttcgacacttcgccgtggagccacgatacgccgttgacctcctgtgagaggttgcaggccagcaccgacatcgagaacttctcgttggggtcgttggggttggtcttgcccaggttgatgtactgctcccaggtgatgcccagcacgtcggggtagtgcgacatgtactggcggatcatcgactcggggaaggcgtcgtgcccggcgggcacgggggtgtgcgtcgtgaagagcgacgaggaacggatcacctccagcgcctccgagaaggagagcttcttgtggttcaccaggtcgcggatgcgctcgatgccgatgaacgcggcatgtccctcgttgcagtggaacacgtcgtgcttgatgcccagtgcgcgcagtgcgcggataccgccgatcccgagcaggatttcctgcttgaggcggttctcccagtcgccgccgtagaggtagtgggtgatctggcggtcttcctcgaggttggcctcgaaatccgtgtcgagcaggtagagatccgtgcggccgacctggcatttccagacgcgcgccgaaagcgtacgccccgggaaggcgatggtgaccgtcagccagttgccggcttcgtcgcgcacgggcgagatcgggagtttatagaaattctgtgcctcgtaggtcgcctcctgcgccccctgtgccgaaaggcgctgcgtgaagtagccgtaccggtaaagcaggcccacggctgccatcgggacgttcttgtccgaggcctccttgaggtagtctcccgcgagtatgcccaggccgcccgagtagatcttgagcgacgagtgcaggccgtattccatcgaaaaatacgaaatcgtgggggtcttcgggtcgggtttttcgttcatatagtcgcggaactgcgcatatacggcgtcgagctgcccgaggaaggcctcgtcgcgttcgagccccttcatgcgttccacgctcagtttgtcgaggaaagcgatcgggttgcgctcgcattcggcccagagtgccgggtcgatgccttcgaacaggtcgcggggcccggggttccagcaccaccagaggttgcgcgaaagttcttccagggcatgcaggcgcttgggcagggtcttgtcgaccatcatgcggttccagttgggcttctcggcgaagagctgctggcgtacgaaattgatctgttcgttgcgggcgttgctctcgtcgagcacggcgcggttggtacggatcaccgaactttcgacagcctcggagtaggcctgttcgtaggcggcgaaaaggtgctcccagagcgcagtttccgatatctcgtaggccgaaacgcgcatctcggagacatgtttctcgtccagcgcgctgaagcgcagcagcgagtcggcgatcttctcctcgacctccttgtcgttgtagtcgtcgcggcggatgacctccacgcccaggtgctcgcgctgcttgtcgacccacagcccgaaccctgcgagggtcgtggtgatggtcggcaccgagaatgccaccgattcgagcggcgtatagccccacggttcgtagtaggaggggaataccgtgatgtccataccgacgagcagttcgtagtaatccttgttgaagatgccgtcggccttgttcaggtaggtcggcacgaagatcaccttcaccttcgaatcgtcggtcgtgaggatgctgccgttcagggcgttcacgatcgggtcgctgttctggtattcgaggtaatgggtcgaatacttgtattgtccgccgtcgatcgggctggccgggtcggccaggtgtgcctgcaagtccgcacgcgggccgcggttggcggccggaacggtgacataggccaggacttcgcgtttgagacggtcggaggcggccagctttttgagcgactcgatgaatacgtcgagccccttgttgcggaattcgtagcggccgctggtgccgacgatcagcggttccttccggaacttgtgcccgaggcaggcttcggctaccgagatcatcgccgtgcgggcttcggcacgtttggcgtcgtactcctcgcccgtccatacgaagtcgttttcgaacccgttgggggtgatgccgtccggttcacgccccagcaggtatttgcattcgttggccgtgatgtcgctgaccgtgaggaaggcgtcgtggtatgtggcggccatcttctcgatcgagtgtttggccacgacgttgaactgccgggccagttcgtcggcattgaacttggccaggtcgttgtagagcggcaggccgttgccggcgatgcagcgccccatgaccgtggcgtgcgtcgtgaagagcgtggccacatagggggcgtgtttgcgcaggtggagtccgcctgcggcggtcatccactcgtggaaatgcgcggcgatcttgtccgtcgcgttgcagaaattgtcgacatacgaggcgatgaccatgcccgcggcatagccgaagagcacgggctcgatgtagtcccactgtcccgagagcgaatccacgtggtacgtctcccagagtttcttgagtatttcgtctttgcgggggatcagcgaagtaaagtccaccaggatcaccgtcggctcgcccttgatcttccagtgtcccacgcggatccggaggccgtcgctgtatacgctctggcgccatgccttcagcatgtcggggtcttcctcgaattcggggttcgccccctcgtgctggaggtcgggcccgatgaggatatagcggtcggcgaatttacgggttacggtctgtgctttggtcgagatgacggtatggatgccgccgaccttattgcagacctcccagctcacctcgaaaaggtagtcgggagtcagttttgcattactcatatttgtcgtgcttgtttgtaatttactcgatgaatcggttgaaaaccgctgcaaaggtaatacttatatttatataaaacaaccttgttcgattaattagtaaaaatatttaataataacttaacatttctgtttcacatcgttgcatgtcgtgttatgtttcgaaaagtgccccgatcacggcatccgaaatcaggaatttttccggcgggagggccatccgcccccgggctatgcggagcgtacccgaacggaggaacggtgctgcctcttcctgcatccgcgccagccgttttgctccgaaacgtgccgcggcctcttccagatcgatcccctcgaccgtccggagcgccgtcatgacatattcgttgaaccggtcgcgtcgggtcagcacttccttcccggcgggagcgcctgctatgtatttttccactgaactggcgttccagtgcctttcttcgccgtcgaacgagtgggctgcgggcccgatgccgaggtatttcgtcccatgccagtaggaggcgttgtgacgggctcgaaatcccggcagggcatagttcgaaacctcgtaatgctcgaatccggcggccgtaagcgtatcgtgcaccgtgaggaactcctcctcgctgacctcttcgtccacggcgcggaactcgccccgtgccgcacggcggccgaaggccgtatcgggttcgatggtcaaatggtatgccgaaatgtgctgtacgccgagcgacagcattccgtcgagcgatcttttcagcgaatccccgccgaagccgggaatgccgaagatcaggtcggcggtgatgttcccgaacccggcgcgttgtgccgcccgcaccgcaccgatggcctgtgccgccgtatggcggcggttcatcagcttcaggcacccgtcgtcgaacgactggatgccgatcgacagccggtctatgcccgcttcgcgcagcccgtcgaggtaattttccgtcaggtcgtcggggttggcctcgagggtggtttccgtggtgccggagcagtcgaacagcagcgcggcatgatccagcagtcctttcagcgcggcgggtgcgtagagcgaaggcgtgccgccgccgaaatagcgggtcgtgaccgcttcgccgcgcaggtaatcctgccgttcgtccagttcgcggtgcatggcggccgttacgccgtccatctgctccagccgggcgctcttgtagaagtcgcagtaggcgcagatgcgtttgcagaacggtatgtggaaataaagcccggccatggtctatccgagtttccggggagcaggagcttccgccgaattgccggcgagtgcctttatcgcctttacggttttccgtccgtatctgttgaacgtaaatattccccccgccatgttataccacgggtcgtagaccagggcccaccggatttcgtcgcttctccaccccaagatcagcaggtcgcagtccagaaaggggatgccctttcggtttacggcctgcaaataacgctgattgtcgtattcgatcctccatcccccgtcggccagcagtttccgtatctgctctttcagtccgtcgtgttgcccggagagcgggatactcttgaatttcagtttccggcattggatcgtatagagggcaaagccggcgccgaatagcagaagcgcggcgagccagtaccgatcccagaatccgtgaatgaggtcggagacgaaataacagcagaagaatgtcccggaaataaccaacacgatggagaaactatggtagtttatccattcgatcgaaaacggtttcaggcagatcctgtcgtggcgtatttttatcgggcgcattattcggaacgagtaacgatgtttttatagggctgacttatcaaagatagaaaaaattccggtatatcgtcccctttcgttccggttttttcggagttcgtgcgtcgggttcattccggctgccgggcggattgtcggaaaatacttccagttccctgattgcgatgcggttgccccgcagacgccgctcccgtcattgcttatgtccggcggtgtttcgtcgggcgggcatgccgtgcgccgtcgatgagtgtttcgaccgaagcggggcctatgcgtccgcctcgaattccatcctgcgaagcgccgctgcggattccggccgtatgtttgtggtagggtatcgagccggctttccgtgcgactgtccgggatgcggtacctgcttataaatgaatcatatacgcttatcggaaaaaataatggattttttttgcttttttcactgttagttttttcacaagtgtaaaagtttttctacctttgtgcggttaaagtccggtcttgcggattttcgacgttaggttaatcaaggatttgatgttttattaaaataacaattattatggacaaaatggatttgaaaaagtatgggatcacgggtgtgaccgagatcgtgtacaatccgtcgtacgacgaacttttccgcgaggagaccaagaaggggctccgcggtttcgaaaaaggccagctgaccgagaccggtgccgtgaacgtgatgaccggcgtttataccggccgttcgcccaaggacaagttcttcgtaatggacgagaccaccaaggatacgatctggtggacttccgatgaatataagaacgacaacaagcctgttacgaaggctgcctggaaggagctgaagaaactcgctacccaggagttgtcgggcaagaaactctatgtcgtggacactttctgcggcgccaacgagaattcgcgcctcaagatccgtttcatcatggaggtcgcatggcaggcccatttcgtaaagaacatgttcatccgtccgaccgacgccgaactggagaaatacggcgagcccgatttcgtggtgctcaacgcttcgaaggccaaggtcaagaactataagaaactcggcctgaactccgagacggccgtcgttttcaacctcaccgagaaaatgcaggttatcctcaacacctggtacggcggcgagatgaagaagggtatgttctcctacatgaactacctgcttccgctcaagggcatggcttcgatgcactgctcggccaacaccaatgccaagggcgagaccgctatcttcttcggcctgtcgggcaccggcaagaccacgctttcgaccgacccgaagcgtcagctgatcggcgacgacgagcacggctgggacgacgacggcgtattcaacttcgagggtggctgctacgccaaggtcatcaacctctcgcaggagaacgagcccgacatctggaacgccatccgccgcaacgcgctgctggagaacgtgacggtagacaagaagggcaagatcgactatgccgacaagtcggtaaccgagaacacccgcgtttcgtacccgatcttccacatcgagaatatcgtgaaacccgtatcgaaagccccggctgccaagaaggtgatcttcctttcggccgacgcattcggcgtgctgcccccggtttcgatcctcaatgccgagcagaccaaatactatttcctgtcgggcttcaccgccaagctggcgggtaccgagcgcggtatcaccgagccgaccccgactttctcggcatgcttcggcgcggcattcctttcgctgcaccccaccaagtacggtgaggaactggtgaagaagatgaagaaggccggtgccaaggcatacctggtgaacacgggctggaacggtaccggcaaacgtatctcgatcaaggatacgcgcggtattatcgacgccatcctcgacggttcgatcgacaaggctccgaccaagacgctgcctatcttcgacttcacgatcccgacggagctgccgggcgtagataccaagatcctcgacccgcgcgatacctacaagaacgccaaggattgggacgtcaaggccgaagacctcgccaaccgcttcgtgaagaatttcgtgaagttcacgggtaacgaagagggtaagaagctcgtagccgccggcccgaaagtgaaataatctctgaataaagttttgaatggtagaaccccgcgccggaaggtgcggggttctttattttgcggcattgcgtatgctgcgatgggaggggcttccgtatcctcggaagggctcggatcctgtttcccgcggggcgggttgctgcctgccgcgattccgggttgtcgcctgaccggggcggggttgtggcgggtgtgcctcggaagggcccgctgcaatttaccccgggtttaggttcccgggccggccgctgtttccggttgcccgcattccgggagtactgctccctttggttccggagttgcggactttccgtgcatggctgcctgccgcagtctgcaactgctgtttagcgcacgtccgctgtccgctgtttgttgcggggcgtgaagatgcgatacccgatcgagacgccgatcttgttgggataccactccgaagagccgttgaacgggtcggggtgttcgggttgtacggggcggtgggggtacatgtcgacctggccgtcgaaactgtacccgttgtaatggctgtccatccatgcccaacccaggaaagcgtcgagcagccagcgtttcccgaactggtattcataacccacgcagaggccgatcatcatgccgtatcctttgcagtaacggtcttcgaatttcagtttccacccttcgatgtaaggtttcgacatgtcgaaggccatcatgccgatgtttgcccccaggtaccagccccggttatgctccttgaaatagcggcggtattcgcccatgaagatggcgaagagcatgtgcttttcgttgatcgacttccatggcgagatgacgatgtcggtctgcaaggtcgatttgggcgagatggcgaactccacggcgggattcaccacgcccaccagagcataggggacattgagcttgacatatccctgcggggatgcctgctgcgagcagaacagtgcgaacaggcatgccgggatgcagagcccgaagcggatgtttttcataggcggatcgttacaacggacaaagatatgaaaaaatccggccaacatactgtgctggccggattttaactatgtgctggacggatttataccgtcatgatctccttctcctttttctggagcgcctcgtcgagggtcttggtgaatttctccagcaatttctgggcctgtgcttcgccgtccttcgactcatcctcgggcataccttctttttgggctttcttgaatgcctcgaccgcgtcgcggcgggcattgcgcaggctgatgcgggcggtttctgcctcgttgcggatttgtttcaccaactccttgcggcgctcctcggtcaggggcgggatcgacaggcggatctgctcgccgttgttcgaaggcgtcagcccgatgttcgagtcgatgatggccttttcgatcgcacgcagcatgttcttgtcccacggctggatcaggatcgtcttggcgtcgggtacggtgacgctggcggcgcccgatacgggcacctgcgagccgaaataatcgaccattacgccgttcagggcattgggcgacgcttttcccgcgcgcacgttcaaaagttcctcttcgaggtggtcgatggccttctgcatacggccggaggcatcgttgagaatcgtcttggtatccatattattcgagtattttttcgatggttttgatcatttcgtcgaactcttcggcgtcgtaacctactgttgccagcacgactttaccatcggcgccgatcaggaaattccgcgggatataattcgaggcataacggtcgtaaatggcctgcgaggggtcgaggcccatcgggaacgtatagcccgtcttttcgcggaacgccgccacgtcttcccgcttttcgccgcgcgatatgggcaggaatacgaagttgcggccggcgaaacggtcgatgatgtccttctgcacgcgggtcagttcctgccggcagggcgggcaccaggtggcccaaaagttcagtaacacgactttgcctttgagttctgcgagggaggtttttgtgccgtcgaacatctctacggtgaagtcgggggctttgtcgcccgccttgaccagcgtggtcgattcggtatccgcctcggctttgccgccgcggctgccgcacgagggcagtaacaggattgcggcgatgatcactgcgatcagcgccagcatgatccatagctgcttgttgctcttttttgtggccataatcttatttttttacaagtgtcccgatcctctccccggcaagcaccttgccgaggttgcccggcgtgtccatgtcgaagacaatgatctgcagtccgttctcgcggcagagcgtgaatgccgtgagatccatgactttcagccggcggtcgagcacctcttcgaagcttatttcgtcgaatttgacggccgcagggtctttttcggggtcggccgtgtatacgccgtccacgcgggtgcccttcagcatcacgtccgcctcgatttcgatgccgcgcagcgccgaagccgagtcggtcgtgaaataggggttcgacgtgcctccgccgatgatgaccacataccccgcctcgaggtattcgatggcacgcgccttggagtagtattcgccgatgggctccatgcggatcgaggtcaggactttggccttcacgccgttgtcctccagggccgattgcagggccagcgagttaatgatcgtggcgagcatgcccatctggtcgcctttcacgcggtcgaagcctttctttgcgcccgtgaggccgcggaaaatgttgcctccgccgatgacgatgccgatctggacgcctgtggccgcagccgccctgatttgttcggcgtaggactggagtacttcgggggagagcccgtatttctgcgaaccttgcagcgattcgccgctcagtttcagtagtattcgcttgtatttcattgtacgatggggtttaccgtaacgcgaagataaaaatttttattgaaaaaaacgcaagaatgactatctttacagaaaataggcggtatggcggctatgccgggaaaaaacggcgccatgtccggtctgagctgttttacggaacacaggcttcgccttggcaatgtccgaataaatttggcattgtgctcggcttgtgctatctttaacctcgtttcagataggctgcggttcggacaaactcaaacaagtttggtttgtcgcgctccttgcgctatctttgtgctgccatgacgttggatgaatacaaattactccgaaaaataaattctccccgcgacctcaagcaactctcggcggaggaactgcgtacctactgcgacgagctgcgcagctatatcatcgacgagtgctcggtaaatcccgggcacctggcgtcgagcctcggctgcgtggaactcgccgccgcactccactacgttttcgatacgcccgcggacaagatcgtctgggacgtagggcaccagacctatgcccacaagattatcaccgggcgccgcgaggcgttcaagaccaaacgcctgctgggcggcatcagcggtttcccgcgcatgtccgagagcccctacgacgctttcgggggcgggcatgcctcggtgtcgatttcggcggcgttcggcatggccaaggctgccgagatgcggggcgagaggcatcaggtcgtggctgtcatcggcgacggttcgatgaccggcggcctcgcgttcgaagggctcaacaacgccggggccagcaaacgcaccaatatcctggtgattctcaatgacaacaacatggccatcgaccaggccaccggcgcattgaagaactacctgctcaaaatctccacatcggtgcattacaaccgtttcaagcagcagttgtggggcatcctttcgcatacgccgcgcctgctgcgcctctgccagaaggcgggcaacgccgtgaaacagggggtgctgaacaagagcaacctcttcgagagcttcaatttccgctatttcggccccgtcgacggccacaacctcaaggagttggtgcgcacgcttcaggcattgcgcgacatcgaagggcccaagttgctgcatgtcatgaccgtgaagggcaagggctacctgcctgccgagcacgaccagtccacgtggcatgcccccggacgtttcaatcccgatacgggcgagcggatcgcctcgccgggcgctgcggcgcgttaccaggatgtcttcggcgagacgctcgtcgaactggccgggctcgacccgcgggtcgtgggcgtcacgcctgccatgccgtcgggttgttcgatgaacatgctcatgcacgccatgccgtcgcgttgcttcgacgtgggtatcgccgagggccatgccgtgaccttctcggccgggatggccgctgcgggcatggtgcctttctgcaacatctattcgtctttcatgcagcgggcttacgacaatgtgatccacgacgtcgcgatccaggatctgcccgtggtgatgtgcctcgaccggggcggcatcgtgggcgaggacggcgtgacccaccacggggtcttcgacatggctgcattcggtgccgtgccgggacttacgatcgctgcgccgatggatgaactggaactccgcaacatgatgtataccggtctgcaatacggccatcccttcatgatccgctacccgcgcggcaacggtgcgggacgtctgtggcggggcgttcccttcgaggcgctgcccgtcggccggggacggaggctccgcgaaggtacggacgtggcgctggtgacggtcgggacggtcggcaacgctgccgcccgtgccgcggaacgcgccgcggcgaagggcgtgagcgtggcgcattacgacctgcgcttcgccaaaccgctcgacgaggccctgctggccggggtcggtgccgagttccgccatgtggtcacggtcgaggacggttccctgcgcgggggcgtcggcgaggccgtcacggcatttttcaatgcccgcggctgcgaggtggccgtacactcgctgggcatcggcgacgagtgggtcgagcacggaaccccggctcagctctacgccctctgcggttacgacgaggagggtatcctgcgggcgctgctcgccgcggggaaataaaaccgtccagccctgtttgccgtgctgcggcataaaatctgtcacatgctccctgaaaaccgttcgggaagtgaaaatcgcgatcgtattattggcctccgcgctgcttgtcatcggcgtggcatacggccgtgccgccgaccgtaccgaccgcactccggtgccgtcgttcgatcaggcgtgctacatgggctcttggcaggaggtcgcccgctacgaccatccgttcgaacgggggctggccgaacgacgcggttaccggacggacaggctcctgttcgtcgaccaggggcaatgaaactgagccggagggttcttcttcggtttcctgcggccgtgttacatcgtgaacgtccagtcgtcgccccggctgagcgcggcgtcgaaccggaacccttcccattcgaattctttgagcatttccggatccgcaatccggtttctgatgaggtggcgcgtcatctctccgcggcacattttcgtgtagaccacgatggttttcagacggtcgccttcacggatgcggaattcgggcgtgatgatacgcgcttcgcggcggatgcgtttccagtcgaacaggcgcttcatctcgctgctggcgaggttgaccaggatgccgtcgtcggcatggattttttcgaggaaggcctccgtcagccgtccctgccagtacccgaacatcgtttggtcgtcgtgccccggcaatacggcgtccccttccagccggtagcggcggattgcgtccagcggccggagcagcccgtagaggaacgacgtgatgttgaggtgctgctgtgcgtattcgaaatccccgggggtgaatcgctccggggcgatatgcctgaatacgacgcccgtgtaggccagcagcgcggggagggcctcttcgccgtggaactgccggtaacgc

SEQ ID NO: 638 - DNA, 10823 bp, unidentified
  source 1..10823: mol_type = unassigned DNA
  misc_difference 5831: note = a, c, g, or t
  misc_difference 5832: note = a, c, g, or t
  misc_difference 5833: note = a, c, g, or t
  misc_difference 5834: note = a, c, g, or t
  misc_difference 5835: note = a, c, g, or t
  misc_difference 5836: note = a, c, g, or t
  misc_difference 5837: note = a, c, g, or t
  misc_difference 5838: note = a, c, g, or t
  misc_difference 5839: note = a, c, g, or t
  misc_difference 5840: note = a, c, g, or t
tcacagcactgccacggcgaggaaccgcacaacgagcgcggcaagccatgccacaacgcactggtttacgaccataacggtggcccagcggccgcccatttcccgcttgaccgatgccacagcggcgatgcagggggtgtagagcaggcagaacaccagcaggggagccgctgccgccgggctgagcgccgcgcccagtgcggcagaggagccatacaggatggtaagggtggagacgacgctctcctttgccataaagccggtgatcagcgccgtggacacccgccagtcgccaaagcccagcggtgcaaacagcggcgcgatgccgctggcgatccaggccaggatgctctcctgcgggtctgcggtcaggctgagctggaaatcaaagttctgcaggaaccagatgatgatggttgccaggaagatgactgtaaaggcacgctcgaggaaatcccgggccttttcccagagcagctgggccacatttttcaggccgggcaggcggtagttgggcagctccatgacaaagggcacggcctcacccttgaacagcgttcccttgagcagaaaggccataccaatgcccacaaggatgcccaggaaatacaggcccaccatgaccagcgcggcgtactccgggaagaaggtcaccgcaaacaggctgtagatcgggagcttggccgagcagctcataaagggcgtgagcaggatggtcattttccggtcccgctccgagggcagcgtgcggcttgccatcacgccgggaaccgtgcagccaaagccgatgagcatgggcacgatgctgcggcccgaaagaccgatgcgccgcagcagcttgtccatcacaaaggccacgcgggccatatagccggtatcctccagcagggaaaggaagaagaacagggtcacgatgatgggcaggaaactcagcacactgcccacgccggtaaagatgccgtcgatcaccagcgaatgcactgcatcgttgacgttccacgccgtcagggcattgtccacaaggatcgtcaggttctcaatgcccagttccagcaggccttgcagccccgcgccgatcacgccgaaggtcagatagaacaccagcgccatgatgcccacgaacgccgggatcgccgtgtactttccggtgaggaagcggtcgatccttgcgctgcgcagctgctccttgctctggtggggctttaccacggtctgattcaccagctgatggataaagtggaaccgcatatctgcaatggcggcggcacggtccaggccgcgctcctgctccatctgcaggatgatatgctcgatcatctctttttcgttctgatccagcttcagggcctcctcaatgcgggggtcgccctccaccagctttgtggcggcaaagcgcaccgggatccccgccgcccgggcgtggtcctcgatgaggtggatgatgccgtggatgcagcggtgaaccgcaccgccgtggtcatcctcgccgcagaagtccatccggcccggacgctcctgatactttgccacatggatggcgtgatccaccagctcatccacgccctcgttcttggcggcggaaatggggaccaccgggatgcccagcatcgcttccatctcgttgatgttgatggtgccgccgttgccgcgcacctcatccatcatattcagtgccagcaccatgggggtgtccagctccatcagctgcatcgttaagtacaggttgcgctcgatgttggtggcatccacgatgttgatgatgcccatgggcttttcgccaatgatgaactgccgggtcacgatctcctcgctggaatagggcgacatggagtagatgccgggcaggtcggtgacttcggtatcggggtactcccggatggcaccgctcttgcggtccaccgtcacgcccggaaagttgcccacatgctggttggagccggtgagctggttgaacagagtcgttttgccgcagttctgatttccggccagcgcaaaggtcagcaccgttccatccggcagcgggtgttcgccctttttggtgtggtagcggccgccctcgcccaggcccgggtgctccaccatccggccggccttccgtgccggagctgctgcgggtgcttccgccggggtgatctcgatccgtgccgcatcgtccagccgcagggtcagctcatagccgtggatctgcagctccatggggtcccccatgggcgcaaatttcaccagcgtgaccttctcgccgggaatcagccccatatccagaaaatgctggcggagctctcctgttccgcccactgtatcgatcacggcactttcgccgatcttcagttcctttaatgtcatggcagatgcctttccttcgacaaaatgttagtgtatgtgaacagtcttaatataagctaactcaaaggcattgtcaaggcgggaagcggcaaaaattcccgcctgtccccgctgttttttgtagagatctttctcctgttccggcagatttccgggcaaaagaaaacgcacccctgaattttcacgttcaaaggtgcgttttgagaacagttctgtttacttcacggtgtggtagccgtcggggttgttcttctgccagttccagctgtcggcacacatctcctcgatgccgtactcagccacccagcccagctcgttcttggccttggtgggatcggcatagcactcggcgatatcgccggggcggcgggcatcgatcacataggggatcttcttgccgcaggccttctcaaaggcatggatgacatccagcacgctgtagccgtggccggtgcccaggttgcagatgaacaggccgcagttggtctgcagcttcttgatggcgcagacatggccccgggccaggtcaaccacatggatgtaatcgcgcacgccggtgccgtcgggggtggggtagtcgttgccaaagacgtgcaccttttccagcttgcccacggccaccttggcgatgtagggcatcaggttgttggggatgccgttggggtcctcgccgatcaggccggacttgtgggcaccgatggggttgaaataacggagcagggccacgttcagggtggggtcagccttgcagacatcggtcaggatgcgctcggtaaaggccttggtggtgccgtaggggttggtggtggcacccacggggaagtcctcggtgatgggcacgctggcggggtcgccgtagacggtggcggaggagctgaacacgaagttgtggcagttgtggcggcgcatcacgtccagaatgaccagcgtgcagttgaggttgttatagtagtactcgatgggcttggagacgctctcgcccactgccttataggcggcaaactggatgacagcatcgatatcagggcactcggtgaagatcttctccacgtcctcgtgctttgtcatatcggcctgatagaaccggaagtccttgccagtgatctgcttgacccgatccagcaccacgggggaagcgttgtaatagttatctgccaccacgatgtcaaagccagcgttcagcagttcgatacaggtgtggctgccgatataaccggcaccgccggaaaccaaaattgccataaaagtacctctcttctcgtcaccaaagttgcttgcgcggggcaggcccgccttctgccacaaggatacaacgttttggccgcagaatcaagtaacgggaattttataaggatggatttttgtttccaattatttttccgcgcattgatttacaagcgttttttgttttttgcacatggagtgatggaacactttgtgcaaatcagagaaaaagccctcccgggcaaagccgtcaggctttgaatgagagggctgcattttacagtttcccgcactgtttgccggtgaagaaccgcagggtggtgttggcacggaacactttcccggcccgcagggcggtggaggggaactccgggtgggaggggctgcaggggaagtgctgggtctccagcgcaaagccgccgtatttctgcatcggcacgccgcccttgccgggggcggggcagtcctgcaggaaattgccggtgtagagctgcacgccgggctgggtggtatagaccttcatgctgatgccggtcttatcgctggaagcccaggcgcacaggctctggctggccccgcggcccctgtcgatgacaaagcagtggtcatagccgccgcccaccatggtggtctgggaaaagccggtgtcgatgtcccggccaatgggcttgcccgcccggaaatccatcggcgtgcccgccacgggcaggatattgccggtggggcaggtctcgttgttgccctccagatagcgggacgcatagatgcgcagcttctggcccagcacatcgccgccgccatccagattgaagtaggtgtggttggtcaggttgatgatggtgtcggcatcggaggagacacggtaatccatccgcagggcgttgtcctcggtgaggatataccgcaccgatatcttcagatttcccgggaaaccatcctctccatcggggctttcggcctccagaagcagggtatcgccaaaggtctttacctcatacagcttgcgcgggaaggtgccgtgcaggtggtttttgccgttgttggcttccagctgataggtcttgccgcccacgttgaacacggcattctcgatgcggttggcgtaccggcccacgaacgcgccgcagcaggtactgccggacgattcaaagtccttgacgtaatcggcgtaggtatcgtggcccagcaccacatccaccggcccgcgcttggtgggcacccagatattcttgatgatacagccgtagttcagcacactgaccgccagcccgccggggttcgagatgatgtattcattgatcttttcgccgtttggggtcatgccaaagggcttggagagaaactgtgccatagggctcgcctccttttgtattttttggggacagcacactctctgttttatcctttattgttttgattatatcacaattttctccttctgtgttggcattttttaagggaatctatccaatatttcgagagattttttgtaggttctgccccataggccaaaaaaagccccggagggccaggggtaggcgctccggggcttgggatatgttcagttttaagatttacagagcaggctgagtaggagcagtaccatattctacagtataggtcactaccattgccatataggttttaccattagacaaagttttagttgctacaccaatggctttgatttcgccattataacccttaagaacatcgtcaatgccatttgccttgggatcctgcagttttgccaaatcagcagcagttacttccattgcatcaaccaaatcatcgggttttttgacttctccaaaattcttcacagcaattccaagggtaatctcgtaaacatttttcttatcagtcggctttttgattccggtaatgccatcttttgcaacaatcttaccgtcagcattgaccttttccagcatctgagcagcctgtgcacgcagagtactatcattggtaagtgcagaattctcacccagtgcagtattcactgctttgatagctgcatcctcaacctgcttgccaaaagaaggcgtgctgtcctcgccgcaagcggtgagcagtgccaaagccattacgccgaccagcagaagggcggccattttcttgagcattttcatttgtagaacctccaatgtaaaatgatattttaccacacagaaagcatacccctgcaccttctgcattgtgaactcattttacatctacccccccccccccccccctatttttttttaaattccccatttttnnnnnnnnnngagttcagacgtgtgctcttccgatctcccccccccctgtcaatattttttattgaattccccaatttttggagactgttccaaagctgcggcaaattttttagcagattgacaaaaagcacccctcacatggctgtgaagggtgctttggggaagttttcttatgcagaacacggttcggtaattgcctcccgcacctgttctaacgaaagttcggtggtctgggcgatcttatccagatcatgctctccgttcttccagagattgagcgcaatgcgctttccctttgccacctcggcatcttctcgttcccgatcaacgatcacctgcattgtcttgcacatagctgccactccttccgtttcttctttaaagtattttactcttgcccttattttggggttccggatatcccgatagtcatcacagcggaaatcctgcatcagcgcgccgacctcatccgttccccgatatgcgccgttcacatatacgatatgtgcacggtcgtggaacagcttcccggtttcctgaatcgtccgttcaatattgtaaaccggcagaccatctcccaaaacatcatttgccgtaataaatatgatatatgtctcaggcaggtcagaatatttttcaccagaagtcgtcaggcgggaatcaaacagcgcactgttcagccgcgcccgttccggagcggctcccttatcttcctgctgtacttcgatatcgtactgcttgcctgcatcatccgttgcataaatgtccagccgtacagaacggccaaacagattgccgatcgtaagctgtgttgcagaccttgcgacggtcaggtcctttcgtttcaggatgatgcgaagcagctcctgtgtgctctctttatctcctgaaaacacctgtgtcataaaggtgtcatccatcagggtgaatttacggatagcattcatgcgttcttcattcttctcatccaactgtacgaaccgcatttccgccatcctttcgtttcagaaaaagagtacttttctacgtttatattttatcatcattttatctatactgcaagtatcaaaaaagcacccctcacatggctgtgaagggtgctttggggaagttttcttactccggctgagcggtgttctgggcgatatactcggcggcatcatcggggatgtcgtcaaggttctcatcgccgatatccacgttcagcggcggcttcttgaagaggatgtcatacatcaggggcacaacgtacagggtcatcagggtggcgtaagtcaggccgaagatgatgacgatggccatgccgctcatcagctggctggccatatcgccgctgaacaccagctggagcatggccagaacggtggtcagggtggtcatcaggatggggcgcattcgtgttttgccggtggcgatcagggccgcgcggcgctccatgccgccgatgcgcagctggttggcgtaatccacgaacacgatgccgttgttgacgaccgtgcccatcaggacgatgaagcccatcagggagatcatggtcagctgctggccggtgagcagcaggcccagcaggccgccggtaaaggccagcggaatggtgaacagaacgatgaagggggagagcaggctctggaactgggccaccataacaaggtagacgaagggcagcgccaggaacatccactggcccatctgatccaccaccatgccgttgatctcagagccgccgcccatatagaagctgcagccctcaggcatttcatcggatgcggcaaactcgttcagcttcttttccagtgcgcgggtctcggtggtggtattggtgccctccaccgcgtccgccgtcacgctgatatagcgggtctggttcttgctggtgatggagtccggggtggagccggtgacccaggtagccatatcgcccagcgtgcaggtgccggtctcggtggtaccgtcggcggccatgacggaggtcgtaaaggtcatatccatcatgttttccttggtcatggggtccagattgttgctgatctggacgttcatggtggagccatcgatggcaacgggggtctgggccgtggtggtggtggtcagcttggcggcgatctgctggtagacctgcgccacggtcaggccgtaggaacggaccttatcccggtcgatctgcaggttgatggtggcatcgccgctgcccagaccgttggtggcattggtaaagccgtccatctcgttgaccatatccaccaccttctcggagagggcagtcatggtatcaatgtcgttgccggagatctggacggtcaggcccatatccagctggctggtcaactcctgcattccgctgatctcaacggtggcggtgcagttctccacgccgttcacagcttcctccagcgcctcacgggcctgttcgatctgccgggaggagaggctctcgtccagcatcacgttgatctggtaggtgccgtagctgttggcggctttcagcaggtcggtgatggtctggggcagacccagctggccgacatccattccggccacacggctgtcggtggtaacgcccacctcttccacgttgtccacagccagcagggcatcaatgacattctcggccacagaataggattcttccttggtcagatccttctcggtggagagggtgacgatggcctcgttgctggtgatggtgggcagcatctcaacgcccatggacatcacgcgccagccgcagaacaccagcagcaccactgccgcgcccaacggtgcccagcggtgctggaagcaccattccaggctcttgacgtacttttcctgcaccttgtcgaaccacttgagctctttgggcttggagtttttcagcagggtagaggaggccgccggggcaaccgtcagcgccacgatgagggaagcagccagacagtagccaatacacatggacatgggctgcagcaggctcttgatgacaccggaggtgaagatgacgggcaggaacacgcagacagaggtgagggtggaagccatgatggccatgcccacctgcttggtgccctggaccgccgcgcgggcagcgggcacgccgcggctgcgcagacggtagatgttctcgatgacgacgatggagttatccaccagcataccaatgccaagggacaggcccgccagcgtcataatattcatatccagaccggtgaagtacatgagcaccacggcaaacagcaccgacagcgggatactgatgccgaccaccagcgtgggcttgatatccttgaggaagatggccagcacgatgatggcaagggccgcaccgatgagcatactgctcaggatgctgctgacgatgatgctgatgtaattgccctggttggacagcacgaccacatgcaggccatcgtatttctgttccagctccttgaaggcggccttgcagttgccggaaacttcaccggcgctggaggagttgctcttgaagatcttcagcaccacggagcgctcgccgttcaggcgggtaaagctgtcctcggcgttgtcaatgatctgcacatcggccacgtcagacaggcggacatcgccaaagccgtccacatggagcagcagggcaccggagatatcctcgatgctgtcgtactcctcgccgaccttcagcagccaggacttgttgctggaatccttgacataaccggcgggcatggagaagttctgggcatagatcagctgtgccagcgtgtcgatatccagcatcttggccacgtcggagttctccatggccttctgcttggcatcctcatactgctgcttggcatctgccagctgctgctcgtaattgttcagcatctcgcgggcctcggtgaacttgatataggcctgcagctgctgctgggaataggtgcccacgatctgggtgaactgatccatcaggccgggcacgtcgtccatggccttgatggtgctctccagcgtgttataaatgttgctcaggctctgctgcacctgcagatcatcgaccagctccccggccgttgtgccggcggtgtcgccctgcgcgttcaggcgctgctgcagatcctgcaaagcggtggtcagcttatcggtgatatcgcgcagctccgccacgatctcgatcagagaatcgatatcctgcattccggtctcattgaacttgtccacgacccgctgcaggccgtcccgcacatcgatcagggcctgctggatctcaggctcgttgaccacggcaatgagctggttgacgctctccagaaaggcctgtgcctgcttcttgaccagcatgaaggaatcctgcagttcgccggaatactggctgttgatggtatcgctgaccaacttgtcgtaattggccagctgggtctcgtactgctttctgcccgcctcgatctgggcttcggcagtgtccagctgggcttttgcatcggccagctgcacgtcaatgacttccagcagcttttcgttgatggcatcgatcttttcctgatcgagctgcacctgcaccatccgggtgatcaggccattggcggaaatattggaaacgccgccctgacgctcgatataggggaccatggtgtcgttgacgaaatcggccagctcataggaatcgctgccctcgcggctgacggccacggtcataaaggcgttcatgttcagggtatattcaatgatggagggggtcatacaggtgcttggcaggctggaggtggtctgatccaccttgttggacaccttgaccacggcactgttcatatccgtatcatcctcaaactccatcagcagcagactgtagttttctgccgaggtggcggtgacgtttttcacgcccgagatggtgcccagcgcactctccatcacgtcggagacctcgttctccacacgctccgggctggcaccgggatagaccgtgaccaccatcaggtacggtgtgttcacgtttggcagcaggttgatctgcatgttctgcacggacacaaggcccagcatgatgaccat

SEQ ID NO: 639 - DNA, 6410 bp, unidentified
  source 1..6410: mol_type = unassigned DNA
ttaacattctaccgccaccttgatcacgccgttcctcttattttcaaaaagttcataggcttcttcgattctgctaagtggataggtgtgtgtgatcagtggttccgtgttgatcttaccttccgcgatcagtctcagcgtttcttcacaatcacaaccgtctactcctcctgttttaaaagtcagattctttccatacatatccggcagaggtaacgtctgggctttatcgtaaagtgccaccaccgtcacgattgcatttggccttgcgcattcccatgcaagacggaaagtagattctgctcctgcaacttcaagaacaacatccgcgcctccatgctcgctgtttgcctgaacaaaatcaaaacattcttccggcgaaactgtaagaacttccggataatgttccctgataaagtgcatacgcttttcgtctttttcacacatgatgatccgcttcggatttttcagcataacagacagtaaggtacagatacctgtaggaccggctccaatgatcagcaccgtgtcatcctcagtgatctcggaaatacgtgctgcccagtaaccggtggcaagtacatctcctacaaataacgcctgtctgtccgtaactttatccggaatcttattcagcccctgatctgcaaatggtacacggacatattctgcctgacctccatcgatacggcatccaagagcccaaccgccattttcatcggtacagttattcacataacctttcttgcagaaaaaacattctccacaaaaagtttctacatttaccgtcacccggtctcctggcttcacattcttcacagcagttccgacttcttccacaattccaaccatctcatgaccgactgtaatccccggcactgcccgtggaacgcttccatgcttaatgtgcaggtcactggaacaaatgctggcaagtgtcacctttacaatggcatctctttcatgcatcagcacaggctttggcttttccattaattcaaattttccttttgaaacataagtataagtctgcattcttttccccatcactttctataataatttatccagaatttccgctgctgatctattaccgaatacgccattgccaaataacaaccaagataagaaggtgcaccggataaaacgcataacagaaatacttgaaccacttgctatggtacccctgctctccatgatataaccagattggaatcagtgccagcagtgcaaagctctgctgtgcaatctcaaaatgatgtcccagaatcgttaccggataatacagattccccagcataactacattcaaataatacagcccgacaaactgtgccgcaaaagaaatccaggttttcttgcgaaaaaaataaaaaagcaataccgtcagtattcctgcagcattgtaatctaccatggttatggttccaagcagaaaatccatcaaaagcacgaggcaaaccacaaaaaacgatatccatttcttttgtttcttctttgccttttcaatgatctgtatcgataacacccctaataaaaaggtccatagtacattttgatgaaacgggtaaaatacagaacttcccataatcaggttaaatggtatttctgaaattatggcaaatagaaaaagacgcagcatgtattttttcacattcgaagtataatagcatccttctgcgatcataaatgcgaaaatcggaaaagcaagtcttcctacgcgtgtcatccattcctgtgctggaaatagtgtcgcccacaaatgatcacataacataaacagcattgccagaatatgtagtgtaaacgaatcaattcctctttttttctccataggttcttctccatctatccaggcatagatatctgccttttattcttttcttttcattatattatggagcattatccaacgtcaatcaactcttgcgtcctaatctatcactaattcagccagaactcaaatactcaacgcattctactcataaggggtgttcatttcttataatttatattatgcttagattaaacagaagggagtgaattatatggatttaatcaaaatcggaaaatatattgcagaaaaaagaaaagctcttggactgacgcagaagcaattggcagaaaaactgaatatgagtgacaaatcggtttctaaatgggaacgaggcatatgcctgccggacgtatcaatttatatggaattgtgcagcatacttagaatcagcattaatgaatttcttgcaggtgaagatatcggtgctgaaaatgtaattgaaaaatcagacagcaatcttattcagattacaaaagagagtaaaaagaaacaaaaaaatttaaaaacaattcttgctgtagtaactgtttttgcagtaattgtctctgcgatccttggcactttattctttcacaaactgatacagccaaaaaattatattaccgcagttgatcagacaagtactgagatgaaaacagcagaattattatccggaacagacggcgcatatctttttcattattttacaaaagatgaatttaaaacactcaccatttatgtatctgaatatcagtctgggacactgatcagtaaaagtaaagtggctgatttggactatgacggaatcgattccccttccagaggcgtcattgctgttgtgccggattttgaatcttttaaggtaaaattaattgtagcagatgattatgcaaaatattctacggattttcctattttagaaaatatagaaaacagagaatattatggcagaagtgcaagccagataaaaggggagattccgattcagattcattcagcttcgacaatagaaggcaagactgctatcccttcagactctgaacagggattaatggctctaatctatggaaaagacgggctgtcagggattcctatcacggaaatggaaaaaggaatcgttggtgtggaaaatgattatgtatattatctttccttccaatttgggggtaatcaaagtttttgaggggatgtctttttgagggtttagattaacataggaccaatttttagattgacgattccttaagggtctatatcattgacaacaaatattataaggctttctgtatttttacagtttcatagcactgcggatgcggttctcaataaattcttctccaaaatctgtattcaggctgagatcaaagtttccggctgcaccccacatacgtcgggtgtaatagcgatagttatctgcacgcagtttttcatttttcttaaccgtagctttggcttctccctcagagatattctgtctctgtgccactcttctaattctgctcacaagaggtgctgaaaaaatactttcaaacaatttccggaatttctgagaacgtaatctgcacaacggcctactatcacgcaattgccttttttcgcaagattgcgtacaacctggcattctgcctcgaaaattttattcctcggcgcttcatcctgtctgtattcagatacatctgattgaccagatcataaagaaggctgtttgtcatgatctcctcgtttttcttaacgaattccggtgtgtatccgatggtccctgctgtcatctggataatctccgcatcataaaaatcatatctttcaggaatgcaagtttcttaccgatgagtctggcgataaagcctaccagaagggcagcaataacagtaccttctcttataccagacagtctgtccgttgcgattttcccctgatataaaagcaggcaatgaaattaccgcctggtttcaaaacacgccatatttcatgaaatgctttttgcttgtccggaaatgcatgaaaaccattcatactgacaacggtatctaaaagcttaaaactatcgttctctaatcttcctgacattacgattcatgaggtgtcttccaatatatctataaacaaatgctttaaaggctgaaatttcttgatgatgttccttcaacagttcatctggacaatcataaacaccaaaatcctgattgattccctcgctctgaatataagtattgttcctatcaaactcaataatgagatttctgaaatccttgactgctactccataaccgcaaaatgcacctgtacattccgaattttgttcctgcaacttctttatgtaggttttatccaaaatgaaagcttccagttcgtaccactgattttcgaaattaatttctacccagctatggaaaatactttttggagcattacggtaaacaaacccgatcatagcccctttctgcaatcttttatcaatcgtaaaaccatgtactctgcatggaatattgcaggcacgtaaaagtgccataaataaagttccttttgtattacattgtccataaccatctgcaagtacttttgaagctgaaattccgtcatcaatattatatccaaataaaacatcatctcttacatagttgtagattgccttaatcctttcaaattcacccatttccttccatttcatattttgaataagtttttgaattgccggattagaaaaatcaaccattcgtgtttccctaagatacttatctttcattttctatcgcctttcccataggttttctcacaacacaatgcattcgcatacctttacgaatttcaaatttttctacttttaatcctgcttttttgcaacattttatgaccacatctcttgttggcacttggacatctccatgtccgcatatatttgccaacggcatttccaatgtattcattagccataccaatactttattgtcactggtcacatctctcagtatcaatcttccatttgggcgaagacatcttttcacactgtcaaaaaatgcctgtggatccggataatgatggaaactcatagaacaaataattgcatcaaatgaatccttttcaaaaggaaagttctcacagtctcctacaacaaatgttgcatttgaaatatttttcttttttgcctgttcaatcatggcaggagtcagatccagtcctgtataatgtcggtctggatatttttctgctaataaagaaatcatcggagcaggtccacagcctgcatctaataaatctctaaatggctccttctctaattcttcctgaatatccggataatccttcttgcacatttcgtaaataccagcatagctactttcatatcttcctgctgcttttgtaaactctttaattgacaattttttatattcttcatttttcatgcttttttctccaatcactgtgcctttttcgccttgcatccgcatttcttcatttttttcatataagcataaaactgcttatgcaattccctcatttcatctggtgccttcatagcatgttgatacataaatttatctccaaaactacttccaaatgtaactgccagcataatcgtcagaaatgacaatggcaaaaagcgaaaaatattcattttccatggtgacaatttacccttttgttttcgcaaaaagttaaaatttcttttcagcctttccgctgttttcctcataattttccattctttttccactttctccggatcgtctgattcataatacgcatccgcaatcggtaccaccatagcaagatgacaaagctgccatagatgcatatccgttacttcctggtatggtatatgagcatgcctcaatatctctgaaaactgcttagttctttcggatttatttcctgatttttcttatatagcaatccattatttcttaaagcctcaaatctttttcctctggcataaatacttgtatcataaccggcttctgcaaataaagctgcatacaaggagccgatcacacccgcaccataaatcaatattctcataagaatcattcctctcctcttaccccagtgccacatccaagatcatcatcaaactaaatccaagtgcaaagaaaagcgtaccgatattcgagttctgtccctgagacatttccggaattagttcttcaaccacgacatatagcatagctcctgctgcaaagctgagtaaatatggtaatgccgggattaccagctgtgcgacaagaatcgtcattactgctccaatcggttcaacgactcctgaaagtacacctcccagaaatgcctttctcttactttcaccctctgccctaagcggcatggatataatcgctccttctggaaaattctggatagcaattccaagtgataaagcaagtgcacttgttgctgtaatctgtgcattttcagcaagaaatccagcatacattacaccaactgccataccttcagggatgttatgtaatgtaactgccaacaccatcatcgtagtacggccaagtttgcttttcggtccctctgcctgatcacttccaacatgaagatgcggaatcaaatgatcaagtgcgagtaaaaacaatataccaatccagaaccc

SEQ ID NO: 640 - DNA, 12819 bp, unidentified
  source 1..12819: mol_type = unassigned DNA
ccgcacctcgctcgccgtatcggcacttagaattatgcggtattgcctttattctttttaattgctcattgctaattcctaattcgtccagcaccaaccttgtggtgccgcaaaactcctaactcctccctcctaactaaacttccctcttccctttctgcccgcaatttgctatagttaaatcagccccaaagcaaatttattcaggaggaaactgccttgatttacaaaaagcaatacggccacccatttgataccgaaagcgtggtgggttcttttgtacccgcaatggaaacgattccatatctcaccagggaaccggacggcttctcttatgccatggacccgcaggatatcctgtatggcctgggtgaaaatatccgcggcatcaacaagcgcggctgggtgtacgagagcaaatgcagcgatgaccccaaccataccgaaaataaatcctcactgtacggcgcttacaacttcatgatcgtgtccggcaaagccacttttggcttttttatcgactatcccggcaaggtcacctttgactgcggctacaccgatctggacaccctgcgggtgacagtggccgaagaaaattacgacctttacatcattgagggtgaaagcctgaccgatattgtgcagcagttccgccagctggtagggcgcagctacatcccgcccaaatgggcctttggtgccacccagagccgctggagctacatgaacgaggacgaagtgcgcgaggttgtggccaactaccgcaccaacaacatgccgctggacgccgtggtgctggatattgactacatggagcgctacaaggactttacggtggacgagcagcgcttcccccattttgcagattttgccgccgagatgaaagcccagggcatccgccttgtgcccatcattgatgcgggtgttaaaattgaggacgggtacgatgtatacgaagagggcgtgaagaacggttacttctgcaccaatcaagatggcaccccctttgtggccggtgtgtggccgggccgggtgcatttccctgatatgctcaaccccgaagcccgcgcctggtttggcagcaagtacaagttcctgctgaaccagggcattgaggggttctggaacgatatgaacgagcctgccatcttctactctgaagaaacgctgaaaaagacctttgccaaaattgacgagtaccgcacccagaacctggatatctccagcttttttgcgttcaagaatcttgtggccgggctttccaacaacgaaaatgactacaagctgttctatcacaacaccaaacagggccgcatgcggcacgataaagtgcataatatcttcggctacaacatgacccgtgctgcgggtgaagcctttgagcagctggagccggataagcgcattttaatgtactcccgctcggcctgtatcggtatgcaccggtatggcggtatctggaccggcgataaccagtcctggtggagccacattctgctcagcctgcacatgatgccctccctgaacatgtgcggtttcctgtacgaaggccccgacattggcggctttggcagcaacaccaccgaggaccttgtgctgcgctggtacggcgtgggcatcttctctcccctgctgcgcaaccactccgccgccggtacccgcaaacaggagccctaccgctttaagaataaggcggcctttgccggtattctgcagctgcgttacctgctgctgccctatatttacagcgagtacatgaaagctgccctgcgcgatggcatgtactgcatgccgctggcctttgctttccccaatgacgcctttgcacgccaggtagaggacgaggtaatgatcggcgaaagcctgctgattgcccccgtttacgagcagaacgcccgcggccggtatgtctatctgccggaagagatgctgcaggtgcgggtaaagtgcagtgagaacgaccgcatggaaaccaccgttctgcccgctggtcatcattacatcccggtggagctggacgaagtggtgttctttgtgcgcaaggggcatatcctgcccatcgccaagggcggcgatagtattcaaaatgtggcaagcgtgaattttgcggatcttcgcctgttcgcccatgctcccgatggtgccgcctatgagtattacaccgacgacggcgagacgaaagattacgataagccggagcattttgtacatatcacgctggacgcggatggaaacgcggagagcgacagcgagaatgtaaaagtggaaggataagttaggagggaggagttaggagttatctcaatcagaaatgagaaattagcaattaggaattgatatagaggcagggcccggtgcgattgtaccgggctctgcctttctgttaatttctaattgctcattactaattttctcttcactttttgctcatttttcttcaatttttttcacttttttcgtgacattttcctttatttggtgtatactgatagcaagaatacggcaaaaaaagcaaattttgcggttttgcacgcatcaatgttacggaccaaaacaaacggaggtttcaatccatgtattatgaagacaaccgcgtaaaagacttgaaagttgcctacatcggcggtggttcccgtgggtgggcgtgggggttcatgatggaccttgccgcggatgcccagatggaaggcaccgtggcgctgtatgatatcgaccacgaagcagccgagcacaacgagatcatcggcaacaagatctctgcccacccggatgcggtttcacactggaagtatactgtggcggatacgctgcagcaggccctgaccggcgcggattttgtcgtcatctccatcctgcccggcacctttgacgagatggaaagcgacgtccacgcgccggaagcttacggcatctatcagtcggtgggcgataccgtaggtgcaggcggtttcatgcgcgccatgcgcaccatccccatgtatgtcaccatcgctgaagcgatccgtgattacagtcccaatgcctgggtcatcaactacaccaacccgatgaccctctgcgtgcgtaccctgtaccatgtgttccccaagatcaaggcgttcggctgctgccacgaggtgttcggcacccagacgctgctgacccacattctggatgaggaactgggcctgaaagatgttgcccgccaggatatcaaggtcaacgtcaagggcatcaaccactttacttggttcgataaggctacttacaaaggcatggacctcttccccatttaccgcaaatttgtcgaagagcactatgaatccggttatgagtacggcgacacgaattggatgaacagttcctttgcctgcgccaaccgcgttaaatttgatttgttcctgcgctatggctgcattgccgccgcgggcgaccgccatctggcagagtttatgccgggcaagacttatctggaaagccccgaagccgtgtgcgaatggaagtttggcctgaccaccgttgcgtggcgcaaaaatgagctgcaggagcgcctggcccgcagccgccgcctgcgcaccggtgaagagccgatcgagatcaagcccgatggcgaggaaggccacctgctgatgaaagccctgctcggcctgggcgatctggtcagcaacgtgaacattcccaaccacggtgccattgccaacctgccgtgggatgccgtggtggaagtgaacgcgctgttcagccgccagggcgtgcagtccgtgaacgccggcccgctgcccgccaatattctgccgctggtagcccgccacgtttacaatcaggagaacaccctaaccgctgccctgacctgcgaccgcacccttggcctgaccacctttatgaacgacccgcaggtgaccctgaactggaaccagggcaaagaactgtttgacaccatgctgcacaatacccgcgcatacctgccgaaagaatggaacgcgtgatgtagttaggagttttgcggcggggcgaagtcacagcgcggaaaaattaggaattagcgattagtaattagaaattgatagtaggcagggcctgatgcagttgcgtcgggccctgcttttttaggtaaagcattcaaaaagaagcgaattaccgttgttgtccgtagtgcattgcgaagtggaacctgtacggctggcatcaatctgttcaaaaggtccaagagttaccaacagaataatcatataaacacaaaatgcgaaccacgttgtacgaagtggttcgcattttgttatcgtaatgtatattttatttcggcagctgaatttccggcatcagttcatcggatacgatctgcagcatttcttccagcttggccaggtcatcggggctgaaccgctgtttggcacgctccatgaccagatggaggtaagaatagctgatgttatagtaatcaatgtacttttgggtcggccgcaggcggtattcccgcttatcggtggtggattggatgcgctccacatagccttttttgaccagggagttgatcttataagctgcgttgggggtggaaagattcatcatgtggctgaactgcgcaatcgtgggttcccccagtgccatgatgacttccatgcagaaagattctaccgtcgtcagcgtggcttcacggtcttcaaaacggttgaagatctgtttataaaaatgcagcttgaattttgtgtatacctgcccaaatgtctgatccagcatggcgagaatccccctgtaggttaatgaatttattatagcacaatccaccatgcaaaaccagccctcaggcatccgtgataacaaatgtcagctcggcgttggccgcgcgcacaccatccacccaggcggtggctttgccgatgcccaccgggccatgctgctctaccagctcacattccaaagtcagcacatcgccgggcacaacctggcggcggaaacgggcattttttaccccgccaaacagggcaatctttccacggttttccggcaggctcaacgcggccaccgcgccggtttgggcaagggcttccagaatcaatacccccggcataaccggatggccggggaaatgtccctggaaaaacgactctgtgcgggtcacgcacttgattccgcgcgcccactggccgggggtatagtcaagaatcttatccaccagagcaaacgggtaacggtgcggcaggatcttttcgatttccgccgccgtcagggtccggggcggttcattgggtgtatagttcatcctcatccctcccaacgcttgaacaccacacatgcgttgtggccgccgaagcccaggctgtcgctcatggcataatccacctgtaacgcgcggccctggttgggaatatagtcgagatccagttccgggtccggctcctgcaggttaacggtagcgggcaaaaaggcatcgtgcagggccagcacggtaaacacgccctctaccccgccggcgccgcctagcaggtggccggtcatcgacttggtcgaggatacggccagctcatacgcgtggctgccaaaaaccgacttgatggccgcggtctcacagctgtcattcagatgcgtggaagttccatgggcattgatgtagccaatctgttccggctccactccgccatcagccaatgccagccgcatacaggacgcgccgcctgcaccgcccggtgccggggcggtaaaatggtaagcatcgcagttagcgccatagcccacaacctcggcgtaaatcttagcgccacgctctttagcggtctccagttcttccaacagcagcacaccgctgccctcgcccatcacaaaaccgctgcgccgggcatcaaaggggatcgaggcccgggccgggtcgtctgcgatgcagagggctttcatgctggcgaaaccgcccacccccaacgggctgatgcagctttcgctgccgccgcagagcatacggtcctcgtatccatcgcggatacggtggaacgcatccccaatcgcattggtaccgcctgcgcaggctgtggtggggcagctgcacataccctgcaggccaaagcggatggccacctgccccgccgccatattgccgatggacatggggacaaagtaggggctgaccttttcaaagccccgctgctggccgcgggtgtgttcttcctcgatcgtgggcagaccaccgatcccgctggacaggatcacgccgaaccgtgtgtggtcgatattttccagtgcaatgccgctgtcgtggatggcttcgtcagcggcggccacggcaaactgggtaaaccgcgccattttgcgggcttcgcgccggtcaatacgttcggcagggtcaaaatctttgacttctgcggccagtttcaccttaaaatccgttgtatcaaaagccgtgatcggcccaacggcgcagcggccagctttcacggcggcccagctttccgccacggtattgccggttgggtttaccgtgccaaggccggtgataacgacccggcgtttcttttctatcttcatagctgcacctcacattcccattccgccgtcaacacaaagaacctgcccggtgatgtaaccggcctgttccccggccaggaaagccaccgccgcggcaacatcttcagcacggccgattctgcctgccgggatggccgctgcggctgcggcgcgggcagattccggcatagcggcggtcatatcggtttcaataaatccaggtgccaccgcattggcggtaatattgcgtgcggcgtactctttggcaacgcttttcgttaggccgatcagccccgccttgctggcggcatagttggcctggcccgcgttcccgtgcaggccgaccacactgctgatattgatgatacgcccataccgctggcgcatcatcaagcgggaagctgctttggtgcagaaaaacgtccccttcaggttggtaaaaagtacattgttaaagtcggattcggtcatgcgcatcagcagtttatccgcggtgatgcccgcattgttgaccagcacatcgatccgcccaaaagcggcagcggtatcttccaccagattttggcaggcttcggggccgcgcacatccgcttgcagcgtgatggcctgcacaccaaaggcgcggcaggcagccgctgtttcctcggccgcggctgcgctgcctgcgtagttgactgcaatgttcatgccgttttcggccaatgcaaggcagacggcacgaccaatgcccttggcgccgcccgtaaccagagcggcacggcgcatgctttcggtttgcggcatggtcaggctcctttcatggtgcaaagcaactgctgcagctgtgcagcagtttccaccggatagcacgagatagcatttcccaccgtctttttcacaaatccggtcaacaccctgccggggccgatctcaatggcggtatccacccccagttccgccaaacggcggacggtggcttcccaacgtacgccggactgcacctgtttttccagcagcgtggcgaccgtgtcattctctgccatttcatgcccaaggcagttgaacagcaccgggaactgcatcggcgcaaaatggatggattggaacttttcccgcagcgcatctccggcggggtgcatcagcagcgtatggaacgcaccgctgacgttcagcggcaggcagcgccgcgccccagcggcaagcgccaggtcggcagctttgtctacagcagctttctcgccgccgataaccagctggccgggacagttgtaattgcagatctgtacaacgccctcttcggcggctgcgctgcaacatgcctgcaaggatgtttcatccaatcccaaaacggctgtcatcccacaggtgcgcccggcagcggcagcagccatcgctttgccacggaaagccgttaaagcgaccgctgtctgcatatcgaacacccccgcacaggccaaagcggaatactcccccagggacaagcccgccgcatagtccggcataatgccctgctcccgcagcacagcggtaagaccggcggcaaaagctgtcatacaaggctgggtgtattgcgtttccttcagtacgcccgccgcgtcggtaaagcagacttctttcaaatcaaaatccaccgctgcggcagcttcgtcaaaggcggcgcggaaggcaggaaaggtttcataaaggtcctggcccataccggcatgctgactgccctgcccagcgtataaaaatgctagtttcatcagatggtctccttgtacaaccccgtgatgcaggtctttgcctcgcttaccattgcggcaaaaatctcttctaccgggcggacttcatgcagcagccccgcggcctgtccggccatcaggcttccgttttcggtgtcgccgtcaaacacagccttgcgcagactgccaagcgtaaagcgttccagcgccattttgtcggccccggctttttcctgcctgacatactcgcggctcattcggtttttcaacacacgcaccggagtgccgccgatccgcccggtcacaatggtatcgctgtcgcgggctttcagcagcgctgccttgtagttttcgtggatggggcactcggtgctggccagcagacaggtgccgacctgcacgccgcaggcccccagcgccagcgctgcggccaaaccgcgcccgtcagcaatgccgcccgcggcaatgaccggcacgtggacggcatcaacgacctgcggcaccaacgccattgtggtcatttcccccacatggccgccgctctctgtcccctcagcaatgacagcgtcaatgccaagcggttccaggtgtttggctaagattgcggcagctaccaccgggataaccgtgatgccggctgctttccacattgccatgtactttcccggatttcctgccccggtggtgacgatctttacgccttcttccaccacgattttggcaaattcatctgcctgcgggtgcatcagcatgatgttgacaccaaaaggctggtcggtcagcgcacggcagtggcggatgttttccctcagggcatcggcatccataccgccggaaccgatcaggcccagcgccccggcgttagagcaggcagcggcaaattcgcccgtggcgatattggccattccaccttggataatgggatatttcgtacctaaaatttcattgagcagcttcattttctaccctcatacgtcagcagcattccgccccaggtcagcccgccgccaaaaccgatgcaggccagggtctggccggggtgcagtaaatcattttccaccatttcatgcagggcaatgggaatgctggcagcactggtatttccatggcggtccatatttttataaaattttgacggttctgcgtgcaagtgtttgatacaatggtcaataatgcggctattggcctgatggcagacgacccaatccaggtcagccaaggtcttttggctgcgctccaacacggtttgcaggcaacgcggcatggtttccaccgcaaaacgaaagaccgctttgccatccatcgtgatcggggccgtatcgcaggctgcggggccgccgacacggatggcttcgctcccccgcgcgcccaacgtgacggcaaacggcacatcttcggccagttccagaatagccgcaccagcgccatccccaaacagtacgcaggttgtgcggtcggtcgggtccaccatgcgggacagcgcttcgcagccgatgaccaacgcatagcgtccgcccagggtgttcaacagcccgtgggccgcagcaatagcataaataaaaccggaacaagccgcatttacatcaaaagcgggccggttctccggcagccccaaggccgcctgcacacggcaggcaacactgggggtagccgttggagccgaaagcgttgccgcaacgcagcaggcaatctcgcttgctgccagcccgctacgcgccagagcctggcgggcggcggcaatggccagcgtggcggcatcctcactttcggtgcagtaataccgctggcggatgccggtgcgggtcgtgatccattcatcgctggtgtccacctgtcggctcaaatcctcattcgtcactacacggccgggcagtgccccgccggtggccagcagctgtaagcctttcatgctcccctcatttctccgatacggcggtattttttgtatctctggtcggctaatgcctttccactcatcttgcacaaggcggcaaggtgcgcggcaatggcggtatccaaccggctgaaaagcagctgccgcccgcgctgtgcaccgcccagcggttcggcgatgatctcttccacaattccatccgtatacaagtcctgcgccgtcagtttcatcatggtacaggcttcgccgctgcgggaggcatctttccacaaaatgctggcaaatccttcggggctcaacaccgaatacacggcgttttccagcatcagaatatggttggcaacgccaagccccagtgcgccgccgctggagccttcgcccgtaacgatggccagtaccgggacggtcagaccgctcatctccatcaggttgcgggcgatggcctccccctggccgcgctcctcggcatccttaccggggtaagcaccgggggtatcaataaatgtgatgatgggccgcctgaatttttccgcctgcttcatcacgcgcagcgccttgcggtagccttccggtcccggcatgccaaagttgcagcgcaggttttcttccagcgtcgttcctttgcggtgccccaaaaccgtaacgggcatcccatggaatcgcgcgataccgcacaaaatggccgcgtcctccttgcattgccggtcaccgcactgctcaaaaaagtcggtaaacaggttgtcgatgatttcgccgatatgcgggcggtcagggcggcgcgccagaaaaactctgtcctccggcgtcagtgatgtgcagcgctgcaaaagcatgttttcctgcgcggaaagctctgccagctcagcggcatgggtagtcgtattcgccatttcggcatcatcggtgctgctacacaatgcatcaatctgcgcgtccagcggttccagctgctgcaaaacctctttgatcatctgcatttcctcccctgtgtatggagctgcaaaatccgcgtcaaaacctcttttaattcagtgcgcggcacaacctgatccacaaagccgtgttccagctggaactcactgcgctggaaaccatcgggcagcttttctccgatggtctgttcaatcacacgcggcccggcaaacccgatcagcgcacccggttcggccagcgtgatgtctcccaggctggcaaaactggctgtgacaccgccggtggtggggtgggtcaacacactgacatacagcccgccgctgcggctgaaccgttccagcgcggcactggtttttgccatttgcatcaggctgaaaatgccctcctgcatccgcgctccaccgctggcagaaaaaataaccagcggaagccgtttatcagcagcatattcgattgcacgggtgattttctcccccacggcagtgctcatgctgcccataaaaaatcggctgtccagcacagctgccaccgcctgcacgcccccgatcctgccggttgcggtgacggcagcttctttcaggcccgttttgaccgaagcagcggccaacttttcctgataatcgggaaaatgcagcacatcgttgggggcaaggtctggattcagttccttaaaggttccgtggtccaaaatcgtgctgagccggtaataggctccaatgggcagatgtaccccgcaattggggcatacatacaggcttttggtccagacctggcgggtggcgcggcggccgcattttttacattcaacaaattgcggctgcacccagccgggcgcagccgtaccagcatcgcggcggactttcagctggaagctgcgctcctgctggctgaccgggaacagcttttcaatggcattcatccctaataccctttaggctgcccgcgcaaccagatagttgaagatatcacccacagtcttgagcgttcccaggtcctcatcggcaatcgtgatgccaaacttgtcctcaaacgccatgttcagctccaccgcgtccaggctatccgcctgcaggtcctcggtcaggctggcttccatcgtaactttgtctgcatcgcagttcagggtatcaacaaatacttctttcagttcttcaaagttcatgatttatacctcgtaattatttatctaaaaatattgactcaattgccaacaaggtcattatatcacatttgtcttgtatgtcaatattgttaggtaaaaatatttatctaattatgctgatctcttattctctataccggaagcgaacatcatgcaaaaattcgcacagcatcatcccctgcagcgctgccattgctgctgacaggtagacgcaatgcaatactttgggtgagggcactcccccgctccgtctattgacaattccgccacctatagataaaaacgcctgcaaactcaggcgtaaatccgcctttatgcacaacggcgtgattgcccgcgctctggtgctggacaagctggtttctacctacctggcgcagcaccccggcgcagtggtcaacattacctgcagagcatctccttgcttcttacatattttttataatgcagcaaacccaatattttctgagtgacacaccgcaccacggtccaccaacattattctttattttttacattattcactcaaaaagcagggctcggtgccatttccgcaccgggccctgctctatttccaattcctaatttctcattgctaattcctaaggcaataccgcataattctaagtgccgatacggcgagcgaggtgcggcag

SEQ ID NO: 641 - DNA, 7676 bp, unidentified
  source 1..7676: mol_type = unassigned DNA
  misc_difference 4256: note = a, c, g, or t
  misc_difference 4257: note = a, c, g, or t
  misc_difference 4258: note = a, c, g, or t
  misc_difference 4259: note = a, c, g, or t
  misc_difference 4260: note = a, c, g, or t
  misc_difference 4261: note = a, c, g, or t
  misc_difference 4262: note = a, c, g, or t
  misc_difference 4263: note = a, c, g, or t
  misc_difference 4264: note = a, c, g, or t
  misc_difference 4265: note = a, c, g, or t
  misc_difference 4266: note = a, c, g, or t
  misc_difference 4267: note = a, c, g, or t
  misc_difference 4268: note = a, c, g, or t
  misc_difference 4269: note = a, c, g, or t
  misc_difference 4270: note = a, c, g, or t
  misc_difference 4271: note = a, c, g, or t
  misc_difference 4272: note = a, c, g, or t
  misc_difference 4273: note = a, c, g, or t
  misc_difference 4274: note = a, c, g, or t
  misc_difference 4275: note = a, c, g, or t
  misc_difference 4276: note = a, c, g, or t
  misc_difference 4277: note = a, c, g, or t
  misc_difference 4278: note = a, c, g, or t
  misc_difference 4279: note = a, c, g, or t
  misc_difference 4280: note = a, c, g, or t
  misc_difference 4281: note = a, c, g, or t
  misc_difference 4282: note = a, c, g, or t
  misc_difference 4283: note = a, c, g, or t
  misc_difference 4284: note = a, c, g, or t
  misc_difference 4285: note = a, c, g, or t
  misc_difference 4286: note = a, c, g, or t
  misc_difference 4287: note = a, c, g, or t
  misc_difference 4288: note = a, c, g, or t
  misc_difference 4289: note = a, c, g, or t
  misc_difference 4290: note = a, c, g, or t
  misc_difference 4291: note = a, c, g, or t
  misc_difference 4292: note = a, c, g, or t
  misc_difference 4293: note = a, c, g, or t
  misc_difference 4294: note = a, c, g, or t
  misc_difference 4295: note = a, c, g, or t
  misc_difference 4296: note = a, c, g, or t
  misc_difference 4297: note = a, c, g, or t
  misc_difference 4298: note = a, c, g, or t
  misc_difference 4299: note = a, c, g, or t
  misc_difference 4300: note = a, c, g, or t
  misc_difference 4301: note = a, c, g, or t
  misc_difference 4302: note = a, c, g, or t
  misc_difference 4303: note = a, c, g, or t
  misc_difference 4304: note = a, c, g, or t
  misc_difference 4305: note = a, c, g, or t
  misc_difference 4306: note = a, c, g, or t
  misc_difference 4307: note = a, c, g, or t
  misc_difference 4308: note = a, c, g, or t
  misc_difference 4309: note = a, c, g, or t
  misc_difference 4310: note = a, c, g, or t
  misc_difference 4311: note = a, c, g, or t
  misc_difference 4312: note = a, c, g, or t
  misc_difference 4313: note = a, c, g, or t
  misc_difference 4314: note = a, c, g, or t
  misc_difference 4315: note = a, c, g, or t
  misc_difference 4316: note = a, c, g, or t
  misc_difference 4317: note = a, c, g, or t
  misc_difference 4318: note = a, c, g, or t
  misc_difference 4319: note = a, c, g, or t
  misc_difference 4320: note = a, c, g, or t
  misc_difference 4321: note = a, c, g, or t
  misc_difference 4322: note = a, c, g, or t
  misc_difference 4323: note = a, c, g, or t
  misc_difference 4324: note = a, c, g, or t
  misc_difference 4325: note = a, c, g, or t
  misc_difference 4326: note = a, c, g, or t
  misc_difference 4327: note = a, c, g, or t
  misc_difference 4328: note = a, c, g, or t
  misc_difference 4329: note = a, c, g, or t
  misc_difference 4330: note = a, c, g, or t
  misc_difference 4331: note = a, c, g, or t
  misc_difference 4332: note = a, c, g, or t
  misc_difference 4333: note = a, c, g, or t
  misc_difference 4334: note = a, c, g, or t
  misc_difference 4335: note = a, c, g, or t
  misc_difference 4336: note = a, c, g, or t
  misc_difference 4337: note = a, c, g, or t
  misc_difference 4338: note = a, c, g, or t
  misc_difference 4339: note = a, c, g, or t
  misc_difference 4340: note = a, c, g, or t
  misc_difference 4341: note = a, c, g, or t
  misc_difference 4342: note = a, c, g, or t
  misc_difference 4343: note = a, c, g, or t
  misc_difference 4344: note = a, c, g, or t
  misc_difference 4345: note = a, c, g, or t
  misc_difference 4346: note = a, c, g, or t
  misc_difference 4347: note = a, c, g, or t
  misc_difference 4348: note = a, c, g, or t
  misc_difference 4349: note = a, c, g, or t
  misc_difference 4350: note = a, c, g, or t
  misc_difference 4351: note = a, c, g, or t
  misc_difference 4352: note = a, c, g, or t
  misc_difference 4353: note = a, c, g, or t
  misc_difference 4354: note = a, c, g, or t
  misc_difference 4355: note = a, c, g, or t
cagcatccagtattatctgcgcttttggcttggcatctgccgcacctcgctcgctgtatcggcacttagaattatgcggtattgcctcaggaagtcttgcacaaaaaccggaaacagaatataatgtatctgtattattatgttattctgcgggcaaagcccgaacgataaaaggagaatatgaaaaaatgggtaagtttaattttattgaaaccgaaatccccggcgttgttgtgatcgaaccgaccgtgtttggcgatgaccgcggttattttatggagacttatcagatcgacgatttcgccgccgccgggattgacaagccttttgtacaggataaccagagccgctccaccaagggcgtgctgcgcggcctgcatttccagaagaaccatacccagggcaagctggtgcgtgtgaccatgggcgaagtgtatgacgttgctgtggactgccgccccaacagcaaaacctttggcaagtgggtgggtgtgaccctttccgccgagaacaaaaagatgttctatatcccggaaggctttgcccatggctttctggtgctgtctgatgtggcggaattctgctataagtgtaccgacgtatatgatccgaccgcagagggcggcatcccctatgatgacccgaccgtcaacgttcagtggccggactgcggctacgagcataagaccagcgccaaggacaaagagcacacgccctttgccaagcagaagtttgaatactttgaaaaatactgattcaggggaaccgatgtgcagaatttaaaaaactcgtttgcaagtttctggaaataccgctacctgctgcaaaacctcatcacgcgggattttaagctcaagtaccgccgcagcgtgctgggcgttgcctggagcgtgctcaacccgctgctgacctgccttgtcatgtgggctgtgttcggcgcgctgttcaaccagcgcggggatggcattgaggatttcccgctgtttttgatcattggccagttgatgttcaacttcttccgcgaatccaccagcatggcgatggaaagcgtgctgaaaaacggcccgctgctgcgcaaggtctatatccccaagtacatttttccactagaaaaatgctgctttgcgctggtcaacttctttttcagcctggtggcgctcttctttgtagcgctggttacctggtcccatatttcgctgcgcacggtgctgctggcggtgtatcccattgttatgctgttcgttttcagtctgggcgttgggctgatcctgtccacgatgtatgtctttgtgcgcgatatcatgcacatctgggaggtcttctgcaccctgctggtatacggcagtgccattttctatgaccccagtcagatggcatcctggatgcaggctgtcatcaacctgaaccccatctactggtacatcacggcggtgcgttcctgcgtgatgtggggcactggcctgaccctgaacatggtgctgattcctttcctgtgttctgcgctcagtctggggatcggtgtgtatgtattcaaaaagaaccaggacaaatttgtcctgtatatgtaagggggctgcaagatgagcgaacaaaagcaacagcccattatttccatcgaccatgtttcgatgcgttttaacctggcaaaagaaaagcacgaaagcctgaaagaatattttgtggctcttttgcacggcggtgtgcgatttgatgaattcttcgccctttcggatgttagctttgacattatgccgggggatttttacggcttgatcggcctgaacggctccggcaaaagtacgctgctgaaagtgatttccggcgtctacaagcccagcgccggtaaagtgacggtgaacggcaccattgcgccgctgatcgaactgggtgccggttttgacatggatttgaccgcgcgggaaaacatctacctgaacggcacggtcctgggctatacccccaagtatattgattccaagtttgacgatattgtggagttcagcgagctgcaggaatttttggatgtgccgctgaaaaactattcctccggcatggtggcgcgcctggcctttgccgtggcaaccatgaccaagccggatatcctgattgcggatgagatcctttcggtcggtgatttcctgttccaggaaaagtgtgagaagcgcatggcggagctgctttccggcggcacgaccgtgattctggtcagccattccattgagcagattgagcgcatgtgcaataaggtggcctggctggaccacggccacctgcgccgccttggccccaccaaagaggtgacggcggaataccgcaagtttgaaaagaaggacgccatgaaggcggacaaagtggagggataaggcgcatggcacaggacacgaaccagaaccgcccggcggatgtggcccaggcggacagtgtgggcggcatggccaaacgcctgctgaaccccgcccatttgtcagaccttgcccgccgcagcgccgccaccctgaaagagcagggtgccgagcagctgtggcgcgatgtgaccttccgcgtggggctggcgttccaccatgattcctggcagcaccgggcagacctgcccctgcgccgggagctgaaagcccagcgcgccgagtacgcagacggcaagccgggaccggtggtaagcgttgtagtgccactgtacaacacgccggaaaagttctttggccagatgctggccagcgtgcaaaagcagacctacccccactggcagctggtgctggtggatgcttcggacgcagcccatgccgcgttcagcacccatgccagcaaggccgcggcaaaggatccgcgcatcctgtataagaaagtggaaaacggcggcattgcggccaacaccacggcaggctttgtgctggcaacggggacgtatatcgccctgctggaccatgacgatgtgctgtaccccaacgcgctgtatgagagcgtgaaaaccctgcaaagccagggagccgagctggtgtacagcgatgagatcgtgctttcggcggatttgaaacagctgggcggctaccactttaagccggactttgcgccggactatctgcgcggggtcaacttcatcacccatctggcggtgttctcccgcgcattgctggaccgtgccggtgcatatgaatccagtgcgtacgatggtgcacaggatcatgacctgatgctgcgcctgaccgaacagaccacgcgggataaaattgcccatatcaaaaaggtgctctatatctggcgcggccatgcgggttccaccgcggcgggcatggaggcgaagccctatgccctggcggccggtgtgcgcgcgattgatgcccagctcaagcggctgaacctgcccggcaaagccatgcaggtggaggacgcgcccggtgcgttccaggtgcggtacgagctgaccggccacccgctggtcagcgttatgatccccaacaaagatcatattgacgatttggaccgctgcctgaaaagcctgtatgccaacgcaggctatgataactttgaagtcctggtcattgaaaataactctgaacagcaggaaacattcgcctactacaaaaccatgccggagcgttaccccaacagccgggtggtgacctatgtggggccgtttaacttttctgccgtcaacaaccttggtgcgcgctttgccaaaggcgaacacctgctgctgctgaacaacgatatcgaggtactcagccatgattttctgcgggagctgctgagctattcccagcggccggatgtgggtgctgtgggcgcaaagctctattacccggatgataccatccagcatgcgggcgtgattatgggcatcaacggcagtgcaggccacagccacaagagctacccgcgcaaggctgtgggcgatttgtaccgccttgtcaccacgcaggactatatggccgtgacgggtgcctgcctgatgaccaaaacggagctgtaccgcgcggcgggcggcctggacgaagccaggttcgccgtggcctataacgatgtggattactgcctgaagctgtggcagaagggcctgctgaatgtgtacaccccccgtgccgaagcctaccattacgagagcaagagccgcggtctggacaccaccccggaaaacgccgcccgctatgcccgcgaaaaggcaaacttttacacgaagtatcacgaatatattgatcattatgacccgtactataacccgcatttcaacaacctgtttgaaaactttgggctgaaataannnnnnnnnnnnnnnnnnnnnnnnnnnnnnnnnnnnnnnnnnnnnnnnnnnnnnnnnnnnnnnnnnnnnnnnnnnnnnnnnnnnnnnnnnnnnnnnnnnncccgtactataacccgcatttcaacaacctgtttgaaaactttgggctgaaataaggcggggcagaggttaaaactatggtaaataagtttgatacccagtttttgatcgaaggcagcaacctggacgaggatgacatccgcgccgggatcatggccagcgccgagggcgactgcctgatcgtggtaggggatgaggaagtggtgaaagtgcattaccacaccgatactccctggaaggtgctggaatacgccgccagccagggcgatttgcacaagatcattgtagaaaacatggagcgccaggcaaacgggctggatgggtaaagtatatcagaatttttatgtttggtgaacggcatgcagtatcatacaagagtgccaaaccgtttgcagggatatgattacagcccaaatggtgcatatttcataaccttctgtacgcagggcagagtgcatttattttggaaagaacccacccgattgcggcagaattcccaggccgtaggggcgcgcattgcgcgcccgtcaccttgcccggaactctctgcgatagggaatgtggttgaacaggctgttttgcaaatccctgataaatatccgacggtgcatctggaaaaatacgcggtcatgcccaaccatgtgcatttgctgcttttgatccagggcgacgggcgcacaatgcgcgcccctacggtttccaacatcgtccaacaattaaagagctgcgtaaccaaacacctccatcaccccatctggcaaaaatccttccatgaccacgtcatccgtacccagacagattatgaaaccatctggctgtacatcgattccaacccccaaacatggcaaacggactgcctgaacccgaaccggaacaaactccaacaatctgacacccgaaaggacgtaacgttatgaaccagcaggccaagcgcatcaaagaactatttggctatgcccgtaccttgacgaaggaacagggcattggcaccatgtgcgtgcgcgcggcgggctttttcaaacggcgctttttcggcaagcgggcgcggtactggccgtccaacatggcgctggaagcccagcgcagcgaccccgcggcggaaaccttccccatcatttctattttaacgccgctgtacaatacgccgcaaaactttttaacagaatttctcgatagtgtggaaaaccagaccgcccacaactggcagctctgcctggcggatgcttcggacgatgcccacacctatgtgggggagctggtgcaaaagcacgtggcggccaacccgcgcattcgctatgtgaaaattgaaaacaagggcattgcggccaacaccaacgcggcggcccggctggcacagggggaatatctggctctggcagaccatgatgacatcctggccccgcacgctatctactgcatgggcaaagaactgcaaaaaacggggaccgatttcgcctacagcgatgaagcacttttccgcaaaagccccaaaaccgcccatgtggcccactttaagccgggctatgcgccggaatacctgatggcctgcaactacatctgccacctggccgtgttccgtaaaagtctgtttgatgccatcggcggggagcgcccggagtgtgacggcgcacaggatcatgatctgttcctgcggctgattgacgccatgcaggcgaaagacgccaacgccgcaccgctgcatatcccgcaggtgctgtattactggcgggttcatgcggcgtccacctccggcggcaccgaggccaagccctatgtggtaaaagccgcgcagaaagccgtggcggaccacctggcggcaaccggccgcagcggcagggtagaggagggcatcttccccggtacctgccatgtgcagtgggaactgccggagccggaaccgctggtgtccatcctgatccccaacaaggaccatgtggacgacctggaaaaatgtctgttcagcctgtactccaaaacgctgtacgaagcgtttgaagtgatcgtcatcgaaaataactccaccgaccccgccacaaaggcttattatgaaaagctgccggaccgctatgccaactgccgcgtggtggcttacagcggcgggttcaatttcagccgcatcaataactttggccgcaagtttgccaacggcaagttcttactgctgctcaacaacgatattgaaatcatcagcggaaactggctgacccagatggtggccgaagccagccagcccggcgtggcggcctgcggcgccatgctgtattacccggacgataccatccagcacgcgggcattatcaccggtttgggtggatatgcgggccacagccacaagtaccacaagcgcggcggtagcgggtacatgttccgcctggccaccgtgcaggattattccgcctgcactgcggcctgcctgctggtgcgcacatcggcttatgatgccattggcgggttggatgaaacctttactgttgcattcaacgatgtggatttctgcctgcgcctgcgggaaaaaggctggcgtattgtgtggaccccctatgcggagctgtaccaccacgaaagcaaatcccgcggttcggatgaggaagaccccgccaaaaaggcccgctttgccaaggagcaggcccgcctgtatgaggtacacggtaagcagaatatcctgcatgacccctactacaacccgaacctgagcctggattatgaggatttccgcgaaagcggggatctgcgcaatctgaaaaacgtgaccctgtgacccatgccggaaaagcagggcaaaatctgtgcagtttttttgctgttacggcttgccacgctatgccggatatgctataatctaaatgttaccgcggcccggctttgggtgtatgccctgcatcagggagccttgattgccctttgctgcgccgtaggcaaatattataaagcgaggtattactactatgagccagaagtctgctatcgaaaaacagcccatcattgcaaaagccgccatccatgagggtgacaccggttctccggaagttcaggttgcgctgctgaccgcacgcatcaaccacctgactgagcacctgaagaccaacaagaacgacaaccacagccgtcgtggtctgttcaagatggtcggccgccgccgtaacctgctggcctatctgcagaagaaggacatcaaccgttaccgtgctctgatcgctgaactgggtctgcgcaagtaattcgcaaaacgggcagggcgctgtatgtgcgccctgcccattttctatatttcagcaggtgttccggcattcatttttattatgctctgccgctggcctgtaat

SEQ ID NO: 642 - DNA, 5211 bp, unidentified
  source 1..5211: mol_type = unassigned DNA
ttattctctccgcgtaaggcggagggcagacagctttcccgccgccatcagcagcaccggcaggacgtaagcgacgtactgcgccacgccgccgtagacgatcagcaggttgtaggtggcgtgaaaggtgatggccgcgcccagcagaccgcaggtgccagcgatcttcagccacgtccgctgccaggcatacgccagcccttcgccggcgatgccgccgcacagcacatgcatggctcctgttccgaaaccgcggaagaagatgaaggagaagcggtccgctccgttctggatcagatagcagacattttcaaaggtggcgaaggcaagggcaatcgtgatggcggcagccttgattttatccccctccggctcgaataccagaagatagaataccagcggcagcagcttcatgatttcctccaccaccggcgcgatctccgccgtggcggcaagggcgtccgcctgacataccgccgcgaggaaggtgttgatataggccgaaagcaggcacacccccatcccggcaatgcagaacaggaagaagcggagctgccgccttcccaggcacaaagcggccaccagcagcggggatgccatgcacagaaagatgttttcgatgtaggtcatgcgtccaccgcctttctcgcggcgggcagcagcccgaaaatggcaagcgtcagcagcatatcacaccagaaggttgggcttgccggagaagtatccggccagaagcagcccaccgtccagagcaggtactccgaggcaacaaagcacagcacgccgatgtggaagtaccgcatcttccgcgccgcgcccgtctgcccgttggcgcagaccagtccgcgaatggagcagaaggagagccatatcatcatgccgcaccagagcaggttggagagaatgtccccgaaggtgcagtagaacgccagcagcggcacgccgaacgcaggcgcaagccatgctctgcggcagcggaagcagcgctcctctgttcctgccagcgtggcctgcaagatccgcaggaagataaggcttgccacccagccgaactccgacacataaaagacccggggtgtggtgtcgaacagcagcaggtacagcgtccagtagagcgcgccgagggcaaagcagccgtagaagcaaagcagcagaaaatacgcctgcctgcggcttctgcggtaggatagacccgaaagcagtgcgccggcgaacgtgaccagcagctgcagcaggttctcaatcagctccatgaattccctcgctttcgttgttctgatcgtcctcccgcttcatctgatgcagccggaagcacagaacggtcacgcacacgccgagaagaaacgccaaaagcccgatgacgatatatccgagagcgccgccgccatacatgctggccgccgtttcaaagccggagtagtcgccggtctggatgcttgcggcaatgccgggcatggcgagggacgcgccaatgagcagcacaaggcacgccgccacagcggaagccatggtaatcttattgcgccgcagccgtttctcccgctcaattttggcgatgcgccgctttgtctccgcgacccgttcctcatgactccgcatttgtgattccctcccgttccagcagccttcgcaggctctcttttccgcgatacaccatgttggtgatctgctttaccgttttccccgtgacctccgccgcctgcgcgtagctcatatcttcaaaataggtgagatataaaacctcccggtagtccgggttcatttcacccatgcagaaatgcaggacgcggtttcgctccgccgtccggataacctcctccgccagcagccgcccgtccggctcgttggtcagcgcgtcgaggctgaacaagggcttccgcctactcttgcgccgcagcgccgtgtggcgcgcggccttatagagatacgccttgaagccgccgtcccgtatcttcggttttttcgtgaacagataggcgaaaacatccagcatcagctcctccgcctcgtgaacgtcgtgcagatagccgtcaatatacagggtcagggggtcgccgtattttttcatcagggcctccagccccgcgtcgtcgccgcttagatattggcggtaaaaaacctcgtcacaggtcataacgttccctttcctttgcagccgttcaggatgcagggcagcctgtcagacgcttgcacagccgtgccgcccctccataccgataaaaaaatacaacacaatttcagtatatacgaatctcggaagaaaagcaagagggcaagcggagcgataaaaagcagcacacccggagaaataacccggatgtgctgcagaaggccgaaacacagagcagctcagcagcgggcgccgctgatcgtggggcgccggatgagatgaggcagcgccttgcccgcttccttctgtgcaatgagccatgcggccatatcccgcagggtctgctccagcgggcgcggctgatatgcaaagcacttcgatgcagccgcatggctgaagcagccgtttgaggcaagaacggaaatggaatatggggtgaaaaacaatggctttcgatccttcaagctccggcgctcgtagtacggagcggccagccttgcaagacccagaggcaagcagatgggccgataccgccgttttgccgccgccccgatgatctgcagcattctgcgaatcgtgacatagtggccggacaaaatgtagcctttaccgggctctccgctttcggaacaggcgagaatgccatttgccacatcccgcacatccacaaagtcatatccgccgcgaacggcgaaaggcagcttcccggcaagaaaggatcttgccattgaggtgaagctccctccctgtaaatcatccggcccgatgatgccggaggggaatacaatgctggcgttcaacccgcacgccgctgcgtcgtagaccagctcggtggcagcggccttgctcttggcgtaatcaccgtccacaagccccggcgagaattcacagttttctgtaatggggcagccctttggctgctccgggatggcatgaacggagctgacatagaccagcttgcccactttatgcgccatgcattgctgcaggagctgccctgtcccacctacattgacctgatagagcctcggaccgggtctggacgcgacggagacgataccggcgcagtgaatcacacaggtacggctgtcggcatccgcaaagaagtctgccagcgagtttttggcgcacacatcaccgataacggtatggacttctttggggagcaaattgatataggggtcattctgcagcacaagcgcgtacacttgcgctctgcggcgcaccagcctctccgcaacagccctaccgaggaagccggtagcacctgtaacaagatatttatcatacattcaaaagacctcctctcaagataatcatacaggtgttgattatctttcacaagtatagtatactggagaggcagatcagaaacaatcggcatttgccctgcaattgaaagaaaagcaacacgtcgtgccggagtgttgcagaattttgtaaactttttgtgaggagcgcaaaatggagaagctggatgcaagaaaacgctatacgcaaatggtgctcaagcagtcctttttggagctgctgaaggaaaagccggtcagcaggattacggtgaaggaggtctgcgcgctggcgcagcttaaccgtgccaccttctatgcccattacagcgattgcttcgccctgatggagagcattgagaatgaactcatcgatgcatttgagaaatcccttcgctatgtcaattcctttgatgtgacggcgctgatcgaggccatctatgatatggtcgatcagaatcaggaggcctgccgggtgctgatcctgggcaacacaagctcgaccgtcctgatgcggatgatcgccttggccaaggaggacagcattgcttactggcggaaagaactgcccaatgccagcgaaacagagcttgagatgatgtatacccatctgtcaaacggtttgatgcatgtcgttgtggagggctatgacaagtacagcaaagaggaaatgatccattttgtcagccgggtcgtaaaagccagtctttcggtgttccgatcgtcccaaaaacctcttgcttaacatagatattatgtctgcgtggtataataagctttgcaaaaggattgacggtcaaagaaaggatgcagcagatcatgaaatcagttcggcagatcatgttggctatctgtgttatttttatcgcttccgcattcgcgggctgcggtgtggacgctgatttgccggagaagcgtccggcattggaaaaaattgagtacacaaatctcaacgacagcgtatcgcagaagcttttggaagatatgctttccggcgccggggtgtcggaagaccgtattcagggcttcttcaaccgtgtagacagtttcaatgaaagcatgagggaagaatggctgacggctggctttgagcaggcaaaactgctggacacaaaatatgactcatatgagatgcaggatgagtgggtgaagatgaatgggagctttcccggatataactgcaggataaccgcaatggagctgtttggtgatttcgtgtccgcaggaaataaagcacccgtggatacgggcgaagatgtgctgttcatggacgaggaaacactgaagaccagcccggatgcgctgggtggaagcagtctgaccgattttcgcgccctgtattcctccatgagggcggaagacaccgcggatgttctacatcatgttcaggctgtgcaggaggaatggagatccaggggtatttcgttccgggagaatgaaagaatacgcctcattactgtgttcttccacgacaagtctaccgaggaggaatccatcctgtttgtcgggcatgttggggtgcttctgacggcggacgatgggacactttattttgtggaaaaggtggcctttcaggagccgtaccggctgctgcattttgctgatcgtacggaactgagcgattatctcatgggcaagtacgatgtctcatggggacagagcacggcacacccgtttattatggagaacgatgaacttatggatggctggcgtccaaacccggacggtgccgacgcggggcttcattcagaaaacatcctgcataccattggtagatggggctgcctcaaaatgcgaattgcaagaaaatag

SEQ ID NO: 643 - DNA, 13842 bp, unidentified
  source 1..13842: mol_type = unassigned DNA
  misc_difference 1367: note = a, c, g, or t
  misc_difference 1368: note = a, c, g, or t
  misc_difference 1369: note = a, c, g, or t
  misc_difference 1370: note = a, c, g, or t
  misc_difference 1371: note = a, c, g, or t
  misc_difference 1372: note = a, c, g, or t
  misc_difference 1373: note = a, c, g, or t
  misc_difference 1374: note = a, c, g, or t
  misc_difference 1375: note = a, c, g, or t
  misc_difference 1376: note = a, c, g, or t
atgtattcatttgatgaagtattaaactatgatccagaccttgcaaaggctatggatgatgaacttggaagacagagaagccacatcgagcttatcgcttcggagaaccttgtaagtaaggcagttatggctgctatgggaagccctcttactaataagtatgcagaaggatatcctggaaagagatattacggtggttgtgagtatgtcgatgttgttgagacacttgcaattgaaagagcaaagaagctttttggctgtgaatatgcaaatgtacagccacattcaggagcacaggctaacttagctgtattcttcgcacttgttaatcctggagatacagttatgggtatgagccttgactgtggtggacatttatcacacggttcaccagttaatatttctggaaaatactttaacatcgttccttatggtgttacagcagacggatttattgattatgatgaagtattaagaattgccaaggaatgcaagcctaagatgattattgcaggagcttctgcttatgcaagaacaatcgacttcaagaagttcagagaaatctgtgatgaagttggcgcattacttatggtagatatggcacatattgcaggtcttgtagccggtggtgcacacccaagcccaattccatatgcagatgttacaacaacaacaacacataagacactccgtggaccaagaggtggtatgattcttgcttcagcagaggcagcagagaagttcaagcttaacaaggctgtattccctggaatccagggcggacctcttatgcatgttattgctggtaaggcagtgtgcttaaaggaagcgcttgacccaagctttaaggtatatgctgaaaatgttgttaagaatgcatcagcacttgctaacggacttatgaacagaggttttgatatcgtatctggtggtacagataaccaccttatgcttgttaacctcttaagcaagggaaagactggtaaggaagttgagaagcttctggatgcagctaacattacatgtaacaagaatacaattcctaatgacccggcttctccattcgtaacaagtggtatcagacttggtacagcagccgttacaacaagaggcttcaatgaggctgatatggatgttgttgcagaagcaattgctatgcttgttgatgatgtagatgctaaccaggccaaggcaatggagcttgttaagggacttacagataagtacccactttatgaataaagattttttcttgaaaattccttaagaattaaggaaaaaatgcatatttttattattgcaattttaagcacttggtactatagttaatggcgaagtgcaaaggggcacgaaagtgaaaagctttnnnnnnnnnntgcccctttctttttgagaagtggtggcatattgaagtccatatatctgaatgaagattgtatgaaattatgaaaagtaaaatttggaagtgaaaatatcagtcataggtgatataatcaacgatagtttaaatgaaaaggaattagaaattatgagacatttttcgagaacagaattaaaggcagctattaatatgcttaaggagtttactgcgaagggcaattttgcagttcttatgtatatgggggatactgataagcttgaggtatcacagactcttaattcggatatgagctgctttttattatatggaagcatccagccactcgcatttttctttgcagaaaatattcctatgactgcgggtgagttagaagagattattaacaaacagtcagcagtgtatgaagaagagatggacaattacagaaatgcactaaaggaaagcggtgcagataatggactgtttattactaaatatgaaagtatgattcatacatttattgcatatgatcctgaccagagtggtgacagagactgttatgcaccatttattgagggtgcattcaatgttgaaccgggtaagggacagtttgttaatgaagttatgagacttgaagtgtatgatgatgaatatgaggatgactgtgtaatccagaagaagcattttgtatatcttccatcagtaaaatttatgggagcattcaatatgcgaatgatgatgagtatggttgatgcacagtataactaacattttacaattcttaaatttatataatatgtttgaatcccggacttctgtatagtatattagaagtaactttaaagagtggaggggttgtatgaacaaaggacattttaaagacagtcaggttgttaagggaattacgattggtgcagtgctaattgtaatatatcttgcccttaacaatgtgactggaattcttgattctatatcatatcttgcaggacttgtaatgccatttataattggcgcagtcatcgcatttgtattcaatgtacctatgaaagcaattgaaaaaggacttaacaggctgtttgacaagcgttgtaagaagaagcatcccagacttataagagtgcttgcttatatgcttacactgattttgatactggctattattgcaggtgtactttttgtggttgtgcctgaactggtaaacacaatagctgaccttataagacaggtgccgacagcggttaataatcttatcaactggctgcaggtcaagctgtctgcatatcctgagtatgaggaaaagttaagcagcatatcaatcaactgggattctgttctttcaaatgttatgaatttcctttcaataggaactaaaggaattatcaatggaggaattggtgcaataagcggatttttctcaggagtcactaatttctttattggatttgtcttttctgtgtatgtgctgtttcagaaagagaggcttacagcgcaatgcaagaagcttatgtatgtgtgcatgcctgagaacagggcagataaaattattgaagtgttaagacttaccaacactacattctctaatttcctgtcaggacagtgtcttgaagcatgtattcttggaacgatgtttgttattacattgtctatattgagaatgccttatgcacttcttataggaattattattgcggttactgcacttattccgattgttggtgcatttatcggatgtatagtcggtgtgattcttataatgatgacaagcccgttaaaggcacttatattcgtgggagtattccttatattacagcagattgaaggaaatcttatatatcctcatgttgtcggaagttcagttggactgccgggaatgtgggtgcttgttgctgttacaatcggtggcaatctgtttggtataatggggatgcttacatttattccaatcagctcagtgtgttatgcgctgcttcggacatatgtgaataggaaagtggaagagaaggagattgacagagagaagtttcaggggtaggttttgtgcggatgtgggagacaggctgctgtatatatcattttcaaacacgcttgcgatcgtgctacgacgcagtggtttgaaaatgatatatacagcagcctgcctccatttgcacggaagattgttcgggaattgtatcttgtgtcggggacacggaggtacggttgtttacaaatggtaaagtttgatgtatgctagaatagtaaatgtaaagaatctataattgctaatataaaatatgagggatagaaaatggaagcactagttatggggattttactggatatgatttttttgcaagatttctatacataaaaacccaattctataaaaccaaaggcgtcgcaaatggaaatgacagacgatacacttctgagtttatatatggatacagagggcataattatgtctgcagtgtaacaaataatatattttcaaggtatcatgtaaggggggatgtttataccatatttgtaaaaaaacataatccatataatggagttatggggagtgaactgactatatatatggttctgagtattgtggagtttatatttgttggtttatacataatgctattgttattgaatcggtttatgtatgtgtcttaaattagtgcataagagggaaaagcctactaatgttgctgaatgtgatgaaatagtagtttaccgaggaactttggggagtggtaagataaggtagatgatttatattatgttagatgtgattcattaagggggatgcaataatgcatggagaatatataattatttatattatgctggatatgatatttttggctagatatttatacataaaaactcaattctataaaactgaaggtatcgcatatggtaatagcaatcattacttttctgagttccttatccgtgacgataaagggtataattatgttggctgggtaagtatgaatatattttcaccgcttcatacaagaggggaggtttatacgatatatgttagtaaaataaatcccaagaatgcagtgatgggaaatgaaccgactatttatctggttctgagtattgtgttttttgtatttgttattttctacttgatagtattagcattgtattggcttatgtaagtgtcgtaattggaaaataatccagtcgcttgccatcacgcggaattggacgttagagcagtggaaagacaagttgaagtccaaaagaagagaatataattaagaataaataagcaacatccccggcatgattaataaccatgccggggatgctgttttttatattctttaattacttattgttcttcttctcattctcaagcttcttcatagctcttaccttaagtgaaagaccgaagaggttgatgaatccgtcagcatcatgatgatcatacatatcacctgtcttgaatgatgcaattgactcgttgtaaagtgaatatggagatgttgttccagccttgatgatgttacccttgtaaagtctgaacttaacttcacctgttacatattcctgagtcttctcaacgaatgcctgaagtgcttcacgaagaggtgtctcccactttccttcgtaaacaacctgtgcaaacttgtttccaacatccatcttgaatgttgttgtatctctgtcgagaactaattcctcaagctgctgatgagcttcgtaaagaattgttccaccaggagtctcatatacaccacgggacttcataccaacaacacggttctcaacgatatcaatgataccgataccatgcttggcaccaagtctgttaagctctctgataatatcagaaaccttcatagccttgccattaactgactttggaacacctttttcaaatgtcatagtaacatattctggttcatccggagcttcctcaggagtgcatccaagaactaataaatgcttgtagttaggctcattagctggatcttcaagctcaagaccttcatggctgatatgccagatgttacggtcacggctgtagctgcagtctgtgctgaatggaagatgaataccatgctgtctgcagtattcaatctcatcctcacgagactgaagcttccagttagaatctctccaaggagcgataatcttgatatctggagctaaagccttgattgtaagctcgaatctgatctggtcattacccttaccagtagcaccatggcagatagcaacagcaccttccttacgggcaatctcaacaagtctcttagcgataagaggtcttgccattgaagtaccaagtaaatatttattttcataaacagcgtgtgcctgaacacatggaacgatgtagttgtcgcagaactcatcagtgatatcttctatatataacttagcagcaccacatgagagagctctctgctcaagtccgtccaactcctcttcctgaccacagtctgcacatacgcagacaacatcatagttgtatgtttcctttaaccaagggatgatggcagttgtgtcaagtccgccagaataagcaagaataactttttctttcattatatattcctccgtatattattaagtttacatagtaaaacacatatgctatgcacctgcagattataataaactactttatttaaaaatgcaacaacaaattatgcatattatacattaatatacaacaaaaatgtataaatatgaattttctttaaaatatcctttacataagaaaaaaagttgctataatgtaggttatcaatttacattttgcgttattttatgcataaatgttgaatatatgcattttgcttcgcaaaacaaggaggagttatgattaaagtaggcattatcggtgcgacaggttacgcaggtaacgagcttgtcagattattattaggacataaggatgcagagattgtatggctcggttcgagaagttacatagatcagaattattcagatgtatatagaaacatgtttaagcttgtagatgcaaaatgtatggacgacaatatggagcagcttgctaacgaggttgatgttatatttacagcaacaccacagggcttatgtgcatcacttgttaatgacgaaattctttcaaagactaagattattgatctgagtgctgatttcagacttaaggatgttaatgtatatgaacagtggtataagcttgagcataaagcaccacagtatattgatgaagctgtttatggcttatgtgagattaacagagacaaggtaagcaaagacacaagaattattgctaatccgggctgttatacaacaacatcaattcttacactttacccaatggttaaggaaggaataatcaatccggatacaattataattgatgctaagagtggaacttcaggtgcaggacgtggagctaaggttgccaaccttttctgcgaagttaatgagagcatgaaggcttatggtgtcggaactcacagacatacacctgagattgaggaacagttaggttatgcatgtggaagagatgatttaaagcttatcttcacaccacatttggttccaatgaacagaggaattcttgtaacagcatacgccaaccttgccaaagatgttacatatgaagatgttaaggcagcatatgacaagtactatgataaggaatatttcgtaagagtacttcctaaagatgtatgccctgaaacacgctgggttgagggaagcaactttgttgatataggatttaagattgagccaagaactaacagacttataatgatgggtgcgttagataatcttgttaagggtgcagcaggtcaggcagtacagaatatgaaccttctcttcggacttccagagaatgagggattacagcttgcaccaatgtttccataataaatgtagcgtaaattcagaatttacacgacgaaatatgcacaatgacagagtatatgtgatggtacaataggaggatgttatgaatataattaaaggcggtgttacagcagctaaaggattcaaggctgccggatgtgaagcacagattaaatataagaacggaaagaaagatatggcacttgtatacagtgagaagccatgtgttacagcaggaacatttacaactaacaaagtatttgcagctcctgttaaatgggacagaaacattgtatataatgaagactttgcacaggctgtagttgtaaacagcggtgttgccaacgcatgtacaggcgttgaaggagataacgcatgtgcagaagaagcaaaggcagttgcaaaagttcttaatgtaccggagaatgcagtacttatcggttcaacaggtgttatcggaatgcagcttcctgttgacagaatatgtgcaggaattgaaaagcttgctccaatgcttgatgattcattagaagcaggaacacaggcagcagaggcaattatgactacagatacaagaagcaagcaggttgctgtagaagtagaagttgcaggtactaaggtaacaatcggtggtatgtgcaagggcgcaggaatgattcatcctaatatggcaacaatgctctgctacataacaacagactgtgatatcgacaaggcacttcttcagaagatgacaagtgcaattgttgatgattcatttaacatgatatcagttgatggagatacatcaactaatgatacagctcttgttcttgctaatggaatggctggcaataagaagattacagaagagggtgctgattataatgctttctatgaaggcttaagctatgtatttacagagctttccaagatgattgcaggtgacggcgagggctgtacatgtcttttcgaggttcaggtaaagggtgcaacaactaaggcagaagccaagacacttgctaagtcaattgttacatcaagtcttactaaggcagcaatattcggacatgacgctaactggggaagaattctctgtgcaatgggatattctggtgctgactttgaccctgaaaaggttgatatattctttaagagttcagcaggtgagcttcagattgttaaagatggaactgctacagactacagtgaggagaaagcaacagaaatactttcacagaatcctgtaattgctattgctgatgttaagcagggcgatgcaagcgctacagcatggggatgtgaccttacatttgattatgtcaagataaatgctgattacagaagctgatctgacacagcattttaaagcaaatatatctgaataaatatgaaatggagattattatgagcgcaaaagatatgacagaggaacttatgaaggcacaggtgcttgttgaggcacttccttatattcagaagtttaacagaaagataattgtagttaagtacggcggaagtgccatggtagatgaagaacttaagagaaaagttattcaggatgttgttcttcttaaactcgttggttttaagccaatcatcgttcatggcggtggcaaggaaatcagcaaatgggttgaaaagtcaggcatgacacctgaattcaagaatggattaagagttacagacgagccaacaatggagattgccgagatggttcttaacaaggttaataagagtcttgtgtcaatgattgagcagcttggagttaaggcatgtggtatcagtggtaaggatggcggcatgttaaaggttgagaagaagtattctaagggtgaggatataggatatgttggtgaagtgacagatgttgacacaacacttcttgattcattgcttaaggacgatttcctcccagtaatatgccctattggatatgatgatgattttcatgcatacaatattaatgcagatgacgcagcatgtgcaattgcaagagctgtcagtgctgaaaagcttgcattcttaacagatatcgaaggtgtatataaggattttgacgataaggattcacttatatctgagctttctacttcagaggcgagaacacttttagagagcggaacaatcggcggcggtatgcttcctaagcttaataactgtatagatgctattgagcatggtgtatcaagagtacatattcttgatggaagaattccacactgccttcttcttgaaatatttactaacaagggtgttggtacagctattctttcagatgatgcagaaaaattctttgattcagataaataattgcgaaccgtaagcgttgaggttataatattatattggcccatgtgaaaatgtgtgctcataagaataggaaagtgagagtaatcatgaatacacagcagattatagaaacagcagaagagaagctgattcatacatacaaccgttaccagatagtacttgataagggtgacggagtaagactttacgatacagatggtaaagaatatcttgattttggagcaggtatagcagtatttgcacttggttataacaataaggaatataacgatgcattaaaggcacagattgataagcttatacacacatctaattatttctataatgaaccggctgtagaggctgcaacagcacttacaaaggcttcaggaatggacagagtattctttactaacagtggtacagaggctattgaaggtgcagtcaagcttgcaaagaaatattattatgtcaagaacggaaaagctgatgcagagattattgcaatgcagcattcattccatggaagaagtatgggagcacttgcagtaactggtaataagcattatcaggaagcattcggacctatgataccgggaattaagtttgcacagtataacgaccttgacagtgtaaaggaacttgttaatgacaaaacttgtgctataatatttgagacagtacagggtgaaggaggaatttatcctgctactaaagaatttattgaaggtgtaagaaagttatgcgatgagaagggaatccttcttatacttgatgagattcagtgcggaatgggaagaacaggaagtatgtttgcattccagcagtatggcgttaagcctgatatccttacagttgccaaggctcttggctgtggagttcctgtaggtgcatttgcagcgacagaggaagttgcgaaggcattagttccaggagaccatggaacaacatacggtggtaatccacttgcatgtgcagcagcaaccaaggtgttcgaactttttgagaagcagcatgtattagataatgtcaaggaagtatctgcttactttgaagaaaagcttgatgagcttgttgagacaatagatgttgttgtcgagagacgaggaatgggacttatgcagggacttgagttatcagttaatcctaaggatgtaattgcgagagcacttgataacggacttattctgttctcagcaggaactaatgttataagatttgttccaccacttgtaattactaaggcagatgtagatgaatgcatagctaagcttaagaaatccttctagaatcaggagtttactttatgaaattaagaagatttatcagtatgatgctgattgttaccatgctgacagtctttgcaggctgtggtaataaagatgacaggacacaggctgcgaagaagcttaatcttagtggacctattacagttaatgtctggtataatgacagtgcatatgagtcttatcttgaattcgttgccagacaatttaagaaatctaatgaactggtgactgttaagccagtatatattgaggcggattcatatattaattatatatatgacgaatcggtaaggaataacaatgcatgtgatatatattttctgacatctgaagagatggagaaggcttatctttcaggtcttacctctgagaatgatatgtatcctgaagtctataatgagaatgtgtatggtaaggctgcaatgactgcatgttcgtatggtggtaagttatatggttacccggtgtcgttcaacacttcatttcttgtatataataagaaatatgcagaagcagttgatactatagaccagattcgtaatataagtgataattatcagattacagatgagaatcaggatgtttcaatggtgtttgaatgggatcctgattcaatgttccttaattatgcagcagcaggagcctatattaatataggcggagttaatgcagagaacagggctgaggtatctcttaatgaggaaaagattaagaaggttcttactaagtacgctcagttaaaagatgcatttggtattgacagaaatacagtaagtcttaaagactgtgcagatctgttttctactggaaatatgctctatactgtgcttgatgcagacagtcttgcagagattaatgttacagatgtagattatggaatatgcgagtatcctacaatgggagatgatattgattctaaggcaatgtctgttactacgatggcagtagttaatccgtacactaagaatgtagatgcatccaaggctgttgcaagagcaatttcttatgattatgcagattatcttggaaacatggctaagaaaagctgtgcaagggcggatttaaaggttaagagagcagaaagctaccagaagttacaccagatttattctgactctgttgtaaaagctaaatatatcggagtaggagaagtgtatatgagatatgagattatgcttcatcaggtatatgatggtggaaatgttgatacagcttacagtacatttgcaacaacaatagaaaaaacaactaaaaataataatgaaaacagtacgcagagtactaaataacattatgaataaatatcctgttattaactaataattattctatgcagattaatggggaggttagttaatggcaggatttttgattgcaataatatcaggtgcacttatgagtttacagggcgcatttaatacaaatgttacaaaagcaagcagtgtgtgggttacggcaatgtttgtgcagttgacagcactggcgacttgtgcgattatgtgggtaattgacggaagacctgatatcatgaagctgtttaaggttgataacaagattacacttcttggaggtgtgataggtgcatttataacatttacagttataaaaagtataagtggtcttggaattgctaaagcggaggttacgattgtagttgcgcagataattgtttcgtatctgctgggacttttcgggctgtttggaagtgagaagactacattttcatggattaagctcatgtcgcttcttattacggttgcaggagtatgtatgttttattttcttggtaatccgtcaacggattaatatattatgaataattatgataaatgtcagaaaaatctgacaggaaggaacagaatggaagatttattcagcgtatgcggaaagatacgattaagaaaaggtgaaggaagaaccttaaaggcaggcggtgcctgggtatatgataacgaaattgaatggatgtctgacggaataattgacggacatcttgttgaggtgcttgattttgatgattatttcatgggaatcggatttattaacagaaaatccaagattacagtaagaatgcttgcaagacacacagatgttgttgatgaagcatttattgaggagagagtaagggctgcagttgagtacagatttgacacagtagatacctctgcctgccgtcttatatttggggaggcagattttctgccggggcttgttatagataagtactcagatgtgcttgttgtggaatcgcttgctttaggtattgacagatttaagtcacttattgtcgaaaaagtgaaggaaatccttcatgaaaaaggcattgatatccgtggagtatatgaaagaagcgatgccaaagtccgtactcttgaagggatggagagagttaagggctttattggtgatgaatttgacactaatgttgagatagttgagaatggtgtccactacatgatagatgttgtgaatggacagaaaaccgggttctttcttgatcagaagtacaacagacttgcaatgcagaagctgtgcaaggacaagcgggtattagactgttttacccatatgggtacatttgcattaaatgcaggaattgcaggtgctaaggaagttactggacttgatatatcagaatatgctgttgaacaggcgagagccaatgccaagcttaacggacttgagaatacagtacattttaaatgtgcaaatgtattggatgagctgccaaagcttaacgaagcaggtgagaaatatgacgttgtaatacttgacccgccggcatttaccaaatcgagggaagctacaaagaacgcaatcaagggctacagggaaatcaatatgaagggacttaagcttgtcaaagacggcggctatcttgcaagctgttcatgctcacacttcatgacacaggagcttcttaccaagactattaaggaagccgctaaagctgtacataaaagactccgtcaggtcgagttcaggacacagtcacctgaccacccaatactgtgggaggcgcaggagagctattatctgaaattctacatcttccaggttgttgatgaaaaatga

SEQ ID NO: 644 - DNA, 7309 bp, unidentified
  source 1..7309: mol_type = unassigned DNA
ttatctgttttgaattgcaatttttctgtaggtatcgaacttaacccactttgcaaagaaatccgcatcgttgatgcttttaagatttgaatactcggaaagaaactgctgaattttttcgttgttgtcggcaagaacctcgaagcctctgccgtttacaacaggaacaccgccgtagctgtactccgatgtcggaacgatatcggtaatcttgcggtcacgaacctttacggcaacgctgtcacgaagaactataatatcaaagctgtcgggatacttatagctttcgccctcaacagggattgtgtcaccctttgtataggtttccttaacaggctgatatttgagaacattaaggcttgaagtgtcgtagaaaaactcttcaaagatatcacctcttccctcaagtgagccgagtacgaatgatgccttttttgcatcatcggctttttcttcaaccgaatcaacaacaccgcaggctgatgtcatatttgacacacggtcaatcaaaataagctcgccgagtgttttatgctttgagaaaaggtcaaccgcaatcggctctgcaagcagaattgtgcagactgcgattccgttctttgtgagtgaatcggcaggaatatgctcgcctgtgttcacatcaacagcgtacttgatttcggaaacgatacccgaaatagtctttgtgccgagctttacaagataatccttgccggctgtaagctgttcgtcatccatccagagaattgacgctgtaagctcctgataggacgcaagatttgtgtcctttgttattacacagccacgggatacatcaacttccttgtcaagtgtgattgtaacgggttgtcccttgaaagcggttttaacatccttatctgtcataaggatctgctttacatgagccttttcattgctcggaagtgttacgatttcatcgcctacgctgatactgcccgactcaatctgtccctgaaagcctctgaatgtgtggtcgggacggcaaactcgctgaacaggaagatagaatccttcttcctcctccgaggaatcaacatcaacagtttcgagatactgaagcagaggaacaccgttgtaccacggaatgttttcggactttacggtaacattgtcgccctctgttgcggaaagcggaatgatgtagatatcgtcaagtaaaagctcgtttttaagttcttcaatctgctttacgatttcgtcaaagcgtgacttgctgtactttaccaaatccatcttattaacggcaaagacaaaatgtcttatacccataagcttacagattcttgcgtgccgtcttgtctgaacaagaacgccctgtgatgcgtcaatgaggataactgcgaggtctgcaaaagatgcgcctacagccatgtttcttgtatattcctcgtgaccgggtgtgtcggcaacgataaaactgcggttgtcggttgtgaagtagcgataagcaacatcaattgtgatgccctgctcacgctcagccataagaccgtcaagcaaaagcgaatagtcaatgtcaccgctgcgactgccgaccttactgtcaagctcaagagccttttcctgatcggcataaataagctttgcgtcataaagtatgtgacctatgagtgttgatttaccgtcatcaacactgccgcaggtaataaatttaagtaaacctttcatcagaagtaaccctccctttttctgcgttccatactgccctgtgcctcgttgtcaattactctggaggtacgctccgaagaaacggagctgagggtttcgtcaataatttcatcaagagttgttgcaattgactctatgccgcctgtaagaggataacagccgagtgttctgaaacgaaccgatttcaattcgggtacttcgccctctttaagcggaaaacgatcgtcatcaaccataataatgttgccgtcacggtaaacaacaggtctttttgccgcaaagtaaagcggaacgatgtcaattttttccctttgaatgtactgccatatgtccttttctgtccagttggaaatcgggaacacacgaatgctttcgcccttattgatttttgtgttgtaaagcttccacatctctgggcgctggttcttaggatcccatgcctgcgctttatttctgaaagagaaaattctttccttggctcttgacttttcctcatctcgtctgccgccgccaaatgccgcagtaaaaccgtatttgttgagtgcctgtttgagagcctgtgttttcataatatctgtgtaagccgcaccgtgatcaaacgggttgatgccttttttaacaccttcttcattggtgtaaacgagcatttcaattccgagcttttttgctgtgtcatcacggaattttatcatatccttgaacttccatgttgtgtcaatgtggaggaacgggaacggcggtttttcgggataaaacgccttcattgcaaggtggagcataaccgagctgtccttgcctattgagtagagcataacaggcttttcgcactctgccgcaacttctctgattatgtatatagcttctgcttcaagctcatctaaatgtgaaagctgactcataccttatctccttttcacggaaatacttacaaagtgtttccttagtatttgtttgattctttttgatttatatcaatcttaatgacctcgccatgcggtttttcaattaaccacgagaggatatctccgttcttttcggtgtgaaccttactgcccataccgccgatatcggaaccgaggaaaaagttgattgcatatgcgggacattcttttatgcaggaggtgcagccccagcaatccttgggatatttgatgtacgctttgccgttttcgtcagtcttgataagacttccggggcagacattgcgacactttttgcaacctatgcacttggacttgtcaattactatgctcatacttttcacctcccgttacaaggtcacgaataataatttttatctcgccgttttcaagacgggaattaacatacttgttaaggttcctgtcgtccttttcgggatagtcaaggttttcggcaaagctgtgccagcgtgtttcctttctcgctctgaggtgagcaattacgcttttgcagaccgtaagcctttctttaagctcgcagatatacataagctcctgaaaatcttctgcatagaggtcatctgtgagcgtttcaagctgtctgattttgcagtcggcaatgtcaagctgtttttcgttgaaacggtagtttgtttttataccgcctgcgtagctgtccataactgtctgcattgcctcttcaagctgttccgtggtgtagagtgaatggcggtctgtgagatatttctcagtttccctgaggtgataatttgtatcttcatcgctgattttctcaaagctttctttgctgtcaatatacttaactgacgaaagccctgcaatttcaccctctgcaagagcgcccgtaacatacttctgcggacaacctcctgcaacatcaccgcctgcaaaaagtccttcaattgtggttgcacggtctgtgtcaacccagtaaccgcttgccgtgtgaccgcctacgatgtacggctctgttccctcaatttcaacattctgccgtgaaggatttcttccgctttcaatccacttgattgtctgcgaaggcgccatattgagataggcttttaaaagtgattcgtcctgctcggctgtgattccctctgttctgaggtagcagggacctctgccctcctgattttcatttaccgtaccgtaaactctttcggaagttgtaagtccgtactttgtttcataaacctcgccgagtgaattaatctgctttgcacctacaccctgtgcaagtgttcccgtgggagcgattgtgtccttgcatctgagtgcgataaaacgcatttcaaaggttgtcatctctgcaccggctctgattcccattgcgtagcctgcacctgtattaaagggcggataccacatcttgtgacgggaaaatccggggttgttcggcttgtaaagtcctgccgcaccgcctgtggcaattatgacagcctttgcttcgattgtgtagaaaattccgctttcaatgccgaatccgaatgcaccgttgattttgttgtcctttaccgagtaatcaaaaatattaacacggttgagaaccgttacattctttgccttttcgactgcgtccgcaagaatcggctttatgttttcaccgttgattttaaggtttcggttgcctcgtgtaacatactttccgttctcgtcctttaaaattacaagaccgagtttttcaagtctgtcggttacttcgttgagcttttcggacatggtaaggagcaaatcctctctgacaatcccgtcggcgtcctttttagcgtagtcaacatagtcctgcggttttctgccctcaacaatgtatgcgttaagagcgtttacacctgcggcaagacaaccgcttcttttgatgtgtgctttttcacagataagaacctttttgtccgaattttcggaaatggtcagagccgcataacagcctgccgttccgccgcctataatgaggacatcggtacttattttttctgttttcataggatttcactcccttgccgttattgtttctcgtcaagatatttttctgccgaaatcacacagtttgcaccgtccgacacggctgtaacaacctgacgaagtgcttttgttctgatgtcaccgcctgcaaaaataccgtctgcggaggtttttccgctttcatcggcaataatgtaaccgtctttgtcggttttgacaagatttgcaagaggttttgtatcgggaacacttccgactgcaacgaaaacaccgttgcaatcaagctgtttttcttctccgttttgtaaaagtgtgaccgaagtcacctttgtatctccgttaatttcagataccgttgcatttgtaagagcttcaatattttccgtggcaaacaccctgttctgcaaggctctgcctgctctgaaggaatctcttctgtgaacgagataaacctttttgcagaatcttgaaagcagaagtgcgtcacccaaagcagtgtcaccgccgcctgttaccacggtaattttatccttatagaaagccgcatcacacaccgcacaataagaaactccgttacccgaaaattccttttcgccttttacaccaagctttctgcgctgtgttcctgccgcatagattacggtttttgtttcaagactttcaccgccgtcaatgtttacggagaagttaccgttaactctttcaacctcggtaacctctccctcaacaaattcagcaccgagtttttcggcgtgagttctgaacttttctccgaggtcaaagcccgtttcaccgtaaagtccggggtaattatctactctctcgctctcggcaatctgtcccgtacccataaattctttttcaaccacaatcgctttaaggttttcacgctgtgcataaattgcggctgaaagtcctgcggggccgctgccgataatcacgatgtcgtacataatctccctcctttactctataacaagtttttccttttctgctgtatctcccgtaattttgaatgaattgagaacggggttttctctgttcataagcgaaagaatcatatagcttgccttgctgtcaaaggcaagtcttttgtcctcttcagacggtcttgacggcgattcgggatgtgaatgccagttgccgagaggaacaaatccgttctttctcatatccttgattgcctcaagctgttcctttggatcaagcgaaaaatgttcgtttgagtggtcgatatttgtaaggagataaacccttttaatcttcttgtcaccgtcctcaaccgttcctgcaataaggccgcaagcctcatcgggaagctcctttacagcgtgagcaagtattttttcaaagtcactttttgtaagttttatcataaatgaacaccgtcacattctgcctgttcgtagtcaataagctctgtgattgtcggatggtcaccgcagactgcgcaattgtgtgtgtcactcggaagttttaccttgcgaaattccattttgagtgcgtcatatgtaagaagatagcccgtgagcaactcaccctgaccgatgatgtacttgattgcttccattgcctgtaggctgccgattacaccgcccattgcaccgataacacctgcctgcttacaggttggaactgcgtcctttggcggagggttcttgaatacacaacggtaacaaggaccttcacccggcacataggtcataagctgacctttaaatctgataattccggcgtgtgagaaaggctttttagccattacacaggcatcgttgataaggaactttgccggaaagttatccgtaccgtcaatgatgaagtcatactcctttacaaggtcaagtatgttttcgcttgtaacaaatgtgtggtatgtctttacggtaacatcggggttgatagcctccattgtttcctttgccgactcaaccttaggcttgccgatatcctgtgttgagtggataatctgtctttgaagatttgagagatccacctcgtctgcatctgcaattccgattgtacctacacctgcggcggcaagatacattgcggcaggagcgccgagtccgcctgcaccgataatgagaacctttgcattaaggagctttttctgtccctttgcgccgacctctttaagaataatgtgtcttgaatatctttcaagctgttcgtttgaaaatgccattactgaccgcctcccataaagtaaaggaactctacaacatcgccgtcctttaaggttgttttttcaaatgtaccgctcttaacaaattcgtcattgattgtaacggttacatactcgggtgtttcaacattctcgtcaataatgagctgtgctaccgtaagattgtctgcaacttcctttttgtttcctgcaactgtgattgtcataacgattactccttaataagtttttctgtcacttcgattatttctgattttttgaccgcacctctgagtctttctttctcttcaccgtttttgaaaaaaacgagtgtgggtgccgcctgtacttcatattccgatgcaagctcggaatcaaaattaacatttatctttgcaattttcagcttgccctcatactctttttcaagctcaaagagtacgggtgaaagtcttttgcaagggatacagctgtcggaataaaaatccgcaagcacgagtgtatcggctgaaagaacttcgctctgaaaattgtctttgcttactctctgcggcat

SEQ ID NO: 645 - DNA, 18556 bp, unidentified
  source 1..18556: mol_type = unassigned DNA
  misc_difference 1220: note = a, c, g, or t
  misc_difference 1221: note = a, c, g, or t
  misc_difference 1222: note = a, c, g, or t
  misc_difference 1223: note = a, c, g, or t
  misc_difference 1224: note = a, c, g, or t
  misc_difference 1225: note = a, c, g, or t
  misc_difference 1226: note = a, c, g, or t
  misc_difference 1227: note = a, c, g, or t
  misc_difference 1228: note = a, c, g, or t
  misc_difference 1229: note = a, c, g, or t
ttattcggcatcgggaaggcttgcaagcttttcaaggtgagcatacttatcagcagcaaccttttcagccttttcaaagagtttttctgctctttcggggaatgaacgagtgagtgagttataacgaacttcgcccatgatgaagtcacgatatgatgcagaaggagctttaccgtcaagcatgaacggattctttccttcgtctgcaagacgaggatcgtaacggaagatgttccagtaacctgcctcaacagcctttttctcctcaagctgagcaatgcccatgccgcccttgataccgtggttgatacacggagcgtagcagattacgagtgacggaccgttgtagctttcagcctcaaccatagccttgagaacctgattgttgtcagcacccatagcgcactgtgcaacataaacatagccgtagctcattgcaatagcggcgaggtctttcttcttaacagccttacctgcggcggcaaactgtgcaaccgaacctacaggagtagcctttgaagcctgaccgcctgtgttagaataaacctcagtatcgaatacgaggatattaacattttcgcctgatgcgattacatggtcaagaccgccgaaaccgatatcgtaagcccaaccgtcaccgccgaagatccacattgacttcttagcaagttcgtccttgtcaacgagtgttttcttaacaagttcgccaacctttgcatcctctgtgttcttttcgagttcagcgataagagcgtctgttgcaggacggcttgaagttgaatctgttactgtgtcgagatagttctggcaagctgtcttgaggtcagcgctgtctgtatccttctgaataccctcaacatactcgataagtctgttgcggatagccttctgaccgagagccataccaagaccaaactctgcgttatcttcaaagagtgagttctgccaagcaggaccgtaacccttcttattctttgtataaggtgttgcaggagcagatgcaccccaaattgatgaacagcctgttgcgttagcgataaacattctgtcaccgaaaagctgtgtaacaagctttgcatacggtgtttcaccgcagcctgcgcaagcgcctgagaattcaagcaacggctgtttgaactgactgcccttaactgtagtgaacttgaacttctcgtgaacttcaggcttatcttcaagtgtgagagcgtagtcaaatactnnnnnnnnnngctgtgagtcgattgactgcattgtgagagccttagcgcccttcttacccggacaaacctgagcacaagcgccgcaacccgtacagtcgagtgttgaaactgtcattacaaagttgaggtccttaagtcccatcattgggaggctctttgtaccctcgggagcttttgcaagctcatcggctgtcatggcaacaggacggattacagcgtgaggacatacgattgcacatctgttacactgaatacagttttcaggattccattcgggaacatcaactgcgatacctctcttttcataagcggcagaaccgttcggagcagtaccgtcaacatgatccataaatgttgaaacagggagcttgttgcccttatatgcatttacaggcttgaggatttcgtttacatactcaacgagagcaccgttaccctctgccttgtcggcaactgaattatcaacagcattagcccaatcagcaggaatttcaacctttttgaggtcttccataccacggtcaatagcggcgtagttcatatctacgatagcctgacctttcttcatgtatgacttcttagcggcagccttcataagctccttagccttgtcggcaggaatgatatctgcaatcttgaagaatgctgactgaagaactgtgttgatacgaccgcccagaccgatttccttaccgatcttgataccgtcaattgtgtagaagttgatgtgtctttcagcgagaatcttcttcatcttacccgggagacgctcggaaagctcttctgtatcccatgggcagttaagaaggaatgaaccgccttctttaaggtcatcaacaatatcgtacttgtcaacataagacgggttgtggcaggcaacgaagtctgcctttgaaatgtagtatgttgacttaataggagttttaccgaaacgaaggtgagaaactgtaagaccgcccgacttctttgagtcatatgcaaaatagccctgagcatacatatcggtgttatcgccgataatcttgattgagttcttgttagcaccgacagtaccgtcagcaccaagaccccagaacttacagctgtgtgtacccttcggagttgtatcgggattttcaacaatcggaagtgagaggtttgtaacatcatcaacaatgccgattgtaaatcttctcttgggtgtttcgctttcagcgtttctgtaaacagcgatgatgtcgcctggtgttgtatcctttgagccaagaccgtatctgcctgtgtaaacctttacacctgcaaagtccgaaccgttgatagcggcgagaacatcaagataaaggggttcgccgattgaaccgggttcctttgttctgtcaagaacagagattgtcttaacagtcttaggaagctctctgagcatatagtcggcaacgaaaggtctgtaaaggtgaactttaagaagaccgaccttttcgcctgcggcattgaggtaatcgacaacttcttccgtacagtcgcagacagaacccatagcaacgataacatgctctgcatcctctgcaccgtagtagttgaacggcttgtagtcagtgccgattttagcattaaccttgtccatgtacttaacaacaacttcgggaactgcgtcataatacttgttacaagcttctcttgcctggaagaagatatcgtcgttctgagcagtacctcttgttacaggatgctcagggttaagagcacgacgacggaaagcctcaactgcatcccagttaagcatatcggcgaggtctgcgtaatcccactcctcaatcttctgaatttcgtgagaagttctgaaaccgtcaaagaaatgaagaaaaggaactctgccttcaatagctgcaaggtgagcaacagcggcaaggtccatacattcctgaggattgtttgaacaaagcattgcataacctgtctgacggcaagcgtagatatctgagtggtcaccaaaaatagaaagtgcgtggcttgtgagcgcacgggctgatacatgaataacgcccggaaggagctcgcctgccatcttgtacatattcggaatcataaggagcaggccctgtgatgctgtgtaagttgttgtcaaagcacctgctgcgagtgagccgtgaacagcacctgatgcgccgccctccgactgcatttccgttacctgaacctgtctgccgaaaaggttcttggcaccctgtgccgagaacttgtcggtaaggtcagccattacggaagaaggtgtgataggatagatagccgcaacatcggtaaacgcataagaaacatgagctactgcgctgttaccatccatagttttcatttttcttgccaatggaatcgtcctcctttttaatcaaagcggcaaaggaaatgatgccgcataaattttcgatacccgttaattacgcaccgtaaatcaacaagcggtacggatactttgtatcatcttaaattttatcacttaaacaccaatttgtaaagtgttttacacaagaaattcaaagcaggatatatatttttgtttcgttttttacaaaaaagttttttatatttacttgttcctgtcaaaatactttgttgttgattttttaaaaatcaataacaaaggttttggttatttgtacgaacggttgcaatgttacgctcgggcataatatgttttttacattacaaacttgcttcccgaccataattttcaattttccattttcaattttacatttaattaaacctttcgctcgggcatagtttgttttttgacattacaaactatctacacgaattgggaacggcggctcgccgtaattttcaatttataaatgctttatcgcttcgcttaaatccgtacacaaaaaatctatcatcggtttaatttcgtctgtcggctctgacaaatcgggaaccataaccgtggtcatacctgcggcatgtgcagattttatgccgttaatgctgtcctcaaacgcaacgcagtccaccggctcaagcccgagcttctttgcggctatcaaaaaaacctcgggatcgggtttgccgtttttaacatcatcaccgcacacgaatgcgtcaaatttatcatagagattgattttcttcataatcttcaaagccgtttgtgacgaggttgaagttgcaagcgaaattttacaaccgactgattttaaataatcaaaaatttcgtacaagcctttttttacaggcacaccgttcttttcgatacgcttaaaatagcggattctcgactccgccttgtaagcaggatagtcaaaatcatcgccgtaaaccgacttgtaatattcgtaggaatcctcactgcgaagtccgattgtctttttgaaaatgtcgagattaaactctttgccatcctcatcaagcatttcctgccagattgaataaacaagcctttcgctgtcaatcataagcccgtccatatcaaaaactgcgcccttaaacataaaaccgccccttttttcgcttttaagtctgtatataatagcatattttacaaaaaaagacaaatcggttgtaattgcgacaaagttatgatacaatcgtttaaatggtctgtgaaaaatataaatttgagggtaaggaaattttatggcaacatcaatttatgcaaaacctatcaaagcaaaaacgattctgaagttcactttgccaaccgttcttatgatggtttttatgtcactttacacggttgttgacggaatcgttgttgcgaactgtgtcggaagtgacgcattgtccgcaatcaatattgtatatccgttcacgctcgtatttatggctgtgggcttaatgttttcaacaggctcaaatgctataatcgcaaagaaaatgggagaaggcaaacaggaggaagcaaaccgacttatgtccggtgttgcaatcacggcaacggtcatttctgttatcattgctgtgctgttcacaatttttgccgaacctatgtacatgatgttcggctcaaacgaaaaaattctcccctactgcattgactacggcagcgttatgattccgtatggctttgtaatgtgctggcagatgctcaaccaatcgtaccttgtaacagcagacaagccacatatcatgcttgttttctcgatactgtcgggttgcacaaacattgtgcttgacattctttttatggctgtgtgggattttggaataatcggtgcaggactcggcacaatcatcggaatggctgtgggtgcaattccgcttttgctctttttcaacaaaaagcagactctgcactttggcaagcctgaattcaaggtaagtgaaatcctctttgctatggcaaacggctcgtcagaggctgtgacaaatctttcaacagccgtgacaacagcgctgttcaacattcagatgatgcactttgcaggcgcaaaaggcgttgcggctataagtgctattttgtacattcactttattttcactgcggtttcgtttggattcacttcgggagtttcacccgtcatcagctttaactacggcgcacaaaatcacgaaaaactgcaaaagctgttcaaattatgcataaaaatcacgctgataatttcggttgcaatgattacggcatctgaattttttgcagaaccgcttgtcggaattttctcggcaggcaacgaaaaaattcagcagattgcactcagcggattcagaatttttgcaataaattatctgttgtgcggaatgaatattttcgcatcgggacttttcaccgcactcaacaacggcaagatttcagccgtaatttcagttgcaagaacgcttgttttcgagtgtgccgcaatgctgattttgccgatgtttataggcataaacggtgtatggtcggcattgcccgttgcagaattgtgtgccgttgcaatttccgtaacatttataattgccaatgcaaaaaaataccatctggtcggtgtaccaccgcaccccgttcgtgcagacagtttataatattgaaagcatatcatgccagagtgtagcattgtaaccatttgtacaaataaacgcaaaaaatccgagcatcaaaacaatgctcggataattttttacaaccaacaattaaagttcaattaaaatcgaaatcagattgcacgaactctgattacgccgtcaactgctgcgatttttgcaaggtcatctgcaccggcgcctgcaacatcaataattgtgtaagcatagtcgccacggctctttgaaagcatattttcaacattgccgctgatctgtgtgagaaccttcttgagaagctcgggaacattcttgtgagcaacgcagaaacgggtatcgtcagcatttgttcttgcaagtgaaattgcaggatagtttacggagttgatgatgttaccgttctcgagatactccttaacctgatcacaagccataacagcacaattttcttcactttcgggagttgatgcaccgaggtgtgggaggcagataatattctcttcaccgaggatatcgtctgttccgaagtctgtaacatacttagcaaccttgccgctcttaacagcctcaagaactgctgttgaattaacaagaccgtcacggctgaagttgagaatacgaacaccgtctttcatcttggcaatcatattggcatcaaccatatctcttgtgtcatcagtaagcggaacatggattgtgagatagtcgcaatttaccataacatcttctgcgctcttcatgagcttaactgtaggagcaagcttgagagcgttgcctacagacataaacgggtcaaagccgattacattcataccgagagcaacagcggcatttgcaacaagaataccgattgctccaagaccgataacaccgagggtcttgcccttgatttcgggaccgacgaactgactcttgcccttttcaaccatcttaccgacagctgcaccgttgcccttgagagtctttgcccattcataaccctcaataaccttacggtttgaaataagaagtcctgcgataacaagctccttaacagcgtttgcgttagcacccggtgtattgaaaacaacaataccctgctcactgcacttatccttcggaatgttgtttgtgcctgcgcctgctcttgcaattgcaagaaggttgtcggcaaattccatatcgtgcattgcggcacttcttacaagaactgcgtcagggttctgaacatcgtcaccgtatttatagttatcaccgagacggcttgtgccgatagcggcgattttgtttaatgtaagaatgttatacatcaaaatcaatcctttttaattttttattttaagaatttacaataacaggcgaacagcgttcgcccgttatatcataatattcaataattacttgttttcagcctcgaacttcttcataaactcaacgagtttttcaacgccctcataaggcatagcgttgtaaattgaagctctcataccgccgactgtgcgatgacccttgatattaacaagaccgttttcagtagcctctttaacgaatttagcgtcaaggtcagcgtcacctgtaacgaacggaacattcataagcgaacgatcctcgggaacaacagtacccttgaaaagctctgaagaatcgaggaaaccgtagagaaggtcagccttctttttgttgatttcatacatcttatcaagaccgccaacctcgttcttaatccactcaagaacaagctttgcaatgtagattgtgtagcaaggcggtgtgttgaacattgaaccgttgtcagcgtgagttttccagttaagcattgtaggagtgatatccatagcgttgccgataagatcctcacgaacgataacaaccgtaagacctgccggagccatgttcttctgcgcgcctgcatagagaacgccgaactttgaaacatcaatcggtcttgaaagaatacaggaagaaatatctgcaacgagcggaacatcacctgtgtcgggaagctcgtgataaacagtaccgtaaattgtgttgttcatacagatgtagaaatagtcagcgtcctttgtgaatgttgaaggatcaagctttggaatgtatgtgaaggtcttgtcagccgatgaagcaacaacattagcctgaccgtaacgggcagcctctgcatgagcctttttagcccactgacctgtaataacataatcagccttaccgctctttgtcataaggttcatagggatagccgcaaactgtgttgacgcaccgccctgaaggaaaagaaccttgtagttgtcaggaatgttcataacctctctcaaaagagcctcggcaccctcgatgattgtaccgtaaatttttgagcggtgtgacatttccataacgctctgaccactgccttcgtagtcgagcatttctgccgcagcttttttaagcacagactcaggcagcattgaaggacctgccgaaaaattatatactcttgccatttctgatatctccctttttaaagaaaatttaaaaatatagttgtaaaaataaatacattttaattatacgcttttagcacgctaaagtcaataaattcatagcactaaagcataaaaaacgaaaaatttcgtgattctgttgtgcaaatgaatcagccaagcttaattttgccgatacaaccaacgatttcatctctcatacgctcagcctctttacgagcggcaacggcaaagtcatcttctgtaagcccctgctttttccatgcacacataatgccgcggcttgagttgatgattgcaccaagaccgttttcgtcaaatgcgtttttaacatcatcggcaccgccgccctgagcaccgtaaccgggaacaaggaagaatgtgtgcggaagttttgctctcatttcaccgagctgttcgggatatgttgcacccacaactgcgcctactgccgaatagccatgcttacccataaggtcttcgccccagccttcgcacatcttgcccatatgctcataaacgctctcatttgtttcaagcttcatatcctgaagttcgcccgagcttgggtttgaagtttttacaagaacaaaaatgcccttgtcgtccgaatcgcaaatttttgcaagcggcttgataccgtctgttccgaggtagccgtttaccgtgagtgcgtctgcaccgaatgcgtcaatactttcgcctgcaacatctgtatgaccgaggtgtgccgtagcatatgcctccatagttgtgccgatatcgttacgcttgccgtctgtgataacgaacataccctttgactttgcataagcgattgtgtcgcaaagagccttaacaccctgccagccatacatttcataatatgcagcctgtggctttacggcaggaacaatatcataaagtgcgtcaataagcgccttgttgaattcaaaaagtgcagcagccgcaccctcaagcgtcttgccatacttttcaaagcattttgttttgattgattcgggaacatagtcaagcttaggatcaagacctgcaaccgtaggattctgcatttttacaatattttcgataagtctgtcaaatgccatagtgattctcctcattttttgttattctttctatggtcgggcaaacaattcatatcccgactgcaatatcttttttacaatgctgttgttcgcccctacgaattattattttttagctgttgataatatcataaagttcatttgagaacttgtaataatcctgtctgtcctcttttacgaactgaattgcaggacggggatgtgtgttgtactgacctgtgagaaggtacggaatatcgtaaccccacttaacgccctcagccttaaacttgtgggtgtactcctcaatgattttgagaataggagcaacctgatacttcgggttcttgaggaaaccgagaagaagttcaagcgcacagttgcctgcgcctctgcccatgccgtcaacggttgcgtcaaggtagctgacaccctgagtcatagcctcaattgtgttggcaaaagcaagctgctggttgttgtgagcgtgaataccgactgacttgccgtacttgtcggcaattgagcagtaaaggtctgcaagtcgtcttgactcctcgggatagagtgcgccgtagctgtcaacaatgtagaaagcgtttacgggagttttgccgagagtttcaagagccgctgtaatatcctcggttcttgcctttgaaacagccataatattgattgttgtttcgtagcccttctttgcagcgtcctcaatcatttcaacagccgcaggaattgcgttgatgtatgttgcaactctgatgaggtcaatcgggctgtccttctttgcgataatatccttcttaaaatctgttctgccgacatcagccataacagcgattttaagagaagtcttgttgtcgcctacaatttttctgatatctgcatcgttacagaatttccacttaccgaaatcttcttcgttaaagatttcctttgatgccttgtagccgaattccatataatcaacaccggctttaacatttgcattgtaaagagccttgataaatttgtcgtcaaatctgaaatcgttacaaagaccgccgtcacggattgttgcgtctactactctgatgtcctgtcttaccgacaggaggtcgcctttctgtgccataattttactcctttatgttaaagtttatattaaattaaatttatttggtgagcgaacacggcgagccgccgtccccaattcgtgcagacagtttgacaaataaaaaacatttatgcccgagcgtagtacagctaccgtttgcacaattttaatcgtatcaacatctacaattaaaacaaactcaatcttcaaaaactaccttaccgccgaggattgtctttttgactttaccagtgagggttctgcccttgaacggggtgtttttgcttttgccgtgaagtttaccagcatcaactgtccattcttcatcgggatttataagaacaacatcggcatttgcaccgactgaaagtgtgcctgcgttgattttcaaaatccttgcaggattaacactcatcttctcaacaagctgtgaaagcgtcattctgcctgtcttaaccaggtatgtgttgcagaccgcaaacgaggtttccatgccgattgaaccgttgggggcttttataaaatcagccttttcctcgggtgtgtgcggtgcgtggtcggttgctatggcatcaagcgtaccgtcacaaagcccgttgataatctcgttaacatcagcctgagtcctgagaggcggattcattctgtaatcagcgtcacctcttaaaagctccctgtccgtgagcgaaacataatgcggagcggtttcggcggtcaccttaacacctctccttttggcatcacggataagtgcaacgcttgttttggtgctgacatggcagatatgaataggctcattaagagcggcggcaagtgcaatttctcttgcagttccgcagtcctcggcaccggcagggattcccttgacaccgagcttttccgaaacctcgccctcattaattttaccgccgtcggcaagaaacaagtcctcgcaatgtgcgacaattgtcatgccgagctttggagcttttttcattgcgtcactcaaatactttgtgttttcaacaggtctgccgtcatcggtaagtgctattgcacctgcacttttcacagcgtcaatgtctgtgggttcttcgcttttaagccccttggtaacgcttgccgcaacataaacacggctgtcggcgtctttagccttgtcaagaatatactttacaatttcggggctgtcggttgtgggattggtgttaggcattgcaagcaggcttgtaacaccgcctgcggcagccgccttgcatcccgtgataatatcctctttgtgagtctgaccgggatcacgaagatgcacatgcatatcaacaaaccccggaacggcacaaagaccgtctgcatcaataatctccccgtctgatgtaatgccgctgctgatttcggcaatcacgccgttctttatgagaatatctgttttttcgttaagcttgtcggcaggggaaacaaccactgcgtttttaattagcatttccatgtttttcctccgttaagaaaagaaattatcttctcttgtttctgtttgcagggcggtgattctgctgggggcgtcggtcggttctgctgtgaacctgaacaagtccgtcactttcgcctctttcggcacgcattcttgcacgctctgccttttgtctttctctctctcttctctcttcctctgcctttttgcgtttggcaatcgcacgcttatgctttatcattattgaaacattcttgcagaaatatccgcagtgaatgccaaaattcttaactccgcctgcaaagctcctgagagcgttaccgatgtttttgcctacattggcaagaacctcttccgttgaccgtttatcattcggttcaccctcggtttctttattattctctttttcaagagcgttctgctttacggtttctgcttttctttcaacctcgccgataacatcaacgtcctcggcatctctgaggtctgagcttttgataacccccattgactttttgggagcttcgtcaaaaaagtcataaccgctgtcaaacttgtttttcttagcctttgcccttacaagctcctcgtcatcaacctcttccccggtttcctcttcgggatcgtcgctgccgaaaatgatgtttgcgtactcgtcaacctttttttcaagcggatgcttttgttcggaaacctcctcggtttcttcaacatcggcatcgtcctcacggtcgatatcgtcaggctcgcttgtttcaaaaagatcgtgttcgggttcggggataacgagtgtaggacccgacgaagagcttatgtcctcgtatttttcaggtgtttctgcgttatctttttcgttttcgtcaattttttcgggttcagtctctgaggtatctgctgcggtaggctccttttttttttcgtcctccgtgctgttttcctcgtaaccgtagttgtttttatatgcctcacgctcaagctcactcttgtaagccttcgcggagttgattatctcgtcaatttctttttccttggcatcatccgtgtcataaccaaagtttgaatactcacttgtaatttcttccggttcttccatgttttcgattatcggctcgggagcatatcttctgcccggcgaagccggttcttcttcaacctcttccgcatatctctgctttttctttgagtgtttatcgggcttttcgggagaatcgtcaaaattgtcaatgtcgtagtctgtacccttttcaccgagtttatacttgactgcaagctcctcaagaatagcgttattcttcttagcctttttatgctttctgattctcacggcaaaaattatgatgagaacaatcaaaataaggataacaacaccgccgccgatgattatgtacggaataaatccctttgaaaacggcaagtcgctgaattttaccgaagatacaactttggaaaaagtatcgtagtcaacggttgtaacatcaccctctgttctctgcattgtgatattaatgttcataccgtcataaaccgtgttggcaacaaaggttttcacatcgcccttactgctctgagcagttgcgtcaaacacaagccacacaactttttctttttggtcgggagtacagctccgatactcgtcggaattaagaaaattgttgcgtatatttgcaagctcgcttgaagaaagctgagcatagttgccaacattctcgctgctctcattttttgtcattgtcacggtcagaataaccgatgacatattatccataccctgaagatagatatttccgttctgaaaggttttcattgttgtgtcatagtcaagaccgaaaacagaaaaatatttatctgtgcttttactgtcccttgtaacagcgctcataccgtcaggcattgaaagcgtcatatcgtcaatctgcggaatctcgtaatcttttgttgcgcctgaacaggcaaaaataccgcaaaataccgttacggcacaaattgcaagcgttacagctcttttaaaaacagttttcatcatgtccgtatattcccccgaaactaaattagattcatcaatactgctttttagaatgtatatctaattaattatacataatctgtcaaaaaaatacaaggtttttaccgtttaaatttgaaaacaagagtaccctattcgtgaatgcagtatgatattaaagaacatattacgcctgagcgtgcataaaattgaaaatggaaaatggaaaatggaaaatggaaaattatggtcgagaagacaattcgcaagaatgcaaaacattctcgcccgactgtttttgtatattttcggtatatacggaagttgttgcaaaactgtatgtacggatattatccgcctgcagataaccacgcaaagatttgtacaaattaaaattatataaataaacattcactttcatataaaacaaaaattgcatcaatgccgtatcgggcatcaatgcaatttctttatctgactatcttctcgaattgactgcggtggcacaccgccaaccgaaattttcaattttcaattttcaattttcaattaaaaacaagaccgccgtttattctacagtaaccgacttagcaaggttctttggcttatcgggatcaatacctctgttgattgatgtgtaataagcaagaatctggagtggaacaaccgctgtaatcggcataagaagctcgtctgtatgcggaatttcgataacataatccgcaacaccgtccttgagttctcttacacaggcgtctgtacaaacaagaataacctttgcacctcttgacttaacctcaacaacattgctgattgtcttggggataatacctgtctgagttgcaacggcgataaccggaacatcctcgtcaataagcgaaattgtgccgtgcttcaactcgcctgcggcgtagctttctgagtgaatgtacgaaacctctttgagcttgagtgaaccctccattgaaagggcatagtcaagacctctgcctatgtaaagcaagctgtcggttgcaacaagctttgtggcaacgaacttgcagatatcctcgcagttgtcgattacatactgaactgcctcaggcatttttgtgagagccgaaacaagtcgcttgcactcggctgtgctgattgtttcctttgcaagagcaagctcaaaggcaaagagatacataacggaaagctgtgtgatgtatgcctttgttgacggaacggaaatttcgggacctgcgagtgtgtagatgagcatatccgcctcacgggcaattgaactgccctttgcgtttacgattgcaagggttttggcacccttctgctttgcaagacgcattgcggcaaggctgtcggctgtttcgcccgactgtgaaatgatgattacaaggtcgccctcgcctacaatcggatttctgtaacggaactcggacgcaatgtcaacatttacgggaactcttgcgatatcctcaataacatacttgccgaccatacctgcgtgcatggcagtaccgcaggcaacgattgtgatatttttgaaattcttgattgtttccgttgtgatgccgcattcctcaaggaacggaagtccctctttgattctcggcataatcgttgttctgatagcctcgggctgttcgttgatttccttaatcataaagtgcggataaccgcccttttcggcagcctccatatcccagtcggctgtctgaagttccttttcaatcggatcaaggtgttcgtcaacgaacgaaacaccgtcaggtgaaagtgttacgatttcatcatggtcaagaagataataatcccttgtgtactgaagaattgcaggaacatcggacgcaataaagcactcaccctctgcaacgcctacgataagaggactttcacggcgaaccgcaaaaactctgtcggggaaatccttgaacataattccgagtgcaaacgagccctcaagctcagccattacactgtcaattgtttcaagaggatttccgttgtatttatagtcgaggagctgagcaacaacctctgtatctgtgtcgcttaaaaaagttcttccctttgagatgaggaagtctttaagctccatatagttttcaataataccgttgtgaacgattgtaacccttgtaccgctgtgtggatgtgagtttacatccgaaggctcgccgtgggttgcccaacgggtgtgacctatgccgacatgacctttcggagtgccgacctctgcaagcttatcctttaagtcctgaagcttgcccttggtctttacggtcttgatttctccgttatcaaaaaccgcaatacctgccgagtcatagcctctgtattcaagctttgtgagagcattaacaagcacctcactgcaatccttaggccctacataacctacaataccgcacataaaatttctccttttcggttaatcattgaccttgtggcaaaaagtaggtacaagttctgccaaaagttcaactgtcttttcactgtcattgttttctgcggtctttttgagaacctcaagctttgacagcatatctgtttcgtctattttaatttgatttcctatgaaaattttcttgttctgtgttgacttaagaccttcttcgtccataagaagctcctcaaaaagcttttcacccggacgaagtcccgtaaagataatcggaacatctttgtacggaaccttaccgtacattctgataaggttctcggcaagggttgtaatcttgacaggagcacccatatcaagaacaaaaatctcaccgccctttgccattgcacctgcctcaagaacaagcgaaacagcctcgggaatagtcatgaaatatctgataatatcgggatgtgttacggtaacgggcgcaccgttttcaatctgacggcgaaacagcggaataaccgagccgtttgagccgagaacattaccgaatcttgttgttacaaattcggtatcggtgctgtgctgcgccttgtactgaataatcatctcgcacgcacgctttgttgcgcccataacatttgtcggattaacagccttgtcggttgaaatcataacaaacttctttgccttgtacttttctgcaagggttgcaacattgaatgtgccaaagatgttgttctttacagcctcctcgggaacggtttccataagcggaacatgcttgtgagcggcagcgtggaatacgagttcggggcgatatgtcttgaagataagctccattttgtcgtaatcacgaaccgatgaaataagcgttacaaggttaagctttgtgccgtattcaagcacaagctcctgctgaatgtcatatgcgttgttttcgtagatatcaacaatgatgatttgttttggatcattctttgcaatctgtcttacaagctcactgccgattgaaccgccgccgcctgtaacaagacaaacctttccgttgataaggtcatgaatctcctttcggtcaaactcaatgggttttctgccgagaagatcctcaatcttgatttcctttgcctgtgaaataagctgtgtatgcccgtcatcaaacaaaagctcaccgagataagggataatcttgattttgcactctgttgcggaacagtagtcaagaatcttcctcttctcatcttcctcacatgacggaactgcaacaataatattgtctatacggtattcatcacatattttaacaatttcgggacaggttccgacaacggggattccttcgattttctgattcagctttttcaaatcatcatcgacaaagcataccggaatgatgctttttgaaggattattaacatcaccctgctctttcgcattgtgaatttcacgaacaatcattctgccggcattgcctgcgcccacaataagggtgcgctctccgccctctgcccttcctgcctcggtaaggtcaagaaaagtccttctgaaaacaaaacggaatgcaagaattccgacaagggctattgcgaaatgtactatacaaaaaatctttctctgcggaatctgcaaaaacaacgagattacaaagccgagcgtaaacccagaaaagacggcagttccgcacaccatatagtcctttgcgttaaagtatcgccacaattttgaatatgttccgcttatataaagcgtaaacagacacatgacaagatcaataacaatatagctcaacaagcctttgcttgaagcagcacctatgtagccgacaagcaagagaatataatttgcaagaataccgctgacaacgataataaacacatctgcgagagccagaaacatcttacgcaaattaatcttcttcat

SEQ ID NO: 646 - DNA, 10548 bp, unidentified
  source 1..10548: mol_type = unassigned DNA
ccactggcggcgctcgctttttcttgactgcgcgaccatttacgaatgtggattttcgtttaaagacggtaaatagcaatagaattacggaaatatcaggtcagggcccaagcgcccatcagaatggccagaaacactacattggaaatagtaaacatcgcaaaatagtgccctttttcagcaggtacttcatttgcaatctgtcgataagaaattaggcttgccatggatgcaattaatgtaccaaggccaccaaggtttgtgccaataatcagcgcacggaaattatcggtaaatccagaaagcaggatggcagcaggcacattactggtcacttgagaggccagaactgatacgaaaacctcatggccggccagaatattctgcaaccatccagagaacgcttccatccgacctaagttcccgatgaaaatgaacagtgctacaaaggtaagaatcagagaatagtctacgtggccaagagtggggcggtcggcaaagaaggtgcacaccaagatagcggcgaatgcaacaccgtatgggagaacacgcaatacaaccaataaacaggcgacaaacagaataccgtacaacgcaatgagtttcttgtctggttttgagtttaccgcagaatgagttacaacaatgtcggaaccttcacggcacagccatactgcccatatagcaataagcactaatgatatgatggaataggggagcatcaacagaacaaaagagctcatatccatcccgctcttgccatacaaatacaggttttggggattgcccagtggtgtaagcatactgccaaggttggcaactatcgtctgcatacagacgatagggaggagcagtttgctacgaacagatgcgttcaaagtattcagaacgacaaacgtaaatggtacgaatgttagcagcgatacatcgtttgttatcagcatactgctgaagaagcacaggccaacgagaacaactgttagctgcaaagtggtgcgggtatgagataggagggcatggccgagtctatcaaatacgccttgccctctcagtccggccataactgtcattagcgaaaacaggattgcaagagtacggaaatcgatatatccgaggtattctgcgtccggggggacaaagaaagcggaaatgatcgccaaacaagtggcaatgctcaggacaggttctttctgaaaaatgtgcttaatcatcataaataagattctctttccgaccattcgttatctcttccggacggcaaaaccaaaagctgtaccgcaaataccaccgacaatgtgcataaagttagctacattatcttgtataaagaggacactgtatacctgctggcttaagtacagcacgccaaccaagatgaaggtgatagggacacctccattcttactgccggccaaactggagagcatgatgagcatgaatacgataccggatgcaccaagcaatgcagaagtggggaacagcacacactgcaatatgccggataccagcgcggtcataaggataccgcttagaagtgttcggcttccgtatcgttcttccaaaggtggagcgacaacaaggaagaggagcatattgtttataaagtgattccaaccgccgtggccaaggacatgaccgaacaaccggacatagaatagcggatccgtcatcgacgagcgatacacactaaacaggtgcgaggttgtccagttgtttgttaagtagcccaataccagagaggcgagggacaaaaagaaaaaggtcagtgtgacgggggcattgtattggagtcggatgccgctgcgtttcatagaagttcctccatcattattggatattattagtatagcacattagagcgaaatatgttgcagaatagaaaataatctgggagagtaaaagagaaagtaaataaaaaccatttaaagacgattggatatttcacagggaagatacgcagcagtggtcaaatagtagtcagcaagggctgcccctgcagcgggataatttgtgtactatccttttataataccggaagaggagcacaatgacgcttcaattagataaatatttttatctaataatattgacattcgaagcaaatgtgctataatgacctcattgacaattacgtcaatttatttagttaaattatgtgaggtacgtaatatgagctttgaagaattgaaagaagtatttgttgacaccctgagctgcgatgctgacaaggtcacaatggatgccagcctgaccgacgacctgcaggcggatagcttggatgctgtagagctgaacatggcgtttgaggacaagttcggcgttacgatcgccgacgaggatctggggacgcttaaaaccgtgggcgatatcttcaactatctggctgcacgggcagcctaaagggtattgcggaatgagtgccattgaaaagctgttcccgaccagcccgcaggagcgcagctttcagatgaaagcccgccgcgatgccggtacggctgcgcccaactgggtgccgccgcaatttgtcgagtgcaaaaaatgcggccgccgtgccacgcggcaggtttgggtcaagagccagtatgtctgccccaactgcggggtgcatttggcaatcggcgcctattatcggctcagtacggttctggaccacggaacttttaaagagctgaacccggacattgcgcccaacgatgtgctgcattttcctgattatccggaaaagctggccgctgcttcggtcaagaccggcctgaaagaagccgccgttacagcaaccggcaagatcggcggcgtgcaggcggtggtcgctgtgctggacagccgattttttatgggcagcatgagcactgccgtgggggagaaaatcacccgtgcaatcgaatatgctgctgataaacggcttccgctggttattttttctgccagcggtggagcgcggatgcaggagggcattttcagcctgatgcaaatggcaaaaaccagtgccgcgctggaacggttcagccgcagcggcgggctgtatgtcagtgtgctgacccaccccaccaccggcggtgtcacagccagttttgccagcctgggagacatcacgctggccgaaccgggtgcgctgatcgggtttgccgggccgcgtgtgattgaacagaccatcggagaaaagctgcccgatggtttccagcgcagtgagttccagctggaacacggctttgtggatcaggttgtgccgcgcacggaattaaaagaggttttgacgcggattttgcagctccatacacaggggaggaaatgcagatgatcaaagaggttttgcagcagctggaaccgctggacgcgcagattgatgcattgtgtagcagcaccgatgatgccgaaatggcgaatacgactacccatgccgctgagctggcagagctttccgcgcaggaaaacacgcttttgcagcgctgcacatcactgacgccggaggacagagtttttctggcgcgccgccctgaccgcccgcatatcggcgaaatcatcgacaacctgtttaccgacttttttgagcagtgcggtgaccggcaatgcaaggaggacgcggccattttgtgcggtatcgcgcgattccatgggatgcccgttacggttttggggcatcgcaaaggaacgacgctggaagaaaacctgcgctgcaactttggcatgccgggaccggaaggctaccgcaaggcgctgcgcgtgatgaagcaggcggaaaaattcaggcggcccatcatcacatttattgatacccccggtgcttaccccggtaaggatgccgaggagcgcggccagggggaggccatcgcccgcaacctgatggagatgagcggtctgaccgtcccggtactggccatcgttacgggcgaaggctccagcggcggcgcactggggcttggcgttgccaaccatattttgatgctggaaaacgccgtgtattcggtgttgagccccgaaggatttgccagcattttgtggaaagatgcctcccgcagcggcgaagcctgtaccatgatgaaactgacggcgcaggacttgtatacggatggaattgtggaagagatcatcgccgaaccgctgggcggtgcacagcgcgggcggcagctgcttttcagccggttggataccgccattgccgcgcaccttgccgccttgtgcaagatgagtggaaaggcattggccgaccagagatacaaaaaataccgccgtatcggagaaatgaggggagcatgaaaggcttacagctgctggccaccggcggggcactgcccggccgtgtagtgacgaatgaggatttgagccgacaggtggacaccagcgatgaatggatcacgacccgcaccggcatccgccagcggtattactgcaccgaaagtgaggatgccgccacgctggccatcaccgccgcccgccaggccctggcgcgtagcgggctggcagcaagcgagattgcctgctgcgttgcggcaacgctttcggctccaacggctacccccagtgttgcctgccgtgtgcaggcggccttggggctgccggagaaccggcccgcttttgatgtaaatgcagcttgttccggttttatttatgctattgctgcggcccacgggctgttgaacaccctgggcggacgctatgcgttggtcatcggctgcgaagcgctgtcccgcatggtggacccgaccgaccgcacaacctgcgtactgtttggggatggcgctggtgcggctattctggaactggccgaagatgtgccgtttgccgtcacgttgggcgcgcgggggagcgaagccatccgcgtcggcggccccgcagcctgcgatacggccccgatcacgatggatggcaaggcggtctttcgttttgcggtggaaaccatgccgcgttgcctgcaaaccgtgttggagcgcagccaaaagaccttggctgacctggattgggtcgtctgccatcaggccaatagccgcattattgaccattgtatcaaacacttgcacgcagaaccgtcaaaattttataaaaatatggaccgccatggaaataccagtgctgccagcattcccattgccctgcatgaaatggtggaaaatgatttactgcaccccggccagaccctggcctgcatcggttttggcggcgggctgacctggggcggaatgctgctgacgtatgagggtagaaaatgaagctgctcaatgaaattttaggtacgaaatatcccattatccaaggtggaatggccaatatcgccacgggcgaatttgccgctgcctgctctaacgccggggcgctgggcctgatcggttccggcggtatggatgccgatgccctgagggaaaacatccgccactgccgtgcgctgaccgaccagccttttggtgtcaacatcatgctgatgcacccgcaggcagatgaatttgccaaaatcgtggtggaagaaggcgtaaagatcgtcaccaccggggcaggaaatccgggaaagtacatggcaatgtggaaagcagccggcatcacggttatcccggtggtagctgccgcaatcttagccaaacacctggaaccgcttggcattgacgctgtcattgctgaggggacagagagcggcggccatgtgggggaaatgaccacaatggcgctggtgccgcaggtcgttgatgccgtccatgtgccggtcattgccgcgggcggcattgctgacgggcgcggtttggccgcagcgctggcgctgggggcctgcggcgtgcaggtcggcacctgtctgctggccagcaccgagtgccccatccacgaaaactacaaggcagcgctgctgaaagcccgcgacagtgataccattgtgaccgggcggatcggcggcaccccggtgcgtgtgttgaaaaaccgaatgagccgcgagtatgtccggcaggaaaaagccggggccgacaaaatggcgctggaacgctttacgcttggcagtctgcgcaaggctgtgtttgacggcgacaccgaaaacggaagcctgatggccggacaggccgcggggctgctgcatgaagtccgcccggtagaagagatttttgccgcaatggtaagcgaggcaaagacctgcatcacggggttgtacaaggagaccatctgatgaaattagcatttttatacgctgggcagggcagtcagcatgccggtatgggccaggacctttatgaaacctttcctgccttccgcgccgcctttgacgaagctgccgcagcagtggattttgatttgaaagaagtctgctttaccgatgcggcgggcgtactgaaggaaacgcaatacacccagccttgtatgacagcttttgccgccgctcttaccgctgtgctgcgggagcagggcattatgccggattatgcggcgggcctgtccctgggggagtattccgctttggcctgtgcgggggtgttcgatatgcagacagcggtcgctttaacggctttccgtggcaaagcgatggctgctgccgctgccgggcgcacctgtgggatgacagccgttttgggattggatgaaacatccttgcaggcatgttgcagcgcagccgccgaagagggcgttgtacagatctgcaattacaactgtcccggtcagctggttatcggcggcgagaaagctgctgtagacaaagctgccgacctggcgcttgccgctggggcgcggcgctgcctgccgctgaacgtcagcggtgcgttccatacgctgctgatgcaccccgccggagatgcgctgcgggaaaagttccaatctatccattttgcgccgatgcagttcccggtgctgttcaactgccttgggcatgaaatggcacagaatgacacggtcgccacgctgctggaaaaacaggtgcagtccggcgtacgttgggaagccaccatccgccgtttggcggaactgggggtggataccgccattgagatcggccccggcagggtgttgaccggatttgtgaaaaagacggtgggaaatgctatctcgtgctatccggtggaaactgctgcacagctgcagcagttgctttgcaccatgaaaggagcttgaccatgccgcaaactgaaagcatgcgccgtgccgctctggttacgggcggcgccaagggcattggtcgtgccgtctgccttgcattggccgaaaacggcatgaacattgcagtcaactacgcaggcagcgcagccgcggccgaggaaacagcggctgcctgccgcgcctttggtgtgcaggccatcacgctgcaagcggatgtgcgtagccccgaagcctgccaaaatctggtggaagataccgctgccgcttttgggcggatcgatgtgctggtcaacaatgcgggcatcaccgcggataaactgctgatgcgcatgaccgaatccgactttgagaatgtgctttttaccaacctgaaggggacgtttttctgcaccaaagcagcttcccgcttgatgatgcgccagcggtatggacgtatcatcaatatcagcagtgtggtcggcctgcacgggaacgcgggccaggccaactatgccgccagcaaggcggggctgatcggcctaacgaaaagcgttgccaaagagtacgccgcacgcaatattaccgccaatgcggtggcacctggatttattgaaaccgatatgaccgccgctatgccggaatctgcccgcgccgcagccgcagcggccatcccagcaggcagaatcggccgtgctgaagatgttgccgcggcggtggctttcctggccggggaacaggccggttacatcaccgggcaggttctttgtgttgacggcggaatgggaatgtgaggtgcagctatgaagatagaaaagaaacgccgggtcgttatcaccggccttggcacggtaaacccaaccggcaataccgtggcggaaagctgggccgccgtgaaagctggccgctgcgccgttgggccgatcacggcttttgatacaacggattttaaggtgaaactggccgcagaagtcaaagattttgaccctgccgaacgcattgaccggcgcgaagcccgcaaaatggcgcggtttacccagtttgccgtggccgccgctgacgaagccatccatgacagcggcattgcactggaaaatatcgaccacacacggttcggcgtgatcctgtccagcgggatcggtggtctgcccacgatcgaggaagaacacacccgcggccagcagcgtggctttgaaaaagtcagtccctattttgtccccatgtccatcggcaatatggcggcgggacaggtggccatccgctttggcctgcagggtatgtgcagctgccccaccactgcctgcgcaggcggtaccaatgcgattggggacgcgttccaccgtatccgcgatggatacgaggaccgtatgctctgcggcggcagcgaaagctgcatcagcccgttgggggtgggcggcttcgccagcatgaaagccctctgcaccgcagacgacccggcccgggcctcgatcccctttgatgcccggcgcagcggttttgtgatgggcgagggcagcggtgtgctgctgttggaagaactggagaccgctaaagagcgtggcgctaagatttacgccgaggttgtgggctatggcgctaactgcgatgcttaccattttaccgccccggcaccgggcggtgcaggcggtgcgtcctgtatgcggctggcattggctgatggcggagtggagccggaacagattggctacatcaatgcccatggaacttccacgcatctgaatgacagctgtgagaccgcggccatcaagtcggtttttggcagccacgcgtatgagctggccgtatcctcgaccaagtcaatgaccggccacctgctaggcggcgccggcggggtagagggcgtgtttaccgtgctggccctgcacgatgcctttttgcccgctaccgtcaacctgcaggagccggacccggaactggatctcgactatattcccaaccagggccgcgcgttacaggtggattatgccatgagcgacagcctgggcttcggcggccacaacgcctgtgtggtgttcaagcgctgggagggatgaggatgaactatacacccaatgaaccaccccggaccctgacggcggcggaaatcgaaaagatcctgccgcaccgttacccgtttgctctggtggataagattcttgactatacccccggccagtgggcgcgcggaatcaagtgcgtgacccgcacagagtcgtttttccagggacatttccccggccatccggttatgccgggggtattgattctggaagcccttgcccaaaccggcgcggtggccgcgttgagcctgccggaaaaccgtggaaagattgccctgtttggcggggtaaaaaatgcccgtttccgccgccaggttgtgcccggcgatgtgctgactttggaatgtgagctggtagagcagcatggcccggtgggcatcggcaaagccaccgcctgggtggatggtgtgcgcgcggccaacgccgagctgacatttgttatcacggatgcctgagggctggttttgcatggtggattgtgctataataaattcattaacctacagggggattctcgccatgctggatcagacatttgggcaggtatacacaaaattcaagctgcatttttataaacagatcttcagccgttttgaagaccgtgaagccacgctgacgacggtagaatctttctgcatggaagtcatcatggcactgggggaacccacgattgcgcagttcagccacatgatgaatctttccacccccaacgcagcttataagatcaactccttggtcaaaaaaggctatgtggagcgcatccaatccaccaccgataagcgggaataccgcctgcggccgacccaaaagtacattgattactataacatcagctattcttacctgcatctggttatggagcgtgccaaacagcggttcagccccgatgacctggccaagctggaagaaatgctgcagatcgtatccgatgaactgatgccggaaattcagctgccgaaataaaatatgcattacgataacaaaatgcgaaccacttcgtacaacgtggttcgcattttgtgtttatatgattattctgttggtaactcttggaccttttgaacagattgatgccagccgtacaggacattgcaaaagaacaatctcgccaaaatcaataatccatatcaaacaagtgagccatcgggacagcgtcttcccgttcagcggtcagctttttcaaacgcagcgggtctgtattccagcgtggcgacagtggctgcctttttaagttccatgcgttttcctccttaaggtgtatcagaaaacaaagaaaatgacggatatttcgcaaacacaagcagaatttaaggctttttaacgcaaaatccggctgtgtttgtagaaatagactaaatttttgacttttcagatacaccctaggttgccgtgctttcgccccgccgcaaaactcctaaggcaataccgcataattctaagtgccgatacg
